(19) United States
(12) Patent Application Publication
(10) Pub. No.: US 2019/0136325 A1
(43) Pub. Date: May 9, 2019

(54) METHODS AND COMPOSITIONS FOR DETECTING ESOPHAGEAL NEOPLASIAS AND/OR METAPLASIAS IN THE ESOPHAGUS

(71) Applicant: Case Western Reserve University, Cleveland, OH (US)

(72) Inventors: Sanford D. Markowitz, Pepper Pike, OH (US); Joseph E. Willis, Shaker Heights, OH (US); Helen Moinova, Beachwood, OH (US); Thomas LaFramboise, Shaker Heights, OH (US); Omar de la Cruz Cabrera, Chagrin Falls, OH (US); Amitabh Chak, University Heights, OH (US)

(21) Appl. No.: 15/540,956

(22) PCT Filed: Dec. 30, 2015
(86) PCT No.: PCT/US15/68131

§ 371 Date: Jun. 29, 2017

Related U.S. Application Data
(60) Provisional application No. 62/099,021, filed on Dec. 31, 2014.

(51) Int. Cl. C12Q 1/6886; C12Q 1/6806; C12Q 1/686; C12Q 1/6837

(52) U.S. Cl. CPC C12Q 1/6886; C12Q 1/6806; C12Q 1/686; C12Q 2600/112; C12Q 2600/154; C12Q 2600/16; C12Q 1/6837

(57) ABSTRACT

The disclosure provides methods for identifying genomic loci that are differentially/methylated in neoplastic cancers, e.g., esophageal cancers. Identification of methylated genomic loci, and optionally in combination with the identification of somatic mutations in TP53, has numerous uses, including for example, to characterize disease risk, to predict responsiveness to therapy, to non-invasively diagnose subjects and to treat subjects determined to have gastrointestinal neoplasias.

### RELATED APPLICATIONS

[0001] This application claims the benefit of priority to U.S. provisional application Ser. No. 62/099,021, filed Dec. 31, 2014. The disclosure of the foregoing application is hereby incorporated by reference in its entirety.

### FUNDING

[0002] Work described herein was supported by grant nos. UO1CA152756; US54CA163060; and P50CA150964. The United States Government has certain rights in the invention.

### BACKGROUND

[0003] Over 15,000 new cases of esophageal cancer were diagnosed in 2010, and there were nearly as many deaths from this cancer alone. As with other cancers, this rate can be decreased by improved methods for diagnosis. Although methods for detecting esophageal cancer exist, the methods are not ideal. Generally, a combination of endoscopy, isolation of cells (for example, via collection of cells/tissues from a fluid sample or from a tissue sample), and/or imaging technologies are used to identify cancerous cells and tumors. While upper endoscopy, usually performed by a gastroenterologist, can detect neoplasias of the esophagus, as well as of the stomach and duodenum, it is an uncomfortable and expensive procedure. Other detection procedures, such as barium esophogography are also available, but are associated with false positives, false negatives, and cost and discomfort issues.

[0004] Because of the disadvantages of existing methods for detecting or treating esophageal neoplasias/cancers, new methods are needed for esophageal neoplasia/cancer diagnosis and therapy.

### SUMMARY OF THE DISCLOSURE

[0005] In certain aspects, the present disclosure is based in part on the discovery of particular human genomic DNA regions (also referred to herein as informative loci or patches) in which the cytosines within CpG dinucleotides are differentially methylated in esophageal neoplasia compared to normal human tissues.

[0006] In one embodiment, the method comprises assaying for the presence of differentially methylated genomic loci in a tissue sample or a bodily fluid sample from a subject. The tissue sample may he obtained from biopsies of the gastrointestinal tract, including but not limited to the esophagus and stomach, Tissue samples may he obtained as a biopsy, or as a swab or brushing of the gastrointestinal tract (e.g., esophagus or stomach), or other organs believed to contain cancerous cells or tissues. Exemplary bodily fluids include blood, serum, plasma, saliva, spit, esophageal washing, a blood-derived fraction, or urine. In one embodiment, the method involves methylation-sensitive restriction enzyme(s). In another embodiment, the method involves methylation-sensitive PCR. In another embodiment, the method involves restriction enzyme methylation-sensitive PCR. In yet another embodiment, the method comprises reacting DNA from the sample with a chemical compound that converts non-methylated cytosine bases (also called “conversion-sensitive” cytosines), but not methylated cytosine bases, to a different nucleotide base. In an embodiment, the chemical compound is sodium bisulfite, which converts unmethylated cytosine bases to uracil. The compound-converted DNA is then amplified using a methylation-sensitive polymerase chain reaction (MSP) employing primers that amplify the compound-converted DNA template if cytosine bases within CpG dinucleotides of the DNA from the sample are methylated. Production of a PCR product indicates that the subject has cancer or precancerous adenomas. In some embodiments, compound-converted DNA is amplified by bisulfite specific methylation indifferent PCR primers and methylation of the parental DNA template is inferred by DNA sequence analysis of the bisullite converted and amplified product. Other methods for assaying for the presence of methylated DNA are known in the art, In certain embodiments, the method optionally comprises detecting the presence or absence of a somatic mutation in TP53.

[0007] In another embodiment, the present invention provides a detection method of prognosis of a neoplasia (or metaplasia) (e.g., upper gastrointestinal neoplasia, esophageal neoplasia) in a subject known to have or suspected of having neoplasia (or metaplasia), In some embodiments, the neoplasia is cancer. Such method comprises assaying for the presence of methylated informative loci in a tissue sample or bodily fluid from the subject. In certain cases, it is expected that detection of methylated informative loci in a tissue sample or bodily fluid from the subject is indicative of an advanced state of cancer (e.g., gastrointestinal cancer such as esophageal cancer). In other cases, detection of methylated informative loci in a tissue sample or sample from other bodily fluids may be indicative of a cancer that will respond to therapeutic agents that demethylate DNA or reactivate expression of genes located within methylated informative loci. In certain embodiments, the method optionally comprises detecting the presence or absence of somatic mutation(s) in TP53. In certain cases, detection of somatic mutation(s) in TP53 in a tissue sample or bodily fluid from the subject is indicative of an advanced state of cancer (e.g., gastrointestinal cancer such as esophageal cancer). In other cases, detection of somatic mutation(s) in TP53 in a tissue sample or sample from other bodily fluids may be indicative of a cancer that will respond to therapeutic agents that demethylate DNA or reactivate expression of genes located within methylated informative loci.

[0008] In another embodiment, the present invention provides a method of monitoring over time the status of neoplasia (e.g., gastrointestinal neoplasia such as esophageal neoplasia) in a subject. In some embodiments, the neoplasia is a cancer. In some embodiments, the neoplasia is a metaplasia such as Barrett's esophagus. In certain embodiments, the method optionally comprises detecting the presence or absence of somatic mutation(s) in TP53 in combination with detecting the methylation status of any of the informative loci disclosed. herein. In certain cases, detection of the appearance of somatic mutation(s) in TP53 over time in a tissue sample or bodily fluid from the subject is indicative of neoplastic progression. In other cases, detection of a disappearance of a somatic mutation(s) in TP53 over time in a tissue sample or sample from other bodily fluids may be indicative of neoplastic regression.

[0009] In another embodiment, the present invention provides a method of evaluating therapy in a subject having cancer or suspected of having neoplasia (e.g., gastrointestinal neoplasia such as esophageal neoplasia). In some embodiments, the neoplasia is a cancer. In some embodiments, the neoplasia is a metaplasia such as Barrett's esophagus. in certain embodiments, the method optionally further comprises detecting the presence or absence of somatic mutation(s) in TP53.

[0010] The present invention also relates to oligonucleotide primer sequences for use in assays (e.g., methylation-sensitive PCR assays or HpaII assays) designed to detect the methylation status of the informative methylated genomic loci.

[0011] The present invention also provides a method of inhibiting or reducing growth of neoplasia cells (e.g., gastrointestinal neoplasia such as esophageal neoplasia). In some embodiments, the neoplasia is a cancer. In some embodiments, the neoplasia is a metaplasia such as Barrett's esophagus.

[0012] In some embodiments, the disclosure provides for a method of detecting the presence of an esophageal neoplasia or metaplasia in the esophagus in a human subject, comprising: a) obtaining a human sample; and b) assaying the sample for the presence of methylation within a nucleotide sequence spanning one or more of any of the chromosomal loci having a sequence that is at least 90% identical to the sequence of any one or more of: SEQ ID NOs: 1-856, 2569-3424, 5137-5926; 7507-7558, 7663-7714, 7819-7866, 7963-7990, 8047-8074, 8131-8156, 8209-8222, 8251-8264, 8293-8306, 8335-8348, 8405-8409, or 8420-8424, or complements or fragments thereof; wherein methylation of the nucleotide sequence is indicative of an esophageal neoplasia or metaplasia in the esophagus. In some embodiments, the disclosure provides for a method of detecting an esophageal neoplasia or metaplasia in the esophagus, comprising: a) obtaining a human sample; and b) assaying said sample for the presence of DNA methylation by assay in a bisulfite converted DNA for retention of a cytosine base at any of the Y positions present in one or more of the nucleotide sequences having at least 90% identical to the sequence of any one or more of SEQ ID NOs: 857-1284, 1713-2140, 3425-3852, 4281-4708, 5927-6321, 6717-7111, 7559-7584, 7611-7636, 7715-7740, 7767-7792, 7867-7890, 7915-7938, 7991-8004, 8019-8032, 8075-8088, 8103-8116, 8157-8169, 8183-8195, 8223-8236, 8265-8278, 8307-8320, 8349-8362, 8410-8414 or 8425-8429; wherein methylation of the nucleotide sequence is indicative of metaplasia in the esophagus or esophageal neoplasia. In some embodiments, the sample is assayed for the presence of methylation at any of the Y positions present in one or more of the nucleotide sequences having at least 90% identity to the sequence of any one or more of SEQ ID NOs: 7991-8004, 8019-8032, 8075-8088, 8103-8116, 8157-8169, 8183-8195, 8223-8236, 8265-8278, 8307-8320, 8349-8362, 8410-8414 or 8425-8429. In some embodiments, the disclosure provides for method of detecting an esophageal neoplasia, comprising: a) obtaining a human sample; and b) assaying the sample for the presence of methylation within a nucleotide sequence spanning one or more of any of the chromosomal loci having a sequence that is at least 90% identical to the sequence of any one or more of: SEQ ID NOs: 8447-8818, 9563-9934, 10679-10972, 11561-11662, 11867-11968, 12173-12266, 12455-12466, 12491-12502, 12527-12538, 12563-12568, 12581-12586, 12599-12604, 12617-12622, 12647-12649 or 12656-12658, or complements or fragments thereof. In some embodiments, the disclosure provides for a method of detecting an esophageal neoplasia, comprising: a) obtaining a human sample; and b) assaying the sample for the presence of DNA methylation by assay in a bisulfite converted DNA for retention of a cytosine base at any of the Y positions present in one or more of the nucleotide sequences having at least 90% identical to the sequence of any one or more of SEQ ID NOs: 8819-9004, 9191-9376, 9935-10120, 10307-10492, 10973-11119, 11267-11413, 11663-11713, 11765-11815, 11969-12019, 12071-12121, 12267-12313, 12361-12407, 12467-12472, 12479-12484, 12503-12508, 12515-12520, 12539-12544, 12551-12556, 12569-12574, 12587-12592, 12605-12610, 12623-12628, 12650-12652, or 12659-12661; wherein methylation of the nucleotide sequence is indicative of metaplasia in the esophagus. In some embodiments, the sample is assayed for the presence of DNA methylation by assay in a bisulfite converted DNA for retention of a cytosine base at any of the Y positions present in one or more of the nucleotide sequences having at least 90% identity to the sequence of any one or more of SEQ ID NOs: 11663-11713, 11765-11815, 11969-12019, 12071-12121, 12267-12313, 12361-12407, 12467-12472, 12479-12484, 12503-12508, 12515-12520, 12539-12544, 12551-12556, 12569-12574, 12587-12592, 12605-12610, 12623-12628, 12650-12652, or 12659-12661. In some embodiments, the subject has been assayed for having a somatic mutation in TP53. In some embodiments, the esophageal neoplasia or metaplasia in the esophagus is selected from the group consisting of Barrett's esophagus (BE), and/or, Barrett's esophagus with low grade dysplasia, Barrett's esophagus with high grade dysplasia (HGD), and/or esophageal adenocarcinoma (EAC), in some embodiments, the sample is obtained from a subject suspected of having or is known to have an esophageal neoplasia or metaplasia in the esophagus. In some embodiments, the assay is methylation-specific PCR. In some embodiments, the methods disclosed herein further comprise: a) treating DNA from the sample with a compound that converts a non-methylated cytosine base in the DNA to a different base; b) amplifying a region of the compound converted nucleotide sequence with a forward primer and a reverse primer; and c) analyzing the methylation patterns of the nucleotide sequences. In some embodiments, the methods disclosed herein further comprise: a) treating DNA from the sample with a compound that converts a non-methylated cytosine base in the DNA to a different base; b) amplifying a region of the compound converted nucleotide sequence with a forward primer and a reverse primer; and c) detecting the presence and/or amount of the amplified product. In some embodiments, the compound used to treat DNA is a bisulfite compound. In some embodiments, the assay comprises using a methylation-sensitive restriction enzyme, In some embodiments, the methylation-sensitive restriction enzyme is selected from HpaII, SmaI, SacII, EagI, and BstUI, and BssHII. In some embodiments, the sample is a bodily fluid selected from the group consisting of blood, saliva, spit, an esophageal washing, serum, plasma, a blood-derived fraction, stool, urine, and a colonic effluent. In some embodiments. the sample is derived from a tissue. In some embodiments, the sample is a biopsyl. In some embodiments, the sample is a brushing.

[0013] In some embodiments, the disclosure provides for a method of monitoring over time an esophageal neoplasia or metaplasia in the esophagus comprising: a) detecting the presence of methylation within a nucleotide sequence spanning one or more of any of the chromosomal loci having a sequence that is at least 90% identical to the sequence of any one or more of: SEQ ID NOs: 1-856, 2569-3424, 5137-5926; 7507-7558, 7663-7714, 7819-7866, 7963-7990, 8047-8074, 8131-8156, 8209-8222, 8251-8264, 8293-8306, 8335-8348, 8405-8409, or 8420-8424, or complements or fragments thereof, or complements or fragments thereof; from a sample from a subject for a first time; and b) detecting the level of methylation of the nucleotide sequence in a sample from the same subject at a later time. In some embodiments, the disclosure provides for a method of monitoring over time an esophageal neoplasia or metaplasia in the esophagus comprising: a) detecting the methylation status of DNA by assay in a bisulfite converted DNA for retention of a cytosine base at one or more of the Y positions present in one or more of the nucleotide sequences having at least 90% identity to the sequence of any one or more of: SEQ ID NOs: 857-1284, 1713-2140, 3425-3852, 4281-4708, 5927-6321, 6717-7111, 7559-7584, 7611-7636, 7715-7740, 7767-7792, 7867-7890, 7915-7938, 7991-8004, 8019-8032, 8075-8088, 8103-8116, 8157-8169, 8183-8195, 8223-8236, 8265-8278, 8307-8320, 8349-8362, 8410-8414 or 8425-8429 from a sample from a subject for a first time; and b) detecting the methylation status of the nucleotide sequence in a sample from the same subject at a later time; wherein absence of methylation in the nucleotide sequence taken at a later time and the presence of methylation in the nucleotide sequence taken at the first time is indicative of neoplasia or metaplasia regression; and wherein presence of methylation in the nucleotide sequence taken at a later time and the absence of methylation in the nucleotide sequence taken at the first time is indicative of neoplasia or metaplasia progression. In some embodiments, the disclosure provides for a method of monitoring over time an esophageal neoplasia comprising: a) detecting the presence of methylation within a nucleotide sequence spanning one or more of any of the chromosomal loci having a sequence that is at least 90% identical to the sequence of any one or more of: SEQ ID NOs: 8447-8818, 9563-9934, 10679-10972, 11561-11662, 11867-11968, 12173-12266, 12455-12466, 12491-12502, 12527-12538, 12563-12568, 12581-12586, 12599-12604, 12617-12622, 12647-12649 or 12656-12658, or complements or fragments thereof; from a sample from a subject for a first time; and b) detecting the level of methylation of the nucleotide sequence in a sample from the same subject at a later time. In some embodiments, the disclosure provides for a method of monitoring over time an esophageal neoplasia comprising: a) detecting the methylation status of a DNA molecule by assay in a bisulfite converted DNA for retention of a cytosine base of one or more of the Y positions present in one or more of the nucleotide sequences having at least 90% identity to the sequence of any one or more of: SEQ ID NOs: 8819-9004, 9191-9376, 9935-10120, 10307-10492, 10973-11119, 11267-11413, 11663-11713, 11765-11815, 11969-12019, 12071-12121, 12267-12313, 12361-12407, 12467-12472, 12479-12484, 12503-12508, 12515-12520, 12539-12544, 12551-12556, 12569-12574, 12587-12592, 12605-12610, 12623-12628, 12650-12652, or 12659-12661 from a sample from a subject for a first time; and b) detecting the methylation status of the nucleotide sequence in a sample from the same subject at a later time; wherein absence of methylation in the nucleotide sequence taken at a later time and the presence of methylation in the nucleotide sequence taken at the first time is indicative of neoplasia regression; and wherein presence of methylation in the nucleotide sequence taken at a later time and the absence of methylation in the nucleotide sequence taken at the first time is indicative of neoplasia progression. In some embodiments, the sample is a bodily fluid selected from the group consisting of blood, saliva, spit or an esophageal washing. In some embodiments, the sample is derived from tissue.

[0014] In some embodiments, the disclosure provides for a method of treating a subject having a metaplasia in the esophagus or neoplasia, comprising the step of treating the subject with chemotherapy, radiation therapy and/or with the resection of the neoplasia or metaplasia; and/or with ablation of the neoplasia or metaplasia; wherein the subject has been determined to have methylation in a sequence that is at least 90% identical to the sequence of any one or more of: SEQ ID NOs: 1-856, 2569-3424, 5137-5926; 7507-7558, 7663-7714, 7819-7866, 7963-7990, 8047-8074, 8131-8156, 8209-8222, 8251-8264, 8293 8306, 8335-8348, 8405-8409 or 8420-8424, or complements or fragments thereof. In some embodiments, the disclosure provides for a method of treating a subject having a metaplasia in the esophagus or neoplasia, comprising the step of treating the subject with chemotherapy, radiation therapy and/or with the resection of the neoplasia or metaplasia; and/or with ablation of the neoplasia or metplasia; wherein the subject has been determined to have DNA methylation by assay in a bisulfite converted DNA for retention of a cytosine base of one or more of the Y positions present in one or more of the nucleotide sequences having at least 90% identity to the sequence of any one or more of: SEQ ID NOs: 857-1284, 1713-2140, 3425-3852, 4281-4708, 5927-6321, 6717-7111, 7559-7584, 7611-7636, 7715-7740, 7767-7792, 7867-7890, 7915-7938, 7991-8004, 8019-8032, 8075-8088, 8103-8116, 8157-8169, 8183-8195, 8223-8236, 8265-8278, 8307-8320, 8349-8362, 8410-8414 or 8425-8429. In some embodiments, the disclosure provides for a method of treating a subject having an esophageal neoplasia, comprising the step of treating the subject with chemotherapy, radiation therapy, ablation, and/or with neoplasia resection; wherein the subject has been determined to have methylation methylation within a nucleotide sequence spanning one or more of any of the chromosomal loci having a sequence that is at least 90% identical to the sequence of any one or more of: SEQ ID NOs: 8447-8818, 9563-9934, 10679-10972, 11561-11662, 11867-11968, 12173-12266, 12455-12466, 12491-12502, 12527-12538, 12563-12568, 12581-12586, 12599-12604, 12617-12622, 12647-12649 or 12656-12658, or complements or fragments thereof. In some embodiments, the disclosure provides for a method of treating a subject having an esophageal neoplasia, comprising the step of treating the subject with chemotherapy, radiation therapy, ablation, and/or with neoplasia resection; wherein the subject has been determined to have methylation of a DNA molecule by assay in a bisulfite converted DNA for retention of a cytosine base of one or more of the Y positions present in one or more of the nucleotide sequences having at least 90% identity to the sequence of any one or more of: SEQ ID NOs: 8819-9004, 9191-9376, 9935-10120, 10307-10492, 10973-11119, 11267-11413, 11663-11713, 11765-11815, 11969-12019, 12071-12121, 12267-12313, 12361-12407, 12467-12472, 12479-12484, 12503-12508, 12515-12520, 12539-12544, 12551-12556, 12569-12574, 12587-12592, 12605-12610, 12623-12628, 12650-12652, or 12659-12661. In some embodiments, the subject has been assayed for having a somatic mutation in TP53.

[0015] In some embodiments, the disclosure provides for a bisulfite converted sequence having at least 90% identity to any one or more of SEQ ID NOs: 857-2568, 3425-5136, 5927-7506, 7559-7662, 7715-7818, 7867-7962, 7991-8046, 8075-8130, 8157-8208, 8223-8250, 8265-8292, 8307-8334, 8349-8376, 8410-8419, 8425-8434, and/or fragments thereof, and/or the reverse complements thereof including all unique fragments of these sequences and their reverse complements. In some embodiments, the disclosure provides for a panel of bisulfite converted sequences selected from the sequences having at least 90% identity to any one or more of SEQ ID NOs: 857-2568, 3425-5136, 5927-7506, 7559-7662, 7715-7818, 7867-7962, 7991-8046, 8075-8130, 8157-8208, 8223-8250, 8265-8292, 8307-8334, 8349-8376, 8410-8419, 8425-8434, and/or fragments thereof, and/or the reverse complements thereof including all unique fragments of these sequences and their reverse complements. In some embodiments, the panel corresponds to any combination of the sequences having any of SEQ ID NOs: 8307-8334, 8349-8376, 8410-8419 or 8425-8434. In some embodiments, the disclosure provides for an oligonucleotide primer that hybridizes to any of the sequences having at least 90% identity to any one or more of SEQ ID NOs: 857 -2568, 3425-5136, 5927-7506, 7559-7662, 7715-7818, 7867-7962, 7991-8046, 8075-8130, 8157-8208, 8223-8250, 8265-8292, 8307-8334, 8349-8376, 8410-8419, 8425-8434. In some embodiments, the primer is any of the primers having at least 90% identity to any one or more of SEQ ID NOs: 8377-8404 or 8435-8444, or fragments or complements thereof. In some embodiments, the primers are combined as forward and reverse primers for PCR amplification of any of the bisulfite converted sequences having at least 90% identity to any one or more of SEQ ID NOs: 857-2568, 3425-5136, 5927-7506, 7559-7662, 7715-7818, 7867-7962, 7991-8046, 8075-8130, 8157-8208, 8223-8250, 8265-8292, 8307-8334, 8349-8376, 8410-8419, 8425-8434, and/or fragments thereof, and/or the reverse complements thereof including all unique fragments of these sequences and their reverse complements. In some embodiments, one of the primers in the primer pairs has a nucleotide sequence that is at least 90% identity to any one or more of SEQ ID NOs: 8377-8404 or 8435-8444, or fragments or complements thereof. In some embodiments, the disclosure provides for a panel of primer pairs selected from any of the primer pairs disclosed herein. In some embodiments, the panel corresponds to a combination of primer pairs for amplifying any of the combinations of SEQ ID NOs: 8307-8334, 8349-8376, 8410-8419 or 8425-8434.

[0016] In some embodiments, the disclosure provides for a bisulfite converted sequence having at least 90% identity to any one or more of SEQ. ID NOs: 8819-9562, 9935-10678, 10973-11560; 11663-11866, 11969-12172, 12267-12454; 12467-12490, 12503-12526, 12539-12562, 12569-12580, 12587-12598, 12605-12616, 12623-12634, 12650-12655, and 12659-12664, and the reverse complements thereof, including all unique fragments of these sequences and their reverse complements. In some embodiments, the disclosure provides for a panel of bisulfite converted sequences selected from any of these sequences. In some embodiments, the disclosure provides for an oligonucleotide primer that hybridizes to any of these sequences. In some embodiments, the panel corresponds to any combination of any of the sequences of SEQ ID NOs: 12605-12616, 12623-12634, 12650-12655, or 12659-12664. In some embodiments, the disclosure provides for primers having at least 90% identity to any one or more of SEQ ID NOs: 12635-12646, and 12665-12670, or fragments or complements thereof. In some embodiments, the primers are combined as forward and reverse primers for PCR amplification of any of the bisulfite converted sequences having at least 90% identity to any one or more of SEQ ID NOs: 8819-9562, 9935-10678, 10973-11560; 11663-11866, 11969-12172, 12267-12454; 12467-12490, 12503-12526, 12539-12562, 12569-12580, 12587-12598, 12605-12616, 12623-12634, 12650-12655, and 12659-12664, and the reverse complements thereof, including all unique fragments of these sequences and their reverse complements. In some embodiments, one of the primers in the primer pairs has a nucleotide sequence that is at least 90% identity to any one or more of SEQ ID NOs: 12635-12646, and 12665-12670, or fragments or complements thereof. In some embodiments, the disclosure provides for a panel of primer pairs selected from any of the primer pairs disclosed herein. In some embodiments, the panel corresponds to the combination of primer pairs for amplifying any combination of any of the sequences of SEQ ID NOs: 12605-12616, 12623-12634, 12650-12655, or 12659-12664.

[0017] In some embodiments, the disclosure provides for a method of selecting an individual to undergo a diagnostic procedure to determine the presence of Barrett's esophagus, of Barrett's esophagus with low grade dysplasia, of Barrett's esophagus with high grade dysplasia, or of esophageal adenocarcinoma, by obtaining a biological sample from an individual, and determining the presence in DNA from that sample of DNA methylation present in any of the sequences having at least 90% identity to any one or more of SEQ ID NOs: 1-856, 2569-3424, 5137-5926; 7507-7558, 7663-7714, 7819-7866, 7963-7990, 8047-8074, 8131-8156, 8209-8222, 8251-8264, 8293-8306, 8335-8348, 8405-8409, or 8420-8424, and/or fragments thereof, and/or the reverse complements thereof. In some embodiments, the method further comprises determining the presence of a somatic mutation in TP53. In some embodiments, DNA methylation is detected by cutting one of the DNA sequences with a methylation sensitive restriction enzyme. In some embodiments, DNA methylation is detected by hisulfite converting DNA from the sample and detecting the presence of any of the hisulfite converted DNA sequences having at least 90% identity to any one or more of SEQ ID NOs: 857-2568, 3425-5136, 5927-7506, 7559-7662, 7715-7818, 7867-7962, 7991-8046, 8075-8130, 8157-8208, 8223-8250, 8265-8292, 8307-8334, 8349-8376, 8410-8419, 8425-8434, and/or fragments thereof, and/or the reverse complements thereof including all unique fragments of these sequences and their reverse complements. In some embodiments, the hisulfite converted sequences are detected using any of: DNA sequencing, next generation sequencing, methylation specific PCR, methylation specific PCR combined with a fluorogenic hybridization probe, and real time methylation specific PCR. In some embodiments, the bisulfite converted sequences are detected using PCR amplification employing a PCR primer or primer pair comprising the nucleotide sequence of any of SEQ ID NOs: 8377-8404 or 8435-8444. In some embodiments, the method further comprises the step of determining the nucleotide sequence of the bisuifite converted sequences. In some embodiments, the percent of the target sequence that is methylated in any of the individual target sequences is greater than 1%, or greater than 5%, or greater than 10%. In some embodiments, the biological sample is a tissue sample, including a sample of the esophagus. In some embodiments, the tissue sample is a biopsy or a brushing, including a biopsy or a brushing of the esophagus. In some embodiments, the biological sample is a body fluid. In some embodiments, the body fluid is blood, saliva, spit or an esophageal washing.

[0018] In some embodiments, the disclosure provides for a method of selecting an individual to undergo a diagnostic procedure to determine presence of Barrett's esophagus with low grade dysplasia, of Barrett's esophagus with high grade dysplasia or of esophageal adenocarcinoma; or to undergo a treatment for for Barrett's esophagus with low grade dysplasia, Barrett's esophagus with high grade dysplasia or for esophageal adenocarcinoma; or to undergo enhanced surveillance for the development of Barrett's esophagus with low grade dysplasia, of Barrett's esophagus with high grade dysplasia or of esophageal adenocarcinoma, by obtaining a biological sample from an individual, and determining the presence in DNA from that sample of methylation present in any of the sequences having at least 90% identity to any one or more of SEQ ID NOs: 8447-8818, 9563-9934, 10679-10972, 11561-11662, 11867-11968, 12173-12266, 12455-12466, 12491-12502, 12527-12538, 12563-12568, 12581-12586, 12599-12604, 12617-12622, 12647-12649 or 12656-12658. In some embodiments, the disclosure provides for a method of treating a subject having Barrett's esophagus with low grade dysplasia, Barrett's esophagus with high grade dysplasia esophageal adenocarcinoma, comprising the step of treating the subject with chemotherapy, radiation therapy, and/or with resection of an esophageal lesion or with ablation of an esophageal lesion, wherein the subject has been determined to have methylation at any of the sequences having at least 90% identity to any one or more of SEQ ID NOs: 8447-8818, 9563-9934, 10679-10826, 11561-11662, 11867-11968, 12173-12266, 12455-12466, 12491-12502, 12527-12538, 12563-12568, 12581-12586, 12599-12604, 12617-12622, 12647-12649 or 12656-12658. In some embodiments, the disclosure provides for a method of selecting an individual to undergo enhanced surveillance for the development of Barrett's esophagus with high grade dysplasia or of esophageal adenocarcinoma, wherein the subject has been determined to have methylation at any of the sequences having at least 90% identity to any one or more of SEQ ID NOs: 8447-8818, 9563-9934, 10679-10826, 11561-11662, 11867-11968, 12173-12266, 12455-12466, 12491-12502, 12527-12538, 12563-12568, 12581-12586, 12599-12604, 12617-12622, 12647-12649 or 12656-12658. In some embodiments, the methods disiosed herein further comprises determining the presence of a somatic mutation in TP53. In some embodiments, DNA methylation is detected by cutting one of the DNA sequences with a methylation sensitive restriction enzyme. In some embodiments, DNA methylation is detected by bisulfite converting DNA from the sample and detecting the presence of any of the bisulfite converted DNA sequences having at least 90% identity to any one or more of SEQ ID NOs: 8819-9562, 9935-10678, 10973-11560; 11663-11866, 11969-12172, 12267-12454; 12467-12490, 12503-12526, 12539-12562, 12569-12580, 12587-12598, 12605-12616, 12623 12634, 12650-12655, and 12659-12664, and the reverse complements thereof, including all unique fragments of these sequences and their reverse complements or panels comprising any combination of those sequences, or detecting the presence of uncoverted cytosine residues at any of the Y bases in any of those sequences or panels. In some embodiments, the bisulfite converted sequences or the presence of unconverted cytosine residues at any of the Y bases of these sequence or panels are detected using any of: DNA sequencing, next generation sequencing, methylation specific PCR, methylation specific PCR combined with a fluorogenic hybridization probe, and real time methylation specific PCR. In some embodiments, the bisulfite converted sequences or the presence of unconverted cytosine residues in the bisulfite converted sequences are detected using PCR amplification employing any of the PCR primers or primer pairs disclosed herein. In some embodiments, the percent of the target sequence that is methylated in any of the individual target sequences is greater than 1%, or greater than 5%, or greater than 10%. In some embodiments, the biological sample is a tissue sample, including a sample of the esophagus. In some embodiments, the tissue sample is a biopsy or a brushing, including a biopsy or brushing of the esophagus. In some embodiments, the biological sample is a body fluid. In some embodiments, the body fluid is blood, saliva, spit or an esophageal washing. In some embodiments, the individual is known to have Barrett's esophagus. In some embodiments, the individual is known to have Barrett's esophagus with low grade dysplasia.

[0019] In some embodiments, the disclosure provides for a method of determining the response of an individual with esophageal cancer to therapy by detection in a body fluid of methylation in any of the DNA sequences having at least 90% identity to any one or more of SEQ ID NOs: 1-856, 2569-3424, 5137-5926; 7507-7558, 7663-7714, 7819-7866, 7963-7990, 8047-8074, 8131-8156, 8209-8222, 8251-8264, 8293-8306, 8335-8348, 8405-8409, 8420-8424, 8447-8818, 9563-9934, 10679-10826, 11561-11662, 11867-11968, 12173-12266, 12455-12466, 12491-12502, 12527-12538, 12563-12568, 12581-12586, 12599-12604, 12617-12622, 12647-12649 or 12656-12658 and/or fragments thereof, and/or the reverse complements thereof; wherein increasing levels of methylation over time are indicative of disease progression and a need for a change in therapy, and wherein absence of increase in levels of methylation over time or decrease in levels of methylation over time are indicative that a change in therapy is not required. In some embodiments, any of the methods disclosed herein further comprise detecting the presence of a somatic mutation in TP53. In some embodiments, the DNA methylation is detected by bisulfite converting DNA from a body fluid and detecting the presence of any of the bisulfite converted DNA sequences disclosed herein.

[0020] In some embodiments, the disclosure provides for a method of monitoring over time an esophageal neoplasia comprising: a) detecting in a sample from a subject for a first time (i) the methylation status of one or more of the DNA sequences having at least 90% identity to any one or more of SEQ ID NOs: 1-856, 2569-3424, 5137-5926; 7507-7558, 7663-7714, 7819-7866, 7963-7990, 8047-8074, 8131-8156, 8209-8222, 8251-8264, 8293-8306, 8335-8348, 8405-8409, 8420-8424, 8447-8818, 9563-9934, 10679-10826, 11561-11662, 11867-11968, 12173-12266, 12455-12466, 12491-12502, 12527-12538, 12563-12568, 12581-12586, 12599-12604, 12617-12622, 12647-12649 or 12656-12658 from that sample; and (ii) the somatic mutation status of TP53 from that sample; and b) detecting in a sample from the same subject at a later time (i) the methylation status of one or more of the DNA sequences having at least 90% identity to any one or more of SEQ ID NOs: 1-856, 2569-3424, 5137-5926; 7507-7558, 7663-7714, 7819-7866, 7963-7990, 8047-8074, 8131-8156, 8209-8222, 8251-8264, 8293-8306, 8335-8348, 8405-8409, 8420-8424, 8447-8818, 9563-9934, 10679-10826, 11561-11662, 11867-11968, 12173-12266, 12455-12466, 12491-12502, 12527-12538, 12563-12568, 12581-12586, 12599-12604, 12617-12622, 12647-12649 or 12656-12658; and (ii) the somatic mutation status of TP53 from the same subject at a later time. In some embodiments, the neoplasia regression is indicated by: (i) the sample taken at the first time having methylation in any of Up15-1, Up35-1, Up35-2, Up3, Up27, or Up10, or having a somatic mutation in TP53; and (ii) the sample at a later time lacking methylation in Up15-1, Up35-1, Up35-2, Up3, Up27, Up10, and lacking a somatic mutation in TP53. In some embodiments, the neoplasia progression is indicated by: (i) the sample taken at the first time lacking methylation in Up15-1, Up35-1, Up35-2, Up3, Up27, and Up10, and lacking a somatic mutation in TP53; and (ii) the sample taken at a later time having methylation in any of Up15-1, Up35-1, Up35-2, Up3, Up27, Up10, or having a somatic mutation in TP53. In some embodiments, the biological sample is a tissue sample, including a sample of the esophagus. In some embodiments, the tissue sample is a biopsy or a brushing, including a biopsy or a brushing of the esophagus. In some embodiments, the biological sample is a body fluid. In some embodiments, the body fluid is blood, saliva, spit or an esophageal washing.

[0021] In some embodiments, the disclosure provides for a method of detecting the presence of an esophageal neoplasia in a human subject, comprising: a) obtaining a human sample; and b) detecting the methylation status of one or more of the DNA sequences having at least 90% identity to any one or more of SEQ ID NOs: 1-856, 2569-3424, 5137-5926; 7507-7558, 7663-7714, 7819-7866, 7963-7990, 8047-8074, 8131-8156, 8209-8222, 8251-8264, 8293-8306, 8335-8348, 8405-8409, 8420-8424, 8447-8818, 9563-9934, 10679-10826, 11561-11662, 11867-11968, 12173-12266, 12455-12466, 12491-12502, 12527-12538, 12563-12568, 12581-12586, 12599-12604, 12617-12622, 12647-12649 or 12656-12658 from that sample. In some embodiments, the method further comprises the step of detecting the somatic mutation status of TP53 from that sample. In some embodiments, the TP53 somatic mutation is detected at a later time than the detection of the methylation status of any of the DNA sequences having at least 90% identity to any one or more of SEQ ID NOs: 1-856, 2569-3424, 5137-5926; 7507-7558, 7663-7714, 7819-7866, 7963-7990, 8047-8074, 8131-8156, 8209-8222, 8251-8264, 8293-8306, 8335-8348, 8405-8409, 8420-8424, 8447-8818, 9563-9934, 10679-10826, 11561-11662, 11867-11968, 12173-12266, 12455-12466, 12491-12502, 12527-42538, 12563-42568, 12581-12586, 12599-12604, 12617-12622, 12647-12649 or 12656-12658. In some embodiments, a) the presence of methylation at any of SEQ ID NOs: 1-856, 2569-3424, 5137-5926; 7507-7558, 7663-7714, 7819-7866, 7963-7990, 8047-8074, 8131-8156, 8209-8222, 8251-8264, 8293-8306, 8335-8348, 8405-8409, 8420-8424; and b) the absence of methylation at any one of the combination of Up15-1, Up35-1, Up35-2, Up3. Up27, and Up10; and c) the absence of a somatic mutation in TP53 is indicative of non-dysplastic Barret's esophagus. In some embodiments, a) the presence of methylation at any of SEQ ID NOs: 1-856, 2569-3424, 5137-5926; 7507-7558, 7663-7714, 7819-7866, 7963-7990, 8047-8074, 8131-8156, 8209-8222, 8251-8264, 8293-8306, 8335-8348, 8405-8409, 8420-8424; and b) the absence of methylation in all members of an assay panel selected from any or all of Up15-1, Up35-1, Up35-2, Up3, Up27, and Up10; and c) the absence of a somatic mutation in TP53 is indicative of non-dysplastic Barret's esophagus. In some embodiments, a) the presence of methylation at any of SEQ ID NOs: 1-856, 2569-3424, 5137-5926; 7507-7558, 7663-7714, 7819-7866, 7963-7990, 8047-8074, 8131-8156, 8209-8222, 8251-8264, 8293-8306, 8335-8348, 8405-8409, 8420-8424; and b) the absence of methylation at Up-3 and Up35-2; and c) the absence of a somatic mutation in TP53 is indicative of non-dysplastic Barret's esophagus. In some embodiments, the presence of methylation at any one of Up15-1, Up35-1, Up35-2, Up3, Up27, and Up10; or the presence of a somatic mutation in TP53 is indicative of esophageal adenocarcinoma, of Barrett's esophagus with low grade dysplasia, or of Barrett's esophagus with high grade dysplasia. In some embodiments, the presence of methylation at any one of Up15-1, Up35-1, Up35-2, Up3, Up27, or Up10, is indicative of esophageal adenocarcinoma, of Barrett's esophagus with low grade dysplasia, or of Barrett's esophagus with high grade dysplasia. In some embodiments, the biological sample is a tissue sample, including a sample of the esophagus. In some embodiments, the tissue sample is a biopsy or a brushing, including a biopsy or a brushing of the esophagus. In some embodiments, the biological sample is a body fluid. In some embodiments, the body fluid is blood, saliva, spit or an esophageal washing.

[0022] In some embodiments, the disclosure provides for a bisulfite-converted nucleotide sequence comprising the bisulfite-converted nucleotide sequence of any one of the following: Up3, Up10, Up15-1, Up15-2, Up20-1, Up20-2, Up20-2, Up27, Up35-1, Up35-2, SqBE2, SqBE5, SqBE7, SqBE9, SqBE10, SqBE11-1, SqBE11-2, SqBE13, SqBE14-2, SqBE15, SqBE16-1, SqBE16-2, SqBE17-1, SqBE18, SqBE22-1, SqBE22-2 or SqBE23. In some embodiments, the bisulfite-converted nucleotide sequence of claim 98, wherein the sequence comprises the bisulfite-converted nucleotide sequence of any one of the following: Up3, Up10, Up15-1, Up20-1, Up20-2, Up20-2, Up27, Up35-1, or Up35-2. In some embodiments, the bisulfite-converted nucleotide sequence of claim 98, wherein the sequence comprises the bisulfite-converted nucleotide sequence of any one of the following: SqBE2, SqBE5, SqBE7, SqBE9, SqBE10, SqBE11-1, SqBE11-2, SqBE13, SqBE14-2, SqBE15, SqBE16-1, SqBE16-2, SqBE17-1, SqBE18, SqBE22-1, SqBE22-2 or SqBE23.

[0023] In some embodiments, the disclosure provides for a bisulfite-converted nucleotide sequence comprising a sequence having at least 80%, 85%, 90%, 91%, 92%, 93%, 94%, 95%, 96%, 97%, 98%, 99% or 100% identity to any of the following sequences: SEQ ID NOs: 8307-8313, 8315-8327, 8329-8334, 8349-8355, 8357-8369, 8371-8376, 8410, 8411, 8412, 8414, 8415, 8416, 8417, 8419, 8425, 8426, 8427, 8429, 8430, 8431, 8432, 8434, 12605-12616, 12623-12634, 12650-12655, or 12659-12664. In some embodiments, the sequence comprises a sequence having at least 80%, 85%, 90%, 91%, 92%, 93%, 94%, 95%, 96%, 97%, 98%, 99% or 100% identity to any of the following sequences: SEQ ID NOs: 8307-8313, 8315-8327, 8329-8334, 8349-8355, 8357-8369, 8371-8376, 8410, 8411, 8412, 8414, 8415, 8416, 8417, 8419, 8425, 8426, 8427, 8429, 8430, 8431, or 8432, 8434. In some embodiments, the sequence comprises a sequence having at least 80%, 85%, 90%, 91%, 92%, 93%, 94%, 95%, 96%, 97%, 98%, 99% or 100% identity to any of the following sequences: SEQ ID NOs: 12605-12616, 12623-12634, 12650-12655, or 12659-12664. In some embodiments, the sequence comprises a sequence having at least 80%, 85%, 90%, 91%, 92%, 93%, 94%, 95%, 96%, 97%, 98%, 99% or 100% identity to any of the following sequences: 12652, 12655, 12661, and 12664.

### BRIEF DESCRIPTION OF THE FIGURES

[0024] FIG. 1. shows the sensitivity (percentage of samples detected), the specificity (percentage of samples not detected), the total number of samples studied, and the total number of positive samples from the panel of markers studied in Example 3. Three panels of markers were selected for study.

### DETAILED DESCRIPTION OF THE INVENTION

### I. Definitions

[0025] For convenience, certain terms employed in the specification, examples, and appended claims are collected here. Unless defined otherwise, all technical and scientific terms used herein have the same meaning as commonly understood by one of ordinary skill in the art to which this invention belongs.

[0026] Although methods and materials similar or equivalent to those described herein can be used in the practice or testing of the present invention, suitable methods and materials are described below. The materials, methods and examples are illustrative only, and are not intended to be limiting. All publications, patents and other documents mentioned herein are incorporated by reference in their entirety.

[0027] Each embodiment of the invention described herein may be taken alone or in combination with one or more other embodiments of the invention.

[0028] Throughout this specification, the word “comprise” or variations such as “comprises” or “comprising” will be understood to imply the inclusion of a stated integer or groups of integers but not the exclusion of any other integer or group of integers.

[0029] The articles “a” and “an” are used herein to refer to one or to more than one (i.e., to at least one) of the grammatical object of the article. By way of example, “an element” means one element or more than one element.

[0030] The terms “adenoma” is used herein to describe any precancerous neoplasia or benign tumor of epithelial tissue, for example, a precancerous neoplasia of the gastrointestinal tract, pancreas, and/or the bladder.

[0031] The term “blood-derived fraction” herein refers to a component or components of whole blood. Whole blood comprises a liquid portion (i.e., plasma) and a solid portion (i.e., blood cells). The liquid and solid portions of blood are each comprised of multiple components; e.g., different proteins in plasma or different cell types in the solid portion. One of these components or a mixture of any of these components is a blood-derived fraction as long as such fraction is missing one or more components found in whole blood.

[0032] The term “esphophagus” is intended to encompass the upper portion of the digestive system spanning from the back of the oral cavity, passing downwards through the rear part of the mediastinum, through the diaphragm and into the stomach.

[0033] The term “esophageal cancer” is used herein to refer to any cancerous neoplasia of the esophagus.

[0034] “Barrett's esophagus” as used herein refers to an abnormal change (metaplasia) in the cells of the lower portion of the esophagus. Barrett's is characterized the finding of intestinal metaplasia in the esophagus.

[0035] A “brushing” of the esophagus, as referred to herein, may be obtained using any of the means known in the art. In some embodiments, a brushing is obtained by contacting the esophagus with a brush, a sponge, a balloon, or with any other device or substance that contacts the esophagus and obtains an esophageal sample.

[0036] “Cells,” “host cells” or “recombinant host cells” are terms used interchangeably herein. It is understood that such terms refer not only to the particular subject cell but to the progeny or potential progeny of such a cell. Because certain modifications may occur in succeeding generations due to either mutation or environmental influences, such progeny may not, in fact, be identical to the parent cell, but are still included within the scope of the term as used herein.

[0037] The terms “compound”, “test compound,” “agent”, and “molecule” are used herein interchangeably and are meant to include, but are not limited to, peptides, nucleic acids, carbohydrates, small organic molecules, natural product extract libraries, and any other molecules (including, but not limited to, chemicals, metals, and organometallic compounds).

[0038] The term “compound-converted DNA” herein refers to DNA that has been treated or reacted with a chemical compound that converts unmethylated C bases in DNA to a different nucleotide base. For example, one such compound is sodium bisulfite, which converts unmethylated C to U. If DNA that contains conversion-sensitive cytosine is treated with sodium bisulfite, the compoundconverted DNA will contain U in place of C. If the DNA which is treated with sodium bi sulfite contains only methylcytosine, the compound-converted DNA will not contain uracil in place of the methylcytosine.

[0039] The term “de-methylating agent” as used herein refers agents that restore activity and/or gene expression of target genes silenced by methylation upon treatment with the agent. Examples of such agents include without limitation 5-azacytidine and 5-aza-2′-deoxycytidine.

[0040] The term “detection” is used herein to refer to any process of observing a marker, or a change in a marker (such as for example the change in the methylation state of the marker), in a biological sample, whether or not the marker or the change in the marker is actually detected. In other words, the act of probing a sample for a marker or a change in the marker, is a “detection” even if the marker is determined to be not present or below the level of sensitivity. Detection may be a quantitative, semi-quantitative or non-quantitative observation.

[0041] The term “differentially methylated nucleotide sequence” refers to a region of a genomic loci that is found to be methylated in a in cancer tissues or cell lines, but not methylated in the normal tissues or cell lines.

[0042] The term “neoplasia” as used herein refers to an abnormal growth of tissue. As used herein, the term “neoplasia” may be used to refer to cancerous and non-cancerous tumors, as well as to Barrett's esophagus (which may also be referred to herein as a metaplasia) and Barrett's esophagus with dysplasia. In some embodiments, the Barrett's esophagus with dysplasia is Barrett's esophagus with high grade dysplasia. In some embodiments, the Barrett's esophagus with dysplasia is Barrett's esophagus with low grade dysplasia. In some embodiments, the neoplasia is a cancer (e.g., esophageal adenocarcinoma).

[0043] “Gastrointestinal neoplasia” refers to neoplasia of the upper and lower gastrointestinal tract. As commonly understood in the art, the upper gastrointestinal tract includes the esophagus, stomach, and duodenum; the lower gastrointestinal tract includes the remainder of the small intestine and all of the large intestine.

[0044] The terms “healthy”, “normal,” and “non-neoplastic” are used interchangeably herein to refer to a subject or particular cell or tissue that is devoid (at least to the limit of detection) of a disease condition, such as a neoplasia.

[0045] “Homology” or “identity” or “similarity” refers to sequence similarity between two peptides or between two nucleic acid molecules. Homology and identity can each be determined by comparing a position in each sequence which may be aligned for purposes of comparison. When an equivalent position in the compared sequences is occupied by the same base or amino acid, then the molecules are identical at that position; when the equivalent site occupied by the same or a similar amino acid residue (e.g., similar in steric and/or electronic nature), then the molecules can be referred to as homologous (similar) at that position. Expression as a percentage of horology/similarity or identity refers to a function of the number of identical or similar amino acids at positions shared by the compared sequences. A sequence which is “unrelated or “non-homologous” shares, in some embodiments, less than 40% identity, and in particular embodiments, less than 25% identity with a sequence of the present invention. In comparing two sequences, the absence of residues (amino acids or nucleic acids) or presence of extra residues also decreases the identity and homology/similarity.

[0046] The term “homology” describes a mathematically based comparison of sequence similarities which is used to identify genes or proteins with similar functions or motifs. The nucleic acid and protein sequences of the present invention may be used as a “query sequence” to perform a search against public databases to, for example, identify other family members, related sequences or homologs. Such searches can be performed using the NBLAST and XBLAST programs (version 2.0) of Altschul, et al. (1990) J Mol. Biol. 215:403-10. BLAST nucleotide searches can be performed with the NBLAST program, score=100, wordlength=12 to obtain nucleotide sequences homologous to nucleic acid molecules of the invention. BLAST protein searches can be performed with the XBLAST program, score=50, wordlength=3 to obtain amino acid sequences homologous to protein molecules of the invention. To obtain gapped alignments for comparison purposes, Gapped BLAST can be utilized as described in Altschul et al., (1997) Nucleic Acids Res. 25(17):3389-3402. When utilizing BLAST and Gapped BLAST programs, the default parameters of the respective programs (e.g., XBLAST and BLAST) can be used. See www.ncbi.nlm.nih.gov.

[0047] As used herein, “identity” means the percentage of identical nucleotide or amino acid residues at corresponding positions in two or more sequences when the sequences are aligned to maximize sequence matching, i.e., taking into account gaps and insertions. Identity can be readily calculated by known methods, including but not limited to those described in (Computational Molecular Biology, Lesk, A. M., ed., Oxford University Press, New York, 1988; Biocomputing: informatics and Genome Projects, Smith, D. W., ed., Academic Press, New York, 1993; Computer Analysis of Sequence Data, Part I, Griffin, A. M., and Griffin, H. G., eds., Humana Press, New Jersey, 1994; Sequence Analysis in Molecular Biology, von Heinje, G., Academic Press, 1987; and Sequence Analysis Primer, Gribskov, M. and Devereux, J., eds., M Stockton Press, New York, 1991; and Carillo, H., and Lipman, D., SIAM J. Applied Math., 48: 1073, 1988). Methods to determine identity are designed to give the largest match between the sequences tested. Moreover, methods to determine identity are codified in publicly available computer programs. Computer program methods to determine identity between two sequences include, but are not limited to, the GCG program package (Devereux, J., et al., Nucleic Acids Research 12(1): 387 (1984)), BLASTP, BLASTN, and FASTA (Altschul, S. F. et al., J. Molec. Biol. 215: 403-410 (1990) and Altschul et al. Nuc. Acids Res. 25: 3389-3402 (1997)). The BLAST X program is publicly available from NCBI and other sources (BLAST Manual, Altschul, S., et al., NCBI NLM NIH Bethesda, Md. 20894; Altschul, S., et al., J. Mol. Biol. 215: 403-410 (1990)). The well known Smith Waterman algorithm may also be used to determine identity.

[0048] The term “including” is used herein to mean, and is used interchangeably with, the phrase “including but not limited to.”

[0049] The term “isolated” as used herein with respect to nucleic acids, such as DNA or RNA, refers to molecules in a form which does not occur in nature. Moreover, an “isolated nucleic acid” is meant to include nucleic acid fragments which are not naturally occurring as fragments and would not be found in the natural state.

[0050] The term “methylation-specific PCR” (“MSP”) herein refers to a polymerase chain reaction in which amplification of the compound-converted template sequence is performed. Two sets of primers are designed for use in MSP. Each set of primers comprises a forward primer and a reverse primer. One set of primers, called methylation-specific primers (see below), will amplify the compound-converted template sequence if C bases in CpG dinucleotides within the DNA are methylated. Another set of primers, called unmethylation-specific primers or primers for unmethylated sequences and the like (see below), will amplify the compound-converted template sequences if C bases in CpG dinucleotides within the DNA are not methylated.

[0051] As used herein, the term “nucleic acid” refers to polynucleotides such as deoxyribonucleic acid (DNA), and, where appropriate, ribonucleic acid (RNA). The term should also be understood to include, as equivalents, analogs of either RNA or DNA made from nucleotide analogs, and, as applicable to the embodiment being described, single-stranded (such as sense or antisense) and double-stranded polynucleotides.

[0052] “Operably linked” when describing the relationship between two DNA regions simply means that they are functionally related to each other. For example, a promoter or other transcriptional regulatory sequence is operably linked to a coding, sequence if it controls the transcription of the coding sequence.

[0053] The term “or” is used herein to mean, and is used interchangeably with, the term “and/or”, unless context clearly indicates otherwise.

[0054] The terms “proteins” and “polypeptides” are used interchangeably herein.

[0055] A “sample” includes any material that is obtained or prepared for detection of a molecular marker or a change in a molecular marker such as for example the methylation state, or any material that is contacted with a detection reagent or detection device for the purpose of detecting a molecular marker or a change in the molecular marker.

[0056] As used herein, “obtaining a sample” includes directly retrieving a sample from a subject to be assayed, or directly retrieving a sample from a subject to be stored and assayed at a later time. Alternatively, a sample may be obtained via a second party. That is, a sample may be obtained via, e.g., shipment, from another individual who has retrieved the sample, or otherwise obtained the sample.

[0057] A “subject” is any organism of interest, generally a mammalian subject, such as a mouse, and in particular embodiments, a human subject.

[0058] As used herein, the term “specifically hybridizes” refers to the ability of a nucleic acid probe/primer of the invention to hybridize to at least 12, 15, 20, 25, 30, 35, 40, 45, 50 or 100 consecutive nucleotides of a target sequence, or a sequence complementary thereto, or naturally occurring mutants thereof, such that it has, in sonic embodiments, less than 15%, less than 10%, or less than 5% background hybridization to a cellular nucleic acid (e.g., mRNA er genomic DNA) other than the target gene. A variety of hybridization conditions may be used to detect specific hybridization, and the stringency is determined primarily by the wash stage of the hybridization assay. Generally high temperatures and low salt concentrations give high stringency, while low temperatures and high salt concentrations give low stringency. Low stringency hybridization is achieved by washing in, for example, about 2.0×SSC at 50° C., and high stringency is achieved with about 0.2×SSC at 50° C. Further descriptions of stringency are provided below.

[0059] As applied to polypeptides, the term “substantial sequence identity” means that two peptide sequences, when optimally aligned such as by the programs GAP or BESTFIT using default gap, share at least 90 percent sequence identity, in some embodiments, at least 95 percent sequence identity, or at least 99 percent sequence identity or more. In some embodiments, residue positions which are not identical differ by conservative amino acid substitutions. For example, the substitution of amino acids having similar chemical properties such as charge or polarity is not likely to affect the properties of a protein. Examples include glutamine for asparagine or glutamic acid for aspartic acid.

[0060] An “informative loci” as used herein, refers to any of the nucleic acid sequences disclosed herein that may have altered (e.g, increased) methylation in a sample (e.g., an esophageal tissue sample) from a subject having Barrett's esophagus and/or an esophageal neoplasia as compared to the methylation patterns of the corresponding nucleic acid sequence in a sample from a healthy control subject.

[0061] The term “Up3” as used herein refers to a nucleotide sequence comprising a sequence at least 80%, 85%, 90%, 91%, 92%, 93%, 94%, 95%, 96%, 97%, 98%, 99% or 100% identity to the sequence of SEQ ID NO: 12563, 12581, 12599, 12617, or fragments or reverse complements thereof. In some embodiments, the Up3 sequence refers to a bisulfite converted nucleotide sequence comprising a sequence at least 80%, 85%, 90%, 91%, 92%, 93%, 94%, 95%, 96%, 97%, 98%, 99% or 100% identity to the sequence of SEQ ID NO: 12569, 12587, 12605 or 12623, or fragments or reverse complements thereof. In some embodiments, the Up3 sequence refers to a bisulfite converted product of a methylated nucleotide sequence comprising a. sequence at least 80%, 85%, 90%, 91%, 92%, 93%, 94%, 95%, 96%, 97%, 98%, 99% or 100% identity to the sequence of SEQ ID NO: 12575, 12593, 12611 or 12629, or fragments or reverse complements thereof. In some embodiments, the Up3 sequence may be amplified using primers comprising the sequence of SEQ ID NOs: 12635 and/or 12641, or fragments or reverse complements thereof.

[0062] The term “Up10” as used herein refers to a nucleotide sequence comprising a sequence at least 80%, 85%, 90%, 91%, 92%, 93%, 94%, 95%, 96%, 97%, 98%, 99% or 100% identity to the sequence of SEQ ID NO: 12564, 12582, 12600 or 12618, or fragments or reverse complements thereof. In some embodiments, the Up10 sequence refers to a bisulfite converted nucleotide sequence comprising a sequence at least 80%, 85%, 90%, 91%, 92%, 93%, 94%, 95%, 96%, 97%, 98%, 99% or 100% identity to the sequence of SEQ ID NO: 12570, 12588, 12606 or 12624, or fragments or reverse complements thereof. In some embodiments, the Up10 sequence refers to a bisulfite converted product of a methylated nucleotide sequence comprising a sequence at least 80%, 85%, 90%, 91%, 92%, 93%, 94%, 95%, 96%, 97%, 98%, 99% or 100% identity to the sequence of SEQ ID NO: 12576, 12594, 12612 or 12630, or fragments or reverse complements thereof. In some embodiments, the Up10 sequence may be amplified using primers comprising the sequence of SEQ ID NOs: 12636 and/or 12642, or fragments or reverse complements thereof.

[0063] The term “Up15-1” as used herein refers to a nucleotide sequence comprising a sequence at least 80%, 85%, 90%, 91%, 92%, 93%, 94%, 95%, 96%, 97%, 98%, 99% or 100% identity to the sequence of SEQ ID NO: 12565, 12583, 12601 or 12619, or fragments or reverse complements thereof. In some embodiments, the Up15-1 sequence refers to a bisulfite converted nucleotide sequence comprising a sequence at least 80%, 85%, 90%, 91%, 92%, 93%, 94%, 95%, 96%, 97%, 98%, 99% or 100% identity to the sequence of SEQ ID NO: 12571, 12589, 12607 or 12625, or fragments or reverse complements thereof. In some embodiments, the UP15-1 sequence refers to a bisulfite converted product of a methylated nucleotide sequence comprising a sequence at least 80%, 85%, 90%, 91%, 92%, 93%, 94%, 95%, 96%, 97%, 98%, 99% or 100% identity to the sequence of SEQ ID NO: 12577, 12595, 12613 or 12631 or fragments or reverse complements thereof. In some embodiments, the Up15-1 sequence may be amplified using primers comprising the sequence of SEQ ID NOs: 12637 and/or 12643, or fragments or reverse complements thereof.

[0064] The term “Up15-2” as used herein refers to a nucleotide sequence comprising a sequence at least 80%, 85%, 90%, 91%, 92%, 93%, 94%, 95%, 96%, 97%, 98%, 99% or 100% identity to the sequence of SEQ ID NO: 12565, 12583, 12647 or 12656, or fragments or reverse complements thereof. In some embodiments, the Up15-2 sequence refers to a bisulfite converted nucleotide sequence comprising a sequence at least 80%, 85%, 90%, 91%, 92%, 93%, 94%, 95%, 96%, 97%, 98%, 99% or 100% identity to the sequence of SEQ ID NO: 12571, 12589, 12650 or 12659, or fragments or reverse complements thereof. In some embodiments, the Up15-2 sequence refers to a bisulfite converted product of a methylated nucleotide sequence comprising a sequence at least 80%, 85%, 90%, 91%, 92%, 93%, 94%, 95%, 96%, 97%, 98%, 99% or 100% identity to the sequence of SEQ ID NO: 12577, 12595, 12653 or 12662, or fragments or reverse complements thereof. In some embodiments, the 1415-2 sequence may be amplified using primers comprising the sequence of SEQ ID NOs: 12665 and/or 12668, or fragments or reverse complements thereof.

[0065] The term “UP20-1” as used herein refers to a nucleotide sequence comprising a sequence at least 80%, 85%, 90%, 91%, 92%, 93%, 94%, 95%, 96%, 97%, 98%, 99% or 100% identity to the sequence of SEQ ID NO: 12566, 12584, 12602 or 12620, or fragments or reverse complements thereof. In some embodiments, the Up20-1 sequence refers to a bisulfite converted nucleotide sequence comprising a sequence at least 80%, 85%, 90%, 91%, 92%, 93%, 94%, 95%, 96%, 97%, 98%, 99% or 100% identity to the sequence of SEQ ID NO: 12572, 12590, 12608 or 12626, or fragments or reverse complements thereof. In some embodiments, the Up20-1 sequence refers to a bisulfite converted product of a methylated nucleotide sequence comprising a sequence at least 80%, 85%, 90%, 91%, 92%, 93%, 94%, 95%, 96%, 97%, 98%, 99% or 100% identity to the sequence of SEQ ID NO: 12578, 12596, 12614 or 12632, or fragments or reverse complements thereof. In some embodiments, the Up20-1 sequence may be amplified using primers comprising the sequence of SEQ ID NOs: 12638 and/or 12644, or fragments or reverse complements thereof.

[0066] The term “Up20-2” as used herein refers to a nucleotide sequence comprising a sequence at least 80%, 85%, 90%, 91%, 92%, 93%, 94%, 95%, 96%, 97%, 98%, 99% or 100% identity to the sequence of SEQ ID NO: 12566 12584, 12648 or 12657, or fragments or reverse complements thereof. In some embodiments, the Up20-2 sequence refers to a bisulfite converted nucleotide sequence comprising a sequence at least 80%, 85%, 90%, 91%, 92%, 93%, 94%, 95%, 96%, 97%, 98%, 99% or 100% identity to the sequence of SEQ ID NO: 12572, 12590, 12651 or 12660, or fragments or reverse complements thereof. In some embodiments, the Up20-2 sequence refers to a bisulfite converted product of a methylated nucleotide sequence comprising a sequence at least 80%, 85%, 90%, 91%, 92%, 93%, 94%, 95%, 96%, 97%, 98%, 99% or 100% identity to the sequence of SEQ ID NO: 12578, 12596, 12654 or 12663, or fragments or reverse complements thereof. In some embodiments, the Up20-2 sequence may be amplified using primers comprising the sequence of SEQ ID NOs: 12666 and/or 12669, or fragments or reverse complements thereof.

[0067] The term “Up27” as used herein refers to a nucleotide sequence comprising a sequence at least 80%, 85%, 90%, 91%, 92%, 93%, 94%, 95%, 96%, 97%, 98%, 99% or 100% identity to the sequence of SEQ ID NO: 12567, 12585, 12603 or 12621, or fragments or reverse complements thereof. In some embodiments, the Up27 sequence refers to a bisulfite converted nucleotide sequence comprising a sequence at least 80%, 85%, 90%, 91%, 92%, 93%, 94%, 95%, 96%, 97%, 98%, 99% or 100% identity to the sequence of SEQ ID NO: 12573, 12591, 12609 or 12627, or fragments or reverse complements thereof. In some embodiments, the Up27 sequence refers to a bisulfite converted product of a methylated nucleotide sequence comprising a sequence at least 80%, 85%, 90%, 91%, 92%, 93%, 94%, 95%, 96%, 97%, 98%, 99% or 100% identity to the sequence of SEQ ID NO: 12579, 12597, 12615 or 12633, or fragments or reverse complements thereof. In some embodiments, the Up27 sequence may be amplified using primers comprising the sequence of SEQ ID NOs: 12639 and/or 12645, or fragments or reverse complements thereof.

[0068] The term “Up35-1” as used herein refers to a nucleotide sequence comprising a sequence at least 80%, 85%, 90%, 91%, 92%, 93%, 94%, 96%, 97%, 98%, 99% or 100% identity to the sequence of SEQ ID NO: 12568, 12.586, 12604 or 12622, or fragments or reverse complements thereof. In some embodiments, the Up35-1 sequence refers to a bisulfite converted nucleotide sequence comprising a sequence at least 80%, 85%, 90%, 91%, 92%, 93%, 94%, 95%, 96%, 97%, 98%, 99% or 100% identity to the sequence of SEQ ID NO: 12574, 12592, 12610 or 12628, or fragments or reverse complements thereof. In some embodiments, the Up35-1 sequence refers to a bisulfite converted product of a methylated nucleotide sequence comprising a sequence at least 80%, 85%, 90%, 91%, 92%, 93%, 94%, 95%, 96%, 97%, 98%, 99% or 100% identity to the sequence of SEQ ID NO: 12580, 12598, 12616 or 12634, or fragments or reverse complements thereof. In some embodiments, the Up35-1 sequence may be amplified using primers comprising the sequence of SEQ ID NOs: 12640 and/or 12646, or fragments or reverse complements thereof.

[0069] The term “Up35-2” as used herein refers to a nucleotide sequence comprising a sequence at least 80%, 85%, 90%, 91%, 92%, 93%, 94%, 95%, 96%, 97%, 98%, 99% or 100% identity to the sequence of SEQ ID NO: 12568, 12586, 12649 or 12658, or fragments or reverse complements thereof. In some embodiments, the Up35-2 sequence refers to a bisulfite converted nucleotide sequence comprising a sequence at least 80%, 85%, 90%, 91%, 92%, 93%, 94%, 95%, 96%, 97%, 98%, 99% or 100% identity to the sequence of SEQ ID NO: 12574, 12592, 12652 or 12661, or fragments or reverse complements thereof. In some embodiments, the Up35-2 sequence refers to a bisulfite converted product of a methylated nucleotide sequence comprising a sequence at least 80%, 85%, 90%, 91%, 92%, 93%, 94%, 95%, 96%, 97%, 98%, 99% or 100% identity to the sequence of SEQ ID NO: 12580, 12598, 12655 or 12664, or fragments or reverse complements thereof. In some embodiments, the Up35-2 sequence may be amplified using primers comprising the sequence of SEQ ID NOs: 12667 and/or 12670, or fragments or reverse complements thereof.

[0070] The term “SqBE 2” as used herein refers to a nucleotide sequence comprising a sequence at least 80%, 85%, 90%, 91%, 92%, 93%, 94%, 95%, 96%, 97%, 98%, 99% or 100% identity to the sequence of SEQ ID NO: 8209, 8251, 8293 or 8335, or fragments or reverse complements thereof. In some embodiments, the SqBE 2 sequence refers to a bisulfite converted nucleotide sequence comprising a sequence at least 80%, 85%, 90%, 91%, 92%, 93%, 94%, 95%, 96%, 97%, 98%, 99% or 100% identity to the sequence of SEQ ID NO: 8223, 8265, 8307 or 8349, or fragments or reverse complements thereof. In some embodiments, the SqBE 2 sequence refers to a bisulfite converted product of a methylated nucleotide sequence comprising a sequence at least 80%, 85%, 90%, 91%, 92%, 93%, 94%, 95%, 96%, 97%, 98%, 99% or 100% identity to the sequence of SEQ ID NO: 8237, 8279, 8321 or 8363, or fragments or reverse complements thereof. In some embodiments, the SqBE 2 sequence may be amplified using primers comprising the sequence of SEQ ID NOs: 8377 and/or 8391, or fragments or reverse complements thereof.

[0071] The term “SqBE 5” as used herein refers to a nucleotide sequence comprising a sequence at least 80%, 85%, 90%, 91%, 92%, 93%, 94%, 95%, 96%, 97%, 98%, 99% or 100% identity to the sequence of SEQ ID NO: 8210, 8252, 8294 or 8336, or fragments or reverse complements thereof. In some embodiments, the SqBE 5 sequence refers to a bisulfite converted nucleotide sequence comprising a sequence at least 80%, 85%, 90%, 91%, 92%, 93%, 94%, 95%, 96%, 97%, 98%, 99% or 100% identity to the sequence of SEQ ID NO: 8224, 8266, 8308 or 8350, or fragments or reverse complements thereof. In some embodiments, the SqBE 5 sequence refers to a bisulfite converted product of a methylated nucleotide sequence comprising a sequence at least 80%, 85%, 90%, 91%, 92%, 93%, 94%, 95%, 96%, 97%, 98%, 99% or 100% identity to the sequence of SEQ ID NO: 8238, 8280, 8322 or 8364, or fragments or reverse complements thereof. In some embodiments, the SqBE 5 sequence may be amplified using primers comprising the sequence of SEQ ID NOs: 8378 and/or 8392, or fragments or reverse complements thereof.

[0072] The term “SqBE 7” as used herein refers to a nucleotide sequence comprising a sequence at least 80%, 85%, 90%, 91%, 92%, 93%, 94%, 95%, 96%, 97%, 98%, 99% or 100% identity to the sequence of SEQ ID NO: 8211, 8253, 8295 or 8337, or fragments or reverse complements thereof. In some embodiments, the SqBE 7 sequence refers to a bisulfite converted nucleotide sequence comprising a sequence at least 80%, 85%, 90%, 91%, 92%, 93%, 94%, 95%, 96%, 97%, 98%, 99% or 100% identity to the sequence of SEQ ID NO: 8225, 8267, 8309 or 8351, or fragments or reverse complements thereof. In some embodiments, the SqBE 7 sequence refers to a bisuifite converted product of a methylated nucleotide sequence comprising a sequence at least 80%, 85%, 90%, 91%, 92%, 93%, 94%, 95%, 96%, 97%, 98%, 99% or 100% identity to the sequence of SEQ ID NO: 8239, 8281, 8323 or 8365, or fragments or reverse complements thereof. In some embodiments, the SqBE 7 sequence may be amplified using primers comprising the sequence of SEQ ID NOs: 8379 and/or 8393, or fragments or reverse complements thereof.

[0073] The term “SqBE 9” as used herein refers to a nucleotide sequence comprising a sequence at least 80%, 85%, 90%, 91%, 92%, 93%, 94%, 95%, 96%, 97%, 98%, 99% or 100% identity to the sequence of SEQ ID NO: 8212, 8254, 8296 or 8338, or fragments or reverse complements thereof. In some embodiments, the SqBE 9 sequence refers to a bisulfite converted nucleotide sequence comprising a sequence at least 80%, 85%, 90%, 91%, 92%, 93%, 94%, 95%, 96%, 97%, 98%, 99% or 100% identity to the sequence of SEQ ID NO: 8226, 8268, 8310 or 8352, or fragments or reverse complements thereof. In some embodiments, the SqBE 9 sequence refers to a bisulfite converted product of a methylated nucleotide sequence comprising a sequence at least 80%, 85%, 90%, 91%, 92%, 93%, 94%, 95%, 96%, 97%, 98%, 99% or 100% identity to the sequence of SEQ ID NO: 8240, 8282, 8324 or 8366, or fragments or reverse complements thereof. In some embodiments, the SqBE 9 sequence may be amplified using primers comprising the sequence of SEQ ID NOs: 8380 and/or 8394, or fragments or reverse complements thereof.

[0074] The term “SqBE 10” as used herein refers to a nucleotide sequence comprising a sequence at least 80%, 85%, 90%, 91%, 92%, 93%, 94%, 95%, 96%, 97%, 98%, 99% or 100% identity to the sequence of SEQ ID NO: 8213, 8255, 8297 or 8339, or fragments or reverse complements thereof. In some embodiments, the SqBE 10 sequence refers to a bisulfite converted nucleotide sequence comprising a sequence at least 80%, 85%, 90%, 91%, 92%, 93%, 94%, 95%, 96%, 97%, 98%, 99% or 100% identity to the sequence of SEQ ID NO: 8227, 8269, 8311 or 8353, or fragments or reverse complements thereof. In some embodiments, the SqBE 10 sequence refers to a bisulfite converted product of a methylated nucleotide sequence comprising a sequence at least 80%, 85%, 90%, 91%, 92%, 93%, 94%, 95%, 96%, 97%, 98%, 99% or 100% identity to the sequence of SEQ ID NO: 8241, 8283, 8325 or 8367, or fragments or reverse complements thereof. In some embodiments, the SqBE 10 sequence may be amplified using primers comprising the sequence of SEQ ID NOs: 8381 and/or 8395, or fragments or reverse complements thereof.

[0075] The term “SqBE 11-1” as used herein refers to a nucleotide sequence comprising a sequence at least 80%, 85%, 90%, 91%, 92%, 93%, 94%, 95%, 96%, 97%, 98%, 99% or 100% identity to the sequence SEQ ID NO: 8214, 8256, 8298 or 8340, or fragments or reverse complements thereof. In some embodiments, the SqBE 11-1 sequence refers to a bisulfite converted nucleotide sequence comprising a sequence at least 80%, 85%, 90%, 91%, 92%, 93%, 94%, 95%, 96%, 97%, 98%, 99% or 100% identity to the sequence of SEQ ID NO: 8228, 8270, 8312 or 8354, or fragments or reverse complements thereof. In some embodiments, the SqBE 11-1 sequence refers to a bisulfite converted product of a methylated nucleotide sequence comprising a sequence at least 80%, 85%, 90%, 91%, 92%, 93%, 94%, 95%, 96%, 97%, 98%, 99% or 100% identity to the sequence of SEQ ID NO: 8242, 8284, 8326 or 8368, or fragments or reverse complements thereof. In some embodiments, the SqBE 11-1 sequence may be amplified using primers comprising the sequence of SEQ ID NOs: 8382 and/or 8396, or fragments or reverse complements thereof.

[0076] The term “SqBE 11-2” as used herein refers to a nucleotide sequence comprising a sequence at least 80%, 85%, 90%, 91%, 92%, 93%, 94%, 95%, 96%, 97%, 98%, 99% or 100% identity to the sequence of SEQ ID NO: 8214, 8256, 8405 or 8420, or fragments or reverse complements thereof. In some embodiments, the SqBE 11-2 sequence refers to a bisulfite converted nucleotide sequence comprising a sequence at least 80%, 85%, 90%, 91%, 92%, 93%, 94%, 95%, 96%, 97%, 98%, 99% or 100% identity to the sequence of SEQ ID NO: 8228, 8270, 8410 or 8425, or fragments or reverse complements thereof. In some embodiments, the SqBE 11-2 sequence refers to a hi sulfite converted product of a methylated nucleotide sequence comprising a sequence at least 80%, 85%, 90%, 91%, 92%, 93%, 94%, 95%, 96%, 97%, 98%, 99% or 100% identity to the sequence of SEQ ID NO: 8242, 8284, 8415 or 8430, or fragments or reverse complements thereof. In some embodiments, the SqBE 11-2 sequence may be amplified using primers comprising the sequence of SEQ ID NOs: 8435 and/or 8440, or fragments or reverse complements thereof.

[0077] The term “SqBE 13” as used herein refers to a nucleotide sequence comprising a sequence at least 80%, 85%, 90%, 91%, 92%, 93%, 94%, 95%, 96%, 97%, 98%, 99% or 100% identity to the sequence of SEQ ID NO: 8215, 8257, 8299 or 8341, or fragments or reverse complements thereof. In some embodiments, the SqBE 13 sequence refers to a bisulfite converted nucleotide sequence comprising a sequence at least 80%, 85%, 90%, 91%, 92%, 93%, 94%, 95%, 96%, 97%, 98%, 99% or 100% identity to the sequence of SEQ ID NO: 8229, 8271, 8313 or 8355, or fragments or reverse complements thereof. In some embodiments, the SqBE 13 sequence refers to a bisulfite converted product of a methylated nucleotide sequence comprising a sequence at least 80%, 85%, 90%, 91%, 92%, 93%, 94%, 95%, 96%, 97%, 98%, 99% or 100% identity to the sequence of SEQ ID NO: 8243, 8285, 8327 or 8369, or fragments or reverse complements thereof. In some embodiments, the SqBE 13 sequence may be amplified using primers comprising the sequence of SEQ ID NOs: 8383 and/or 8397, or fragments or reverse complements thereof.

[0078] The term “SqBE 14-2” as used herein refers to a nucleotide, sequence comprising a sequence at least 80%, 85%, 90%, 91%, 92%, 93%, 94%, 95%, 96%, 97%, 98%, 99% or 100% identity to the sequence of SEQ ID NO: 8216, 8258, 8406 or 8421, or fragments or reverse complements thereof. In some embodiments, the SqBE 14-2 sequence refers to a bisulfite converted nucleotide sequence comprising a sequence at least 80%, 85%, 90%, 91%, 92%, 93%, 94%, 95%, 96%, 97%, 98%, 99% or 100% identity to the sequence of SEQ ID NO: 8230, 8272, 8411 or 8426, or fragments or reverse complements thereof. In some embodiments, the SqBE 14-2 sequence refers to a bisulfite converted product of a methylated nucleotide sequence comprising a sequence at least 80%, 85%, 90%, 91%, 92%, 93%, 94%, 95%, 96%, 97%, 98%, 99% or 100% identity to the sequence of SEQ ID NO: 8244, 8286, 8416 or 8431, or fragments or reverse complements thereof. In some embodiments, the SqBE 14-2 sequence may he amplified using primers comprising the sequence of SEQ ID NOs: 8436 and/or 8441, or fragments or reverse complements thereof.

[0079] The term “SqBE 15” as used herein refers to a nucleotide sequence comprising a sequence at least 80%, 85%, 90%, 91%, 92%, 93%, 94%, 95%, 96%, 97%, 98%, 99% or 100% identity to the sequence of SEQ ID NO: 8217, 8259, 8301 or 8343, or fragments or reverse complements thereof. In some embodiments, the SqBE 15 sequence refers to a bisulfite converted nucleotide sequence comprising a sequence at least 80%, 85 , 90%, 91%, 92%, 93%, 94%, 95%, 96%, 97%, 98%, 99% or 100% identity to the sequence of SEQ NO: 8231, 8273, 8315 or 8357, or fragments or reverse complements thereof. In some embodiments, the SqBE 15 sequence refers to a bisulfite converted product of a methylated nucleotide sequence comprising a sequence at least 80%, 85%, 90%, 91%, 92%, 93%, 94%, 95%, 96%, 97%, 98%, 99% or 100% identity to the sequence of SEQ ID NO: 8245, 8287, 8329 or 8371, or fragments or reverse complements thereof. In some embodiments, the SqBE 15 sequence may be amplified using primers comprising the sequence of SEQ ID NOs: 8385 and/or 8399, or fragments or reverse complements thereof.

[0080] The term “SqBE 16-1” as used herein refers to a nucleotide sequence comprising a sequence at least 80%, 85%, 90%, 91%, 92%, 93%, 94%, 95%, 96%, 97%, 98%, 99% or 100% identity to the sequence of SEQ ID NO: 8218, 8260, 8302 or 8344, or fragments or reverse complements thereof. In some embodiments, the SqBE 16-1 sequence refers to a bisulfite converted nucleotide sequence comprising a sequence at least 80%, 85%, 90%, 91%, 92%, 93%, 94%, 95%, 96%, 97%, 98%, 99% or 100% identity to the sequence of SEQ ID NO: 8232, 8274, 8316 or 8358, or fragments or reverse complements thereof. In some embodiments, the SqBE 16-1 sequence refers to a bisulfite converted product of a methylated nucleotide sequence comprising a sequence at least 80%, 85%, 90%, 91%, 92%, 93%, 94%, 95%, 96%, 97%, 98%, 99% or 100% identity to the sequence of SEQ ID NO: 8246, 8288, 8330 or 8372, or fragments or reverse complements thereof. In some embodiments, the SqBE 16-1 sequence may be amplified using primers comprising the sequence of SEQ ID NOs: 8386 and/or 8400, or fragments or reverse complements thereof.

[0081] The term “SqBE 16-2” as used herein refers to a nucleotide sequence comprising a sequence at least 80%, 85%, 90%, 91%, 92%, 93%, 94%, 95%, 96%, 97%, 98%, 99% or 100% identity to the sequence of SEQ ID NO: 8218, 8260, 8407 or 8422, or fragments or reverse complements thereof. In some embodiments, the SqBE 16-2 sequence refers to a bisulfite converted nucleotide sequence comprising a sequence at least 80%, 85%, 90%, 91%, 92%, 93%, 94%, 95%, 96%, 97%, 98%, 99% or 100% identity to the sequence of SEQ ID NO: 8232, 8274, 8412 or 8427, or fragments or reverse complements thereof. In some embodiments, the SqBE 16-2 sequence refers to a bisulfite converted product of a methylated nucleotide sequence comprising a sequence at least 80%, 85%, 90%, 91%, 92%, 93%, 94%, 95%, 96%, 97%, 98%, 99% or 100% identity to the sequence of SEQ ID NO: 8246, 8288, 8417 or 8432, or fragments or reverse complements thereof. In some embodiments, the SqBE 16-2 sequence may be amplified using primers comprising the sequence of SEQ ID NOs: 8437 and/or 8442, or fragments or reverse complements thereof.

[0082] The term “SqBE 17-1” as used herein refers to a nucleotide sequence comprising a sequence at least 80%, 85%, 90%, 91%, 92%, 93%, 94%, 95%, 96%, 97%, 98%, 99% or 100% identity to the sequence of SEQ ID NO: 8219, 8261, 8303 or 8345, or fragments or reverse complements thereof. In some embodiments, the SqBE 17-1 sequence refers to a bisulfite converted nucleotide sequence comprising a sequence at least 80%, 85%, 90%, 91%, 92%, 93%, 94%, 95%, 96%, 97%, 98%, 99% or 100% identity to the sequence of SEQ ID NO: 8233, 8275, 8317 or 8359, or fragments or reverse complements thereof. In some embodiments, the SqBE 17-1 sequence refers to a bisulfite converted product of a methylated nucleotide sequence comprising a sequence at least 80%, 85%, 90%, 91%, 92%, 93%, 94%, 95%, 96%, 97%, 98%, 99% or 100% identity to the sequence of SEQ ID NO: 8247, 8289, 8331 or 8373, or fragments or reverse complements thereof. In some embodiments, the SqBE 17-1 sequence may be amplified using primers comprising the sequence of SEQ ID NOs: 8387 and/or 8401, or fragments or reverse complements thereof.

[0083] The term “SqBE 18” as used herein refers to a nucleotide sequence comprising a sequence at least 80%, 85%, 90%, 91%, 92%, 93%, 94%, 95%, 96%, 97%, 98%, 99% or 100% identity to the sequence of SEQ ID NO: 8220, 8262, 8304 or 8346, or fragments or reverse complements thereof. In some embodiments, the SqBE 18 sequence refers to a bisulfite converted nucleotide sequence comprising a sequence at least 80%, 85%, 90%, 91%, 92%, 93%, 94%, 95%, 96%, 97%, 98%, 99% or 100% identity to the sequence of SEQ ID NO: 8234, 8276, 8318 or 8360, or fragments or reverse complements thereof. In some embodiments, the SqBE 18 sequence refers to a bisulfite converted product of a methylated nucleotide sequence comprising a sequence at least 80%, 85%, 90%, 91%, 92%, 93%, 94%, 95%, 96%, 97%, 98%, 99% or 100% identity to the sequence of SEQ ID NO: 8248, 8290, 8332 or 8374, or fragments or reverse complements thereof. In some embodiments, the SqBE 18 sequence may be amplified using primers comprising the sequence of SEQ ID NOs: 8388 and/or 8402, or fragments or reverse complements thereof.

[0084] The term “SqBE 22-1” as used herein refers to a nucleotide sequence comprising a sequence at least 80%, 85%, 90%, 91%, 92%, 93%, 94%, 95%, 96%, 97%, 98%, 99% or 100% identity to the sequence of SEQ ID NO: 8221, 8263, 8305 or 8347, or fragments or reverse complements thereof. In some embodiments, the SqBE 22-1 sequence refers to a bisulfite converted nucleotide sequence comprising a sequence at least 80%, 85%, 90%, 91%, 92%, 93%, 94%, 95%, 96%, 97%, 98%, 99% or 100% identity to the sequence of SEQ ID NO: 8235, 8277, 8319 or 8361, or fragments or reverse complements thereof. In some embodiments, the SqBE 22-1 sequence refers to a bisulfite converted product of a methylated nucleotide sequence comprising a sequence at least 80%, 85%, 90%, 91%, 92%, 93%, 94%, 95%, 96%, 97%, 98%, 99% or 100% identity to the sequence of SEQ ID NO: 8249, 8291, 8333 or 8375, or fragments or reverse complements thereof. In some embodiments, the SqBE 22-1 sequence may be amplified using primers comprising the sequence of SEQ ID NOs: 8389 and/or 8403, or fragments or reverse complements thereof.

[0085] The term “SqBE 22-2” as used herein refers to a nucleotide sequence comprising a sequence at least 80%, 85%, 90%, 91%, 92%, 93%, 94%, 95%, 96%, 97%, 98%, 99% or 100% identity to the sequence of SEQ ID NO: 8221, 8263, 8409 or 8424, or fragments or reverse complements thereof. In some embodiments, the SqBE 22-2 sequence refers to a bisulfite converted nucleotide sequence comprising a sequence at least 80%, 85%, 90%, 91%, 92%, 93%, 94%, 95%, 96%, 97%, 98%, 99% or 100% identity to the sequence of SEQ ID NO: 8235, 8277, 8414 or 8429, or fragments or reverse complements thereof. In some embodiments, the SqBE 22-2 sequence refers to a bisulfite converted product of a methylated nucleotide sequence comprising a sequence at least 80%, 85%, 90%, 91%, 92%, 93%, 94%, 95%, 96%, 97%, 98%, 99% or 100% identity to the sequence of SEQ ID NO: 8249, 8291, 8419 or 8434, or fragments or reverse complements thereof. In some embodiments, the SqBE 22-2 sequence may be amplified using primers comprising the sequence of SEQ ID NOs: 8439 and/or 8444, or fragments or reverse complements thereof.

[0086] The term “SqBE 23” as used herein refers to a nucleotide sequence comprising a sequence at least 80%, 85%, 90%, 91%, 92%, 93%, 94%, 95%, 96%, 97%, 98%, 99% or 100% identity to the sequence of SEQ ID NO: 8222, 8264, 8306 or 8348, or fragments or reverse complements thereof. In some embodiments, the SqBE 23 sequence refers to a bisulfite converted nucleotide sequence comprising a sequence at least 80%, 85%, 90%, 91%, 92%, 93%, 94%, 95%, 96%, 97%, 98%, 99% or 100% identity to the sequence of SEQ ID NO: 8236, 8278, 8320 or 8362, or fragments or reverse complements thereof. In some embodiments, the SqBE 23 sequence refers to a bisulfite converted product of a methylated nucleotide sequence comprising a sequence at least 80%, 85%, 90%, 91%, 92%, 93%, 94%, 95%, 96%, 97%, 98%, 99% or 100% identity to the sequence of SEQ NO: 8250, 8292, 8334 or 8376, or fragments or reverse complements thereof. In some embodiments, the SqBE 23 sequence may be amplified using primers comprising the sequence of SEQ ID NOs: 8390 and/or 8404, or fragments or reverse complements thereof.

[0087] In some instances, any of the nucleotide sequences disclosed herein contain one or more “Y” positions. Cytosine residues that may be methylated or unmethylated, and hence may be bisulfite converted to T (if unmethylated) or remain as a C methylated), are designated with a “Y.” In some embodiments, a parental nucleotide sequence is fully unmethylated if the sequence comprises a T at every Y position following bisulfite conversion. In some embodiments, a parental nucleotide sequence is fully methylated if the sequence comprises a C at every Y position following bisulfite conversion. In some embodiments, a parental nucleotide sequence is partially methylated if the sequence comprises at least one C at a Y position and at least one T at a Y position of the sequence following bisulfite conversion. In some embodiments, the bisulfite converted sequences disclosed herein comprise at least one C at a Y position and at least one T at a Y position, i.e., the parental sequence is partially methylated.

### II. Overview

[0088] This disclosure is based at least in part on the recognition that differential methylation of particular genomic loci may be indicative of neoplasia of the upper gastrointestinal tract, e.g., esophagus. The present findings demonstrate that methylation at these genomic loci may be a useful biomarker of neoplasia in the upper gastrointestinal tract. The present findings further demonstrate that the status of methylation at these genomic loci used in combination with the status of somatic mutation(s) in TP53 may be a highly sensitive and specific biomarker of neoplasia in the upper gastrointestinal tract.

[0089] In general, neoplasias may develop through one of at least three different pathways, termed chromosomal instability, microsatellite instability, and the CpG island methylator phenotype (CIMP). Although there is some overlap, these pathways tend to present somewhat different biological behavior. By understanding the pathway of tumor development, the target genes involved, and the mechanisms underlying the genetic instability, it is possible to implement strategies to detect and treat the different types of neoplasias.

[0090] This disclosure is based, at least in part, on the recognition that certain target genes may be silenced or inactivated by the differential methylation of CpG islands in the 5′ flanking or promoter regions of the target gene. CpG islands are clusters of cytosine-guanosine residues in a DNA sequence, which are prominently represented in the 5-flanking region or promoter region of about half the genes in our genome. In particular, this application is based at least in part on the recognition that differential methylation of particular genomic loci may be indicative of neoplasia of the upper gastrointestinal tract including, but not limited to, esophageal neoplasia.

[0091] Additionally, this disclosure is based, at least in part, on the recognition that somatic mutations in TP53 (e.g., any of the somatic TP53 mutations disclosed herein), in combination with methylation of certain informative loci as disclosed herein, may serve as useful indicators of neoplasia, including esophageal neoplasia (e.g., esophageal adenocarcinoma). In certain embodiments, the TP53 somatic mutation is any of the TP53 mutations disclosed herein. In certain embodiments, the TP53 somatic mutation is any nonsynonymous somatic mutation known in the art, In certain embodiments, the TP53 somatic mutation is any one or more mutation at any one or more amino acid residue corresponding to amino acid residue 72, 105, 108, 110, 113, 124, 127, 132, 144, 152, 163, 175, 183, 194, 213, 214, 218, 232, 234, 248, 265, 273, 278, 306, 337, 347, or 639 of SEQ ID NO: 16205. In certain embodiments, the TP53 somatic mutation is any one or more mutation selected from the group consisting of: Leu 194Arg, Gly105Asp, Arg273His, Tyr163IIis, IIe232Thr, Arg213Ter, Arg273-His, Arg248Gln, Arg175His, Arg11delinsGlnSer, Ser182Ter, Arg248Gln, Arg337Leu, Lys132Arg, Leu265ThrfsTer7, Arg306Ter, Cys124TrpfsTer25, Pro72Arg, Val218Glu, His214Leu, Gln144Ter, Phe111Ser, Tyr234His, Ser127Phe, Pro278Ala, Ala347Thr, and Pro152Leu of SEQ ID NO: 16205. In certain embodiments, the TP53 mutation is any one or more mutation at any one or more nucleotide position corresponding to nucleotide position 108, 215, 314, 338, 380, 395, 430, 455, 487, 524, 548, 581, 637, 639, 641, 653, 695, 700, 743, 818, 832, 916, 1010, or 1039 of SEQ ID NO: 16206.

[0092] The sequence of SEQ ID NO: 16205 (corresponding to GenBank Accession No. NP_000537.) is as follows:

[sequence omitted]

[0093] The sequence of SEQ ID NO: 16206 (corresponding to GenBank Accession No. NM_000546.5) is as follows:

GATGGGATTGGGGTTTTCCCCTCCCATGTGCTCAAGACTGGCGCT
AAAAGTTTTGAGCTTCTCAAAAGTCTAGAGCCACCGTCCAGGGAGCAGGT
AGCTGCTGGGCTCCGGGGACACTTTGCGTTCGGGCTGGGAGCGTGCTTTC
CACGACGGTGACACGCTTCCCTGGATTGGCAGCCAGACTGCCTTCCGGGT
CACTGCCATGGAGGAGCCGCAGTCAGATCCTAGCGTCGAGCCCCCTCTGA
GTCAGGAAACATTTTCAGACCTATGGAAACTACTTCCTGAAAACAACGTT
CTGTCCCCCTTGCCGTCCCAAGCAATGGATGATTTGATGCTGTCCCCGGA
CGATATTGAACAATGGTTCACTGAAGACCCAGGTCCAGATGAAGCTCCCA
GAATGCCAGAGGCTGCTCCCCCCGTGGCCCCTGCACCAGCAGCTCCTACA
CCGGCGGCCCCTGCACCAGCCCCCTCCTGGCCCCTGTCATCTTCTGTCCC
TTCCCAGAAAACCTACCAGGGCAGCTACGGTTTCCGTCTGGGCTTCTTGC
ATTCTGGGACAGCCAAGTCTGTGACTTGCACGTACTCCCCTGCCCTCAAC
AAGATGTTTTGCCAACTGGCCAAGACCTGCCCTGTGCAGCTGTGGGTTGA
TTCCACACCCCCGCCCGGCACCCGCGTCCGCGCCATGGCCATCTACAAGC
AGTCACAGCACATGACGGAGGTTGTGAGGCGCTGCCCCCACCATGAGCGC
TGCTCAGATAGCGATGGTCTGGCCCCTCCTCAGCATCTTATCCGAGTGGA
AGGAAATTTGCGTGTGGAGTATTTGGATGACAGAAACACTTTTCGACATA
GTGTGGTGGTGCCCTATGAGCCGCCTGAGGTTGGCTCTGACTGTACCACC
ATCCACTACAACTACATGTGTAACAGTTCCTGCATGGGCGGCATGAACCG
GAGGCCCATCCTCACCATCATCACACTGGAAGACTCCAGTGGTAATCTAC
TGGGACGGAACAGCTTTGAGGTGCGTGTTTGTGCCTGTCCTGGGAGAGAC
CGGCGCACAGAGGAAGAGAATCTCCGCAAGAAAGGGGAGCCTCACCACGA
GCTGCCCCCAGGGAGCACTAAGCGAGCACTGCCCAACAACACCAGCTCCT
CTCCCCAGCCAAAGAAGAAACCACTGGATGGAGAATATTTCACCCTTCAG
ATCCGTGGGCGTGAGCGCTTCGAGATGTTCCGAGAGCTGAATGAGGCCTT
GGAACTCAAGGATGCCCAGGCTGGGAAGGAGCCAGGGGGGAGCAGGGCTC
ACTCCAGCCACCTGAAGTCCAAAAAGGGTCAGTCTACCTCCCGCCATAAA
AAACTCATGTTCAAGACAGAAGGGCCTGACTCAGACTGACATTCTCCACT
TCTTGTTCCCCACTGACAGCCTCCCACCCCCATCTCTCCCTCCCCTGCCA
TTTTGGGTTTTGGGTCTTTGAACCCTTGCTTGCAATAGGTGTGCGTCAGA
AGCACCCAGGACTTCCATTTGCTTTGTCCCGGGGCTCCACTGAACAAGTT
GGCCTGCACTGGTGTTTTGTTGTGGGGAGGAGGATGGGGAGTAGGACATA
CCAGCTTAGATTTTAAGGTTTTTACTGTGAGGGATGTTTGGGAGATGTAA
GAAATGTTCTTGCAGTTAAGGGTTAGTTTACAATCAGCCACATTCTAGGT
AGGGGCCCACTTCACCGTACTAACCAGGGAAGCTGTCCCTCACTGTTGAA
TTTTCTCTAACTTCAAGGCCCATATCTGTGAAATGCTGGCATTTGCACCT
ACCTCACAGAGTGCATTGTGAGGGTTAATGAAATAATGTACATCTGGCCT
TGAAACCACCTTTTATTACATGGGGTCTAGAACTTGACCCCCTTGAGGGT
GCTTGTTCCCTCTCCCTGTTGGTCGGTGGGTTGGTAGTTTCTACAGTTGG
GCAGCTGGTTAGGTAGAGGGAGTTGTCAAGTCTCTGCTGGCCCAGCCAAA
CCCTGTCTGACAACCTCTTGGTGAACCTTAGTACCTAAAAGGAAATCTCA
CCCCATCCCACACCCTGGAGGATTTCATCTCTTGTATATGATGATCTGGA
TCCACCAAGACTTGTTTTATGCTCAGGGTCAATTTCTTTTTTCTTTTTTT
TTTTTTTTTTTCTTTTTCTTTGAGACTGGGTCTCGCTTTGTTGCCCAGGC
TGGAGTGGAGTGGCGTGATCTTGGCTTACTGCAGCCTTTGCCTCCCCGGC
TCGAGCAGTCCTGCCTCAGCCTCCGGAGTAGCTGGGACCACAGGTTCATG
CCACCATGGCCAGCCAACTTTTGCATGTTTTGTAGAGATGGGGTCTCACA
GTGTTGCCCAGGCTGGTCTCAAACTCCTGGGCTCAGGCGATCCACCTGTC
TCAGCCTCCCAGAGTGCTGGGATTACAATTGTGAGCCACCACGTCCAGCT
GGAAGGGTCAACATCTTTTACATTCTGCAAGCACATCTGCATTTTCACCC
CACCCTTCCCCTCCTTCTCCCTTTTTATATCCCATTTTTATATCGATCTC
TTATTTTACAATAAAACTTTGCTGCCACCTTTGTGTCTGAGGGGTG.

[0094] Esophageal adenocarcinoma (EAC) has steadily increased in incidence over recent decades. With an 85% mortality rate this cancer is the most rapidly increasing cause of cancer mortality from solid tumors in the American population. There has thus been substantial interest in development of screening approaches for early detection of EAC and its precursor lesions of Barrett's esophagus (BE), However, the majority of EACs develop in patients without prior symptoms, and current approaches of endoscopic screening of individuals with persistent symptoms of gastro-esophageal reflux disease, combined with longitudinal screening of those found to have BE, have accordingly not had significant impact on reducing deaths from EACs.

[0095] As noted above, early detection of gastrointestinal neoplasia (e.g., neoplasia of the upper gastrointestinal tract) coupled with appropriate intervention, is important for increasing patient survival rates. Present systems for screening for esophageal neoplasia are deficient for a variety of reasons, including a lack of specificity and/or sensitivity (e.g., barium swallow) or a high cost and intensive use of medical resources (e.g., upper endoscopy or CT scan). Alternative systems for detection of esophageal neoplasia would be useful in a wide range of other clinical circumstances as well. For example, detecting esophageal neoplasia may select the patient to undergo therapies that include, but are not limited, to resection of the neoplasia (via endoscopic resection or surgical resection), ablation of the neoplasia, chemotherapy, or radiation therapy. As a further example, patients who have received surgical and/or pharmaceutical therapy for esophageal cancer may experience a relapse. It would be advantageous to have an alternative system for determining whether such patients have a recurrent or relapsed neoplasia of the upper gastrointestinal tract. As a further example, an alternative diagnostic system would facilitate monitoring an increase, decrease or persistence of neoplasia of the upper gastrointestinal tract in a patient known to have such a neoplasia. A patient undergoing chemotherapy may be monitored to assess the effectiveness of the therapy.

### Methylation of Informative Loci as Disease Biomarkers

[0096] The present disclosure relates at least in part to the identification of genomic loci whose altered DNA methylation is indicative of the presence of esophageal neoplasias and/or metaplasias that include Barrett's esophagus (BE) and/or esophageal adenocarcinoma (EAC). In some embodiments, the Barrett's esophagus is associated with dysplasia. In some embodiments, the dysplasia is high-grade dysplasia. In some embodiments, the dysplasia is low-grade dysplasia, In some embodiments, the methylation patterns of the informative loci as disclosed herein are determined in a sample taken from a subject as described herein and may be used to distinguish between subjects having Barrett's esophagus and subjects having high grade dysplasia and/or low grade dysplasia and/or esophageal adenocarcinoma. Examples of the informative loci are provided herein.

[0097] In some embodiments, any of the nucleotide sequences disclosed herein, or fragments or reverse complements thereof, may contain one or more “Y” residues. Cytosine residues that may be methylated or unmethylated, and hence may be bisulfite converted to T (if unmethylated) or remain as a C (if methylated), are designated with a “Y.” In some embodiments, one or more of the Y residues in any of the sequences disclosed herein (or fragments or reverse complements thereof) designates a methylated C. In some embodiments, one or more of t:he Y residues in any of the sequences disclosed herein (or fragments or reverse complements thereof) designates an unmethylated C. In some embodiments, at least 1, 2, 3, 4, 5, 6, 7, 8, 9, 10, 11, 12, 13, 14, 15, 16, 17, 18, 19, 20, 21, 22, 23, 24, 25, 26, 27, 28, 29, or 30 of the Y residues in any of the sequences disclosed herein (or fragments or reverse complements thereof) correspond to methylated C residues. In some embodiments, at least 1, 2, 3, 4, 5, 6, 7, 8, 9, 10, 11, 12, 13, 14 15, 16, 17, 18, 19, 20, 21, 22, 23, 24, 25, 26, 27, 28, 29, or 30 of the Y residues in any of the sequences disclosed herein (or fragments or reverse complements thereof) correspond to unmethylated C residues. In some embodiments, at least 10%, 20%, 30%, 40%, 50%, 60%, 70%, 80%, 90%, or 100% of the V residues in any of the sequences disclosed herein (or fragments or reverse complements thereof) correspond to methylated C residues. In some embodiments, at least 10%, 20%, 30%, 40%, 50%, 60%, 70%, 80%, 90%, or 100% of the Y residues in any of the sequences disclosed herein (or fragments or reverse complements thereof) are correspond to unmethylated C residues. In some embodiments, any of the sequences disclosed herein (or fragments or reverse complements thereof) is bisulfite-converted. In some embodiments, at least 1, 2, 3, 4, 5, 6, 7, 8, 9, 10. 11, 12, 13, 14, 15, 16, 17, 18. 19, 20, 21, 22, 23, 24, 25, 26, 27, 28, 29, or 30 of the Y residues in. any of the bisulfite-converted sequences disclosed herein (or fragments or reverse complements thereof) correspond to C. In some embodiments, at least 1, 2, 3, 4, 5, 6, 7, 8, 9, 10, 11, 12, 13, 14, 15, 16, 17, 18, 19, 20, 21, 22, 23, 24, 25, 26, 27, 28, 29, or 30 of the Y residues in any of the bisulfite-converted sequences disclosed herein (or fragments or reverse complements thereof) correspond to T. In some embodiments, at least 10%, 20%, 30%, 40%, 50%, 60%, 70%, 80%, 90%, or 100% of the Y residues in any of the bisulfite-converted sequences disclosed herein (or fragments or reverse complements thereof) correspond to C residues. In some embodiments, at least 10%, 20%, 30%, 40%, 50%, 60%, 70%, 80%, 90%, or 100% of the Y residues in any of the bisulfite-converted sequences disclosed herein (or fragments or reverse complements thereof) correspond to T residues.

[0098] In some embodiments, an informative loci in a subject is considered “methylated” for the purposes of determining whether or not the subject is prone to developing and/or has developed a metaplasia in the esophagus (e.g., Barrett's esophagus) or neoplasia (e.g., Barrett's esophagus with dysplasia such as high-grade or low-grade dysplasia) (e.g., esophageal cancer such as esophageal adenocarcinoma) if the loci is at least 10%, 20%, 30%, 40%, 50%, 60%, 70%, 80%, 90%, or 100% methylated. In some embodiments, a DNA sample from a subject is treated with bisulfite, and the resulting bisulfite sequence corresponds to any of the nucleotide sequences disclosed herein comprising a “Y” nucleotide. In some embodiments, if at least 1, 2, 3, 4, 5, 6, 7 8, 9, 10, 11, 12, 13, 14, 15, 16, 17, 18, 19, 20. 21, 22, 23, 24, 25, 26, 27, 28, 29, or 30 of the Y residues of the bisulfite-converted sequence have a C, the sequence is considered “methylated” for the purposes of determining whether or not the subject is prone to developing and/or has developed a metaplasia in the esophagus (e.g., Barrett's esophagus) or neoplasia (e.g., Barrett's esophagus with dysplasia such as high-grade or low-grade dysplasia) (e.g., esophageal cancer such as esophageal adenocarcinoma). In some embodiments, a DNA sample from a subject is treated with bisulfite, and the resulting bisulfite sequence corresponds to any of the nucleotide sequences disclosed herein comprising a “Y” nucleotide. In some embodiments, if at least 10%, 20%, 30%, 40%, 50%, 60%, 70%, 80%, 90%, or 100% of the Y residues of the bisulfite-converted sequence have a C, the sequence is considered “methylated” for the purposes of determining whether or not the subject is prone to developing and/or has developed a metaplasia in the esophagus (e.g, Barrett's esophagus) or neoplasia (e.g., Barrett's esophagus with dysplasia such as high-grade or low-grade dysplasia) (e.g., esophageal cancer such as esophageal adenocarcinoma). The disclosure provides for informative loci that may be used to assess Whether a subject (e.g. a human) has or is prone to developing a metaplasia in the esophagus (e.g., Barrett's esophagus) or neoplasia (e.g., Barrett's esophagus with dysplasia such as high-grade or low-grade dysplasia) (e.g, esophageal cancer such as esophageal adenocarcinoma). In some embodiments, one or more informative loci, as defined herein, may be used for determining whether a subject has or is likely to develop, a metaplasia (e.g., Barrett's esophagus). In some embodiments, one or more informative loci, as defined herein, may be used for determining whether a subject has or is likely to develop, a neoplasia (e.g., Barrett's esophagus with high grade dysplasia, or an esophageal cancer such as esophageal adenocarcinoma). In some embodiments, one or more informative loci, as defined herein, may be used to distinguish between whether a subject has a metaplasia in the esophagus (e.g., Barrett's esophagus) or an esophageal neoplasia (e.g., Barrett's esophagus with high grade dysplasia, or an esophageal cancer such as esophageal adenocarcinoma).

[0099] In some embodiments, the informative loci include sequences associated with any one or more of the plus strand DNA sequences having at least 80%, 85%, 87%, 90%, 91%, 92%, 93%, 94%, 95%, 96%, 97%, 98%, 99% or 100% identity to any of SEQ ID NOs: 1-428, 2569-2996, 5137-5531, 7507-7532, 7663-7668, 7819-7842, 7963-7976, 8047-8060, 8131-8143, 8209-8222, 8293-8306, 8405-8409, 8447-8632, 9563-9748, 10679-10825, 11561-11611, 11867-11917, 12173-12219, 12455-12460, 12491-12496, 12527-12532, 12563-12568, 12599-12604, 12647-12649, 12671-12907, 14093-14329, 15515-15537, 15653-15692, 15893-15932, 16133-16137, 16163-16165, 16181-16183, or 16199, or fragments or complements thereof. In particular embodiments, the informative loci include sequences associated with any one or more of the plus strand DNA sequences having at least 80%, 85%, 87%, 90%, 91%, 92%, 93%, 94%, 95%, 96%, 97%, 98%, 99% or 100% identity to any of SEQ ID NOs: 7963-7976, 8047-8060, 8131-8143, 12455-12460, 12491-12496, 12527-12532, 16163-16165, 16181-16183, or 16199, or fragments or complements thereof. In some embodiments, the informative loci are associated with increased methylation in both Barrett's esophagus and esophageal adenocarcinoma samples, as compared to the same sample types taken from a healthy control subject. In some embodiments, the informative loci that are associated with increased methylation in both Barrett's esophagus and esophageal adenocarcinoma samples include sequences associated with any one or more of the plus strand DNA sequences having at least 80%, 85%, 87%, 90%, 91%, 92%, 93%, 94%, 95%, 96%, 97%, 98%, 99% or 100% identity to any of SEQ ID NOs: 1-428, 2569-2996, 5137-5531, 7507-7532, 7663-7668, 7819-7842, 7963-7976, 8047-8060, 8131-8143, 8209-8222, 8293-8306, or 8405-8409, or fragments or complements thereof. In particular embodiments, the informative loci that are associated with increased methylation in both Barrett's esophagus and esophageal adenocarcinoma samples include sequences associated with any one or more of the plus strand DNA sequences having at least 80%, 85%, 87%, 90%, 91%, 92%, 93%, 94%, 95%, 96%, 97%, 98%, 99% or 100% identity to any of SEQ ID NOs: 7963-7976, 8047-8060, or 8131-8143, or fragments or complements thereof. In some embodiments, the informative loci are associated with increased methylation in an esophageal adenocarcinoma sample and/or a Barrett's with low grade or high grade dysplasia as compared to a sample of the same type taken from a subject having Barrett's esophagus without dysplasia. In some embodiments, the informative loci that are associated with increased methylation in an esophageal adenocarcinoma sample or a Barrett's with low grade or high grade dysplasia sample include any one or more of the sequences having at least 80%, 85%, 87%, 90%, 91%, 92%, 93%, 94%, 95%, 96%, 97%, 98%, 99% or 100% identity to any of SEQ ID NOs: 8447-8632, 9563-9748, 10679-10825, 11561-11611, 11867-11917, 12173-12219, 12455-12460, 12491-12496, or 12527-12532, or fragments or complements thereof. In particular embodiments, the informative loci that are associated with increased methylation in Barrett's with low grade dysplasia sample include any one or more of the sequences having at least 80%, 85%, 87%, 90%, 91%, 92%, 93%, 94%, 95%, 96%, 97%, 98%, 99% or 100% identity to any of SEQ ID NOs: 12455-12460, 12491-12496, or 12527-12532, or fragments or complements thereof. In particular embodiments, the informative loci that are associated with increased methylation in an esophageal adenocarcinoma sample or a Barrett's with high grade dysplasia sample include any one or more of the sequences having at least 80%, 85%, 87%, 90%, 91%, 92%, 93%, 94%, 95%, 96%, 97%, 98%, 99% or 100% identity to any of SEQ ID NOs: 12455-12460, 12491-12496, or 12527-12532, or fragments or complements thereof. In some embodiments, the informative loci are associated with reduced methylation in an esophageal adenocarcinoma sample as compared to a sample of the same type taken from a subject having Barrett's esophagus. In some embodiments, the informative loci that are associated with reduced methylation in an esophageal adenocarcinoma sample include any one or more of the sequences having at least 80%, 85%, 87%, 90%, 91%, 92%, 93%, 94%, 95%, 96%, 97%, 98%, 99% or 100% identity to any of SEQ ID NOs: 12671-12908, 14093-14329, 15515-15537, 15653-15692, 15893-15932, 16133-16137, 16163-16165, 16181-16183, or 16199, or fragments or complements thereof. In particular embodiments, the informative loci that are associated with reduced methylation in an esophageal adenocarcinoma sample include any one or more of the sequences having at least 80%, 85%, 87%, 90%, 91%, 92%, 93%, 94%, 95%, 96%, 97%, 98%, 99% or 100% identity to any of SEQ ID NOs: 16163-16165, 16181-16183, or 16199, or fragments or complements thereof.

[0100] In some embodiments, the informative loci or amplicon of the informative loci are treated with an agent, such as bisulfite. In some embodiments, the informative loci include sequences that have been treated with bisulfite. In some embodiments, the disclosure provides for bisulfite control sequences of any of the plus DNA strands disclosed herein. In some embodiments, the disclosure provides for bisulfite-treated unmethylated sequences of any of the plus DNA strands disclosed herein. In some embodiments, the bisulfite-converted plus-strand control DNA sequences include any one or more having at least 80%, 85%, 87%, 90%, 91%, 92%, 93%, 94%, 95%, 96%, 97%, 98%, 99% or 100% identity to any of SEQ ID NOs: 857-1284, 3425-3852, 5927-6321, 7559-7584, 7715-7740, 7867-7890, 7991-8004, 8075-8088, 8157-8169, 8223-8236, 8307-8320, 8410-8414, 8819-9004, 9935-10120, 10973-11119, 11663-11713, 11969-12019, 12267-12313, 12467-12472, 12503-12508, or 12539-12544, 12569-12574, 12605-12610, 12650-12652, or fragments or complements thereof. In particular embodiments, the bisulfite-converted plus-strand control DNA sequences include any one or more having at least 80%, 85%, 87%, 90%, 91%, 92%, 93%, 94%, 95%, 96%, 97%, 98%, 99% or 100% identity to any of SEQ ID NOs: 7991-8004, 8075-8088, 8157-8169, 8223-8236, 8307-8320, 8410-8414, 12467-12472, 12503-12508, or 12539-12544, 12569-12574, 12605-12610, 12650-12652, or fragments or complements thereof. In some embodiments, the informative loci are associated with increased methylation in both Barrett's esophagus and esophageal adenocarcinoma samples, as compared to the same sample types taken from a healthy control subject. In some embodiments, the disclosure provides for bisulfite-treated unmethylated sequences of any of the plus DNA strands that are associated with increased methylation in both Barrett's esophagus and esophageal adenocarcinoma samples, as compared to the same sample types taken from a healthy control subject. In some embodiments, the bisulfite converted sequences of any of the plus DNA strands that are associated with increased methylation in both Barrett's esophagus and esophageal adenocarcinoma samples are selected from the group consisting of sequences having at least 80%, 85%, 87%, 90%, 91%, 92%, 93%, 94%, 95%, 96%, 97%, 98%, 99% or 100% identity to any of SEQ ID NOs: 857-1284, 3425-3852, 5927-6321, 7559-7584, 7715-7740, 7867-7890, 7991-8004, 8075-8088, 8157-8169, 8223-8236, 8307-8320, or 8410-8414, or fragments or complements thereof. In particular embodiments, the bisulfite converted sequences of any of the plus DNA strands that are associated with increased methylation in both Barrett's esophagus and esophageal adenocarcinoma samples include any one or more bisulfite-converted methylated plus-strand DNA sequences selected from the group consisting of sequences having at least 80%, 85%, 87%, 90%, 91%, 92%, 93%, 94%, 95%, 96%, 97%, 98%, 99% or 100% identity to any of SEQ ID NOs: 7991-8004, 8075-8088, 8157-8169, 8223-8236, 8307-8320, or 8410-8414, or fragments or complements thereof. In some embodiments, the disclosure provides for bisulfite-treated unmethylated sequences of any of the plus DNA strands that are associated with increased methylation in an esophageal adenocarcinoma sample or a Barrett's with low grade or high grade dysplasia sample as compared to a sample of the same type taken from a subject having Barrett's esophagus without dysplasia. In some embodiments, the bisulfite converted sequences of any of the plus DNA strands that are associated with increased methylation in an esophageal adenocarcinoma sample or a Barrett's with low grade or high grade dysplasia sample include any one or more bisulfite-converted methylated plus-strand DNA sequences selected from the group consisting having at least 80%, 85%, 87%, 90%, 91%, 92%, 93%, 94%, 95%, 96%, 97%, 98%, 99% or 100% identity to any of SEQ lD NOs: 8819-9004, 9935-10120, 10973-11119, 11663-11713, 11969-12019, 12267-12313, 12467-12472, 12503-12508, 12539-12544, 12569-12574, 12605-12610, or 126511-12652, or fragments or complements thereof. In particular embodiments, the bisulfite converted sequences of any of the plus DNA strands that are associated with increased methylation in an esophageal adenocarcinoma sample or a Barrett's with low grade or high grade dysplasia sample include any one or more of the sequences having at least 80%, 85%, 87%, 90%, 91%, 92%, 93%, 94%, 95%, 96%, 97%, 98%, 99% or 100% identity to any of SEQ ID NOs: 12467-12472, 12503-12508, 12539-12544, 12569-12574, 12605-12610, or 12650-12652, or fragments or complements thereof. In some embodiments, the informative loci are associated with reduced methylation in an esophageal adenocarcinoma sample as compared to a sample of the same type taken from a subject having Barrett's esophagus. In some embodiments, the disclosure provides for methylated control sequences of the plus DNA strand that are associated with reduced methylation in an esophageal adenocarcinoma sample as compared to a sample of the same type taken from a subject having Barrett's esophagus. In some embodiments, the methylated control sequences of any of the plus DNA strands that are associated with reduced methylation in an esophageal adenocarcinoma sample include any one or more bisulfite-converted methylated plus-strand DNA sequences selected from the group consisting having at least 80%, 85%, 87%, 90%, 91%, 92%, 93%, 94%, 95%, 96%, 97%, 98%, 99% or 100% identity to any of SEQ ID NOs: 13145-13381, 14567-14803, 15561-15583, 15733-15772, 15973-16012, 16143-16147, 16169-16171, 16187-16189 or 16201, or fragments or complements thereof. In particular embodiments, the methylated control sequences of any of the plus DNA strands that are associated with reduced methylation in an esophageal adenocarcinoma sample include any one or more bisulfite-converted methylated plus-strand DNA sequences selected from the group consisting having at least 80%, 85%, 87%, 90%, 91%, 92%, 93%, 94%, 95%, 96%, 97%, 98%, 99% or 100% identity to any of SEQ ID NOs: 16169-16171, 16187-16189 or 16201, or fragments or complements thereof.

[0101] In some embodiments, the informative loci or amplicon of the informative loci are treated with an agent, such as bisulfite. In some embodiments, the informative loci include sequences that have been treated with bisulfite. In some embodiments, the informative loci include methylated nucleic acid sequences that have been treated with bisulfite. In some embodiments, the bisulfite-converted methylated plus-strand DNA sequences have at least 80%, 85%, 87%, 90%, 91%, 92%, 93%, 94%, 95%, 96%, 97%, 98%, 99% or 100% identity to any of SEQ ID NOs: 1285-1712, 3853-4280, 6322-6716, 7585-7610, 7741-7766, 7891-8005-8018, 8089-8102, 8170-8182, 8237-8250, 8321-8334, 8415-8419, 9005-9190, 10121-10306, 11120-11266, 11714-11764, 12020-12070, 12314-12360, 12473-12478, 12509-12514 or 12545-12550, 12575-12580, 12611-12616, 12653-12655, or fragments or complements thereof. In particular embodiments, the bisulfite-converted methylated plus-strand DNA sequences have at least 80%, 85%, 87%, 90%, 91%, 92%, 93%, 94%, 95%, 96%, 97%, 98%, 99% or 100% identity to any of SEQ ID NOs: 8005-8018, 8089-8102, 8170-8182, 12473-12478, 12509-12514 or 12545-12550, or fragments or complements thereof. In some embodiments, the informative loci are associated with increased methylation in both Barrett's esophagus and esophageal adenocarcinoma samples, as compared to the same sample types taken from a healthy control subject. In some embodiments, the informative loci that are associated with increased methylation in both Barrett's esophagus and esophageal adenocarcinoma samples include any one or more bisulfite-converted methylated plus-strand DNA sequences selected from the group consisting of sequences having at least 80%, 85%, 87%, 90%, 91%, 92%, 93%, 94%, 95%, 96%, 97%, 98%, 99% or 100% identity to any of SEQ ID NOs: 1285-1712, 3853-4280, 6322-6716, 7585-7610, 7741-7766, 7891-7914, 8005-8018, 8089-8102, 8170-8182, 8237-8250, 8321-8334, or 8415-8419, or fragments or complements thereof. In particular embodiments, the informative loci that are associated with increased methylation in both Barrett's esophagus and esophageal adenocarcinoma samples include any one or more bisulfite-converted methylated plus-strand DNA sequences selected from the group consisting of sequences having at least 80%, 85%, 87%, 90%, 91%, 92%, 93%, 94%, 95%. 96%, 97%, 98%, 99% or 100% identity to: SEQ ID NOs: 8005-8018, 8089-8102, 8170-8182, 8237-8250, 8321-8334, or 8415-8419, or fragments or complements thereof. In some embodiments, the informative loci are associated with increased methylation in an esophageal adenocarcinoma sample or a Barrett's with low grade or high grade dysplasia sample as compared to a sample of the same type taken from a subject having Barrett's esophagus without dysplasia. In some embodiments, the informative loci that are associated with increased methylation in an esophageal adenocarcinoma sample or a Barrett's with low grade or high grade dysplasia sample include any one or more bisulfite-converted methylated plus-strand DNA sequences selected from the group consisting of sequences having at least 80%, 85%, 87%, 90%, 91%, 92%, 93%, 94%, 95%, 96%, 97%, 98%, 99% or 100% identity to SEQ ID NOs: 9005-9190, 10121-10306, 11120-11266, 11714-11764, 12020-12070, 12314-12360, 12473-12478, 12509-12514, 12545-12550, 12575-12580, 12611-12616, or 12653-12655, or fragments or complements thereof. In particular embodiments, the informative loci that are associated with increased methylation in an esophageal adenocarcinoma sample or a Barrett's with low grade or high grade dysplasia sample include any one or more of the sequences having at least 80%, 85%, 87%, 90%, 91%, 92%, 93%, 94%, 95%, 96%, 97%, 98%, 99% or 100% identity to SEQ ID NOs: 12473-12478, 12509-12514, 12545-12550, 12575-12580, 12611-12616, or 12653-12655, or fragments or complements thereof. In some embodiments, the informative loci are associated with reduced methylation in an esophageal adenocarcinoma sample as compared to a sample of the same type taken from a subject having Barrett's esophagus. In some embodiments, the informative loci that are associated with reduced methylation in an esophageal adenocarcinoma sample include any one or more bisulfite-converted methylated plus-strand DNA sequences selected from the group consisting of sequences having at least 80%, 85%, 87%, 90%, 91%, 92%, 93%, 94%, 95%, 96%, 97%, 98%, 99% or 100% identity to SEQ ID NOs: 13382-13618, 14804-15040, 15584-15606, 15773-15812, 16013-16052, 16148-16152, 16172-16174, 16190-16192 or 16202. In particular embodiments, the informative loci that are associated with reduced methylation in an esophageal adenocarcinoma sample include any one or more of the sequences having at least 80%, 85%, 87%, 90%, 91%, 92%, 93%, 94%, 95%, 96%, 97%, 98%, 99% or 100% identity to SEQ ID NOs: 16172-16174, 16190-16192 or 16202, or fragments or complements thereof.

[0102] In some embodiments, the informative loci include sequences associated with any of the minus strand DNA sequences having at least 80%, 85%, 87%, 90%, 91%, 92%, 93%, 94%, 95%, 96%, 97%, 98%, 99% or 100% identity to any of SEQ IIS NOs: 429-856, 2997-3424, 5532-5926, 7533-7558, 7689-7714, 7843-7866, 7977-7990, 8061-8074, 8144-8156, 8251-8264, 8335-8348, 8420-8424, 8633-8818, 9749-9934, 10826-10972, 11612-11662, 11918-11968, 12220-12266, 12461-12466, 12497-12502, 12533-12538, 12581-12586, 12617-12622, 12656-12658, 12909-13144, 14330-14566, 15538-15560, 15693-15732, 15933-15972, 16138-16142, 16166-16168, 16184-16186 or 16200, or fragments or complements thereof. In particular embodiments, the informative loci include sequences associated with any of the minus strand DNA sequences having at least 80%, 85%, 87%, 90%, 91%, 92%, 93%, 94%, 95%, 96%, 97%, 98%, 99% or 100% identity to any of SEQ ID NOs: 7977-7990, 8061-8074, 8144-8156, 8251-8264, 8335-8348, 8420-8424, 12461-12466, 12497-12502, 12533-12538, 12581-12586, 12617-12622, 12656-12658, 16166-16168, 16184-16186 or 16200, or fragments or complements thereof. In some embodiments, the informative loci are associated with increased methylation in both Barrett's esophagus and esophageal adenocarcinoma samples, as compared to the same sample types taken from a healthy control subject. In some embodiments, the informative loci that are associated with increased methylation in both Barrett's esophagus and esophageal adenocarcinoma samples include sequences associated with any one or more of the minus strand DNA sequences having at least 80%, 85%, 87%, 90%, 91%, 92%, 93%, 94%, 95%, 96%, 97%, 98%, 99% or 100% identity to any of SEQ ID NOs: 429-856, 2997-3424, 5532-5926, 7533-7558, 7689-7714, 7843-7866, 7977-7990, 8061-8074-8144-8156, 8251-8264, 8335-8348, 8420-8424, or fragments or complements thereof. In particular embodiments, the informative loci that are associated with increased methylation in both Barrett's esophagus and esophageal adenocarcinoma samples include sequences associated with any one or more of the plus strand DNA sequences having at least 80%, 85%, 87%, 90%, 91%, 92%, 93%, 94%, 95%, 96%, 97%, 98%, 99% or 100% identity to any of SEQ ID NOs: 8251-8264, 8335-8348, 8420-8424, or fragments or complements thereof. In some embodiments, the informative loci are associated with increased methylation in an esophageal adenocarcinoma sample or a Barrett's with low grade or high grade dysplasia sample as compared to a sample of the same type taken from a subject having Barrett's esophagus without dysplasia. In some embodiments, the informative loci that are associated with increased methylation in an esophageal adenocarcinoma sample or a Barrett's with low grade or high grade dysplasia sample include any one or more of the sequences having at least 80%, 85%, 87%, 90%, 91%, 92%, 93%, 94%, 95%, 96%, 97%, 98%, 99% or 100% identity to any of SEQ ID NOs: 8633-8818, 9749-9934, 10826-10972, 11612-11662, 11918-11968, 12220-12266, 12461-12466, 12497-12502, 12533-12538, 12581-12586, 12617-12622, or 12656-12658, or fragments or complements thereof. In particular embodiments, the informative loci that are associated with increased methylation in an esophageal adenocarcinoma sample or a Barrett's with low grade or high grade dysplasia sample include any one or more of the sequences having at least 80%, 85%, 87%, 90%, 91%, 92%, 93%, 94%, 95%, 96%, 97%, 98%, 99% or 100% identity to any of SEQ ID NOs: 12461-12466, 12497-12502, 12533-12538, 12581-12586, 12617-12622, or 12656-12658, or fragments or complements thereof. In some embodiments, the informative loci are associated with reduced methylation in an esophageal adenocarcinoma sample as compared to a sample of the same type taken from a subject having Barrett's esophagus. In some embodiments, the informative loci that are associated with reduced methylation in an esophageal adenocarcinoma sample include any one or more of the sequences having at least 80%, 85%, 87%, 90%, 91%, 92%, 93%, 94%, 95%, 96%, 97%, 98%, 99% or 100% identity to any of SEQ ID NOs: 12909-13144, 14330-14566, 15538-15560, 15693-15732, 15933-15972, 16138-16142-16166-16168, 16184-16186 or 16200, or fragments or complements thereof. In particular embodiments, the informative loci that are associated with reduced methylation in an esophageal adenocarcinoma sample include any one or more of the sequences having at least 80%, 85%, 87%, 90%, 91%, 92%, 93%, 94%, 95%, 96%, 97%, 98%, 99% or 100% identity to any of SEQ ID NOs: 16166-16168, 16184-16186 or 16200, or fragments or complements thereof.

[0103] In some embodiments, the informative loci or amplicon of the informative loci are treated with an agent, such as bisulfite. In some embodiments, the informative loci include sequences that have been treated with bisulfite. In some embodiments, the disclosure provides for bisulfite control sequences of any of the minus DNA strands disclosed herein. In some embodiments, the disclosure provides for bisulfite-treated sequences of any of the minus DNA strands disclosed herein, In some embodiments, the bisulfite-converted minus-strand control DNA sequences include any one or more of the sequences having at least 80%, 85%, 87%, 90%, 91%, 92%, 93%, 94%, 95%, 96%, 97%, 98%, 99% or 100% identity to any of SEQ ID NOs: 1713-2140, 4281-4708, 6717-7111, 7611-7636, 7767-7792, 7915-7938, 8019-8032, 8103-8116, 8183-8195, 8265-8278, 8349-8362, 8425-8429, 9191-9376, 10307-10492, 11267-11413, 11765-11815, 12071-12121, 12361-12407, 12479-12484, 12515-12520, 12551-12556, 12587-12592, 12623-12628, or 12659-12661, or fragments or complements thereof. In particular embodiments, the bisulfite-converted minus-strand control DNA sequences include any one or more the sequences having at least 80%, 85%, 87%, 90%, 91%, 92%, 93%, 94%, 95%, 96%, 97%, 98%, 99% or 100% identity to any of SEQ ID NOs: 8019-8032, 8103-8116, 8183-8195, 12479-12484, 12515-12520, or 12551-12556, or fragments or complements thereof. In some embodiments, the informative loci are associated with increased methylation in both Barrett's esophagus and esophageal adenocarcinoma samples, as compared to the same sample types taken from a healthy control subject. In some embodiments, the disclosure provides for bisulfite-treated sequences of any of the minus DNA strands that are associated with increased methylation in both Barrett's esophagus and esophageal adenocarcinoma samples, as compared to the same sample types taken from a healthy control subject. In some embodiments, the sequences of any of the minus DNA strands that are associated with increased methylation in both Barrett's esophagus and esophageal adenocarcinoma samples are selected from the group consisting of sequences having at least 80%, 85%, 87%, 90%, 91%, 92%, 93%, 94%, 95%, 96%, 97%, 98%, 99% or 100% identity to any of SEQ ID NOs: 1713-2140, 4281-4708, 6717-7111, 7611-7636, 7767-7792, 7915-7938, 8019-8032, 8103-8116, 8183-8195, 8265-8278, 8349-8362, or 8425-8429, or fragments or complements thereof. In particular embodiments, the sequences of any of the minus DNA strands that are associated with increased methylation in both Barrett's esophagus and esophageal adenocarcinoma samples include any one or more bisulfite-converted methylated minus-strand DNA sequences selected from the group consisting of sequences having at least 80%, 85%, 87%, 90%, 91%, 92%, 93%, 94%, 95%, 96%, 97%, 98%, 99% or 100% identity to: SEQ ID NOs: 8019-8032, 8103-8116, 8183-8195, 8265-8278, 8349-8362, or 8425-8429, or fragments or complements thereof. In some embodiments, the disclosure provides for bisulfite-treated sequences of any of the minus DNA strands that are associated with increased methylation in an esophageal adenocarcinoma sample or a Barrett's with low grade or high grade dysplasia sample as compared to a sample of the same type taken from a subject having Barrett's esophagus without dysplasia. In some embodiments, the sequences of any of the minus DNA strands that are associated with increased methylation in an esophageal adenocarcinoma sample or a Barrett's with low grade or high grade dysplasia sample include any one or more bisulfite-converted methylated minus-strand DNA sequences selected from the group consisting of sequences having at least 80%, 85%, 87%, 90%, 91%, 92%, 93%, 94%, 95%, 96%, 97%, 98%, 99% or 100% identity to SEQ ID NOs: 9191-9376, 10307-10492, 11267-11413, 11765-11815, 12071-12121, 12361-12407, 12479-12484, 12515-12520, or 12551-12556, 12587-12592, 12623-12628, or 12659-12661, or fragments or complements thereof. In particular embodiments, the umnethylated sequences of any of the minus DNA strands that are associated with increased methylation in an esophageal adenocarcinoma sample or a Barrett's with low grade or high grade dysplasia sample include any one or more of the sequences having at least 80%, 85%, 87%, 90%, 91%, 92%, 93%, 94%, 95%, 96%, 97%, 98%, 99% or 100% identity to SEQ ID NOs: 12479-12484, 12515-12520, 12551-12556, 12587-12592, 12623-12628, or 12659-12661, or fragments or complements thereof. In some embodiments, the informative loci are associated with reduced methylation in an esophageal adenocarcinoma sample as compared to a sample of the same type taken from a subject having Barrett's esophagus. In some embodiments, the disclosure provides for methylated control sequences of the minus DNA strand that are associated with reduced methylation in an esophageal adenocarcinoma sample as compared to a sample of the same type taken from a subject having Barrett's esophagus. In some embodiments, the methylated control sequences of any of the minus DNA strands that are associated with reduced methylation in an esophageal adenocarcinoma sample include any one or more bisulfite-converted methylated minus-strand DNA sequences selected from the group consisting of sequences having at least 80%, 85%, 87%, 90%, 91%, 92%, 93%, 94%, 95%, 96%, 97%, 98%, 99% or 100% identity to SEQ ID NOs: 13619-13855, 15041-15277, 15607-15629, 15813-15852, 16053-16092, 16153-16157, 16175-16177, 16192-16195 or 16203, or fragments or complements thereof. In particular embodiments, the methylated control sequences of any of the minus DNA strands that are associated with reduced methylation in an esophageal adenocarcinoma sample include any one or more bisulfite-converted methylated minus-strand DNA sequences selected from the group consisting of sequences having at least 80%, 85%, 87%, 90%, 91%, 92%, 93%, 94%, 95%, 96%, 97%, 98%, 99% or 100% identity to SEQ ID NOs: 16175-16177, 16192-16195 or 16203, or fragments or complements thereof.

[0104] In some embodiments, the informative loci or amplicon of the informative loci are treated with an agent, such as bisulfite. In some embodiments, the informative loci include sequences that have been treated with bisulfite. In some embodiments, the informative loci include methylated nucleic acid sequences that have been treated with bisulfite. In some embodiments, the bisulfite-converted methylated minus-strand DNA sequences include any one or more of sequences having at least 80%, 85%, 87%, 90%, 91%, 92%, 93%, 94%, 95%, 96%, 97%, 98%, 99% or 100% identity to SEQ ID NOs: 2141-2568, 4709-5136, 7112-7506, 7637-7662, 7793-7818, 7939-7962, 8033-8046, 8117-8130, 8196-8208, 8279-8292, 8363-8376, 8430-8434, 9377-9562, 10493-10678, 11414-11560, 11816-11866, 12122-12172, 12408-12454, 12485-12490, 12521-12526, 12557-12562, 12593-12598, 12269-12634, or 12662-12664, or fragments or complements thereof. In particular embodiments, the bisulfite-converted methylated minus-strand DNA sequences include any one or more of sequences having at least 80%, 85%, 87%, 90%, 91%, 92%, 93%, 94%, 95%, 96%, 97%, 98%, 99% or 100% identity to SEQ ID NOs: 8033-8046, 8117-8130, 8196-8208, 8279-8292, 8363-8376, 8430-8434, 12485-12490, 12521-12526, 12557-12562, 12593-12598, 12269-12634, or 12662-12664, or fragments or complements thereof. In some embodiments, the informative loci are associated with increased methylation in both Barrett's esophagus and esophageal adenocarcinoma samples, as compared to the same sample types taken from a healthy control subject. In some embodiments, the informative loci that are associated with increased methylation in both Barrett's esophagus and esophageal adenocarcinoma samples include any one or more bisulfite-converted methylated minus-strand DNA sequences selected from the group consisting of sequences having at least 80%, 85%, 87%, 90%, 91%, 92%, 93%, 94%, 95%, 96%, 97%, 98%, 99% or 100% identity to SEQ ID NOs: 2141-2568, 4709-5136, 7112-7506, 7637-7662, 7793-7818, 7939-7962, 8033-8046, 8117-8130, 8196-8208, 8279-8292, 8363-8376, or 8430-8434, or fragments or complements thereof. In particular embodiments, the informative loci that are associated with increased methylation in both Barrett's esophagus and esophageal adenocarcinoma samples include any one or more bisulfite-converted methylated minus-strand DNA sequences selected from the group consisting of sequences having at least 80%, 85%, 87%, 90%, 91%, 92%, 93%, 94%, 95%, 96%, 97%, 98%, 99% or 100% identity to: SEQ ID NOs: 8033-8046, 8117-8130, 8196-8208, 8279-8292, 8363-8376, or 8430-8434,or fragments or complements thereof. In some embodiments, the informative loci are associated with increased methylation in an esophageal adenocarcinoma sample or a Barrett's with high grade dysplasia sample as compared to a sample of the same type taken from a subject having Barrett's esophagus without dysplasia. In some embodiments, the informative loci that are associated with increased methylation in an esophageal adenocarcinoma sample or a Barrett's with low grade or high grade dysplasia sample include any one or more bisulfite-converted methylated minus-strand DNA sequences selected from the group consisting of sequences having at least 80%, 85%, 87%, 90%, 91%, 92%, 93%, 94%, 95%, 96%, 97%, 98%, 99% or 100% identity to SEQ ID NOs: 9377-9562, 10493-10678, 11414-11560, 11816-11866, 12122-12172, 12408-42454, 12485-12490, 12521-12526, 12557-12562-12593-42598, 12269-42634, or 12662-12664, or fragments or complements thereof. In particular embodiments, the informative loci that are associated with increased methylation in an esophageal adenocarcinoma sample or a Barrett's with low grade or high grade dysplasia sample include any one or more of the sequences of sequences having at least 80%, 85%, 87%, 90%, 91%, 92%, 93%, 94%, 95%, 96%, 97%, 98%, 99% or 100% identity to SEQ ID NOs: 12485-12490, 12521-12526, 12557-12562, 12593-12598, 12269-12634, or 12662-12664, or fragments or complements thereof. In some embodiments, the informative loci are associated with reduced methylation in an esophageal adenocarcinoma sample as compared to a sample of the same type taken from a subject having Barrett's esophagus. In some embodiments, the informative loci that are associated with reduced methylation in an esophageal adenocarcinoma sample include any one or more bisulfite-converted methylated minus-strand DNA sequences selected from the group consisting of sequences having at least 80%, 85%, 87%, 90%, 91%, 92%, 93%, 94%, 95%, 96%, 97%, 98%, 99% or 100% identity to SEQ ID NOs: 13856-14092, 15278-15514, 15630-15652, 15853-15892, 16093-16132, 16158-16162, 16178-16180, 16196-16198, or 16204, or fragments or complements thereof. In particular embodiments, the informative loci that are associated with reduced methylation in an esophageal adenocarcinoma sample include any one or more of the sequences having at least 80%, 85%, 87%, 90%, 91%, 92%, 93%, 94%, 95%, 96%, 97%, 98%, 99% or 100% identity to SEQ ID NOs: 16178-16180, 16196-16198, or 16204, or fragments or complements thereof.

[0105] In some embodiments, the disclosure provides for a bisulfite-converted nucleotide sequence comprising the bisulfite-converted nucleotide sequence of any one of the following: Up3, Up10, Up15-1, Up15-2, Up20-1, Up20-2, Up20-2, Up27, Up35-1, Up35-2, SqBE2, SqBE5, SqBE7, SqBE9, SqBE10, SqBE11-1, SqBE11-2, SqBE13, SqBE14-2, SqBE15, SqBE16-1, SqBE16-2, SqBE17-1, SqBE18, SqBE22-1, SqBE22-2 or SqBE23. In particular embodiments, the sequence comprises the bisulfite-converted nucleotide sequence of any one of the following: Up3, Up10, Up15-1, Up15-2, Up20-1, Up20-2, Up20-2, Up27, Up35-1, or Up35-2. In particular embodiments, the sequence comprises the bisulfite-converted nucleotide sequence of any one of the following: SqBE2, SqBE5, SqBE7, SqBE9, SqBE10, SqBE11-1, SqBE11-2, SqBE13, SqBE14-2, SqBE15, SqBE16-1, SqBE16-2, SqBE17-1, SqBE18, SqBE22-1, SqBE22-2 or SqBE23.

[0106] In some embodiments, the disclosure provides for a panel of any of the sequences disclosed herein. In some embodiments, the panel comprises any of the following combinations of sequences: a) Up3, Up10, Up15-1, Up15-2, Up20-1, Up20-2, Up27, Up35-1, and Up35-2; b) Up3, Up15-1, Up15-2, Up20-1, Up27, and Up35-1; c) Up10, Up3, Up15-1, Up15-2, Up20-1, Up27, and Up35-1; d) Up35-2, Up3, Up15-1, Up15-2, Up20-1, Up27 and Up35-1; e) Up15-1 and Up35-1; f) Up15-1, Up35-1, and Up10; g) Up15-1, Up35-1 and Up20-1; h) Up15-1, Up35-1, Up10, and Up15-1; i) Up15-1, Up35-1, Up10, and U27; j) Up15-1, Up35-1, Up15-2, and Up20-1; k) Up15-1, Up35-1, Up15-2 and Up27; l) Up15-1, Up35-1, Up20-1, and Up27; m) Up3 and Up35-1; n) Up3 and Up35-2; o) Up3 and Up10; p) Up3 and Up27; q) Up35-1 and Up35-2, r) Up35-1 and Up27; s) Up35-2 and Up10; t) Up10 and Up27; u) Up3, Up35-1 and Up35-2; v) Up3, Up35-1 and Up10; w) Up3, Up35-1, and Up27; x) Up3, Up35-2 and Up10; y) Up3, Up35-2, and Up27, z) Up3, Up10, and Up27; aa) Up35-1, Up10, and Up27; ab) Up35-2, Up10, and Up27; ac) Up3, Up35-1, Up35-2 and Up10; ad) Up3, Up35-1, Up35-2 and Up27; ae) Up35-1, Up35-2, Up10 and Up27; af) Up3, Up35-2, Up10 and Up27; ag) Up3, Up35-1, Up10 and Up27; ah) Up3, Up10, Up27, Up35-1, and Up35-2; ai) Up35-1 and Up10, aj) Up35-1 and Up27; ak) Up35-2 and Up10; al) Up35-2 and Up27; am) Up3, Up35-1 and Up35-2; an) Up3, Up35-1, and Up10, ao) Up3, Up35-1, and Up27; ap) Up3, Up35-2 and Up10; aq) Up3, Up35-2 and Up27; ar) Up3, Up10 and Up27; at) Up35-1, Up10, and Up27; au) Up3, Up35-1, Up35-2, and UplO; av) Up3, Up35-1, Up35-2 and Up27; aw) Up35-1, Up35-2, Up10 and Up27; ax) Up3, Up35-2, Up10 and Up27; ay) Up3, Up35-1, Up10 and Up27; az) Up3, Up10, Up27, Up35-4, and Up 35-2; ba) SqBE5 and SqBE7; bb) SqBE5 and SqBE16; bc) SqBE5 and SqBE17; bd) SqBE5 and SqBE18; be) SqBE7 and SqBE16; bf) SqBE7 and SqBE17; SqBE7 and SqBE17; bg) SqBE7 and SqBE18; bh) SqBE16 and SqBE17 and bi) SqBE16 and SqBE18. In some embodiments, the disclosure provides for a method of detecting the methylation status of the sequences in any of the panels disclosed herein. In some embodiments, the disclosure provides for a method of detecting the methylation status of the sequences in any of the panels disclosed herein, and further comprises detecting the mutation status of p53. In particular embodiments, the disclosure provides for a method of a) detecting the methylation status of a panel comprising the sequences of Up-3 and Up35-2, and b) further detecting the mutation status of TP53.

[0107] In some embodiments, the disclosure provides for a method of detecting the methylation status of any of the loci disclosed herein, and further comprises detecting the methylation status of vimentin. In some embodiments, the vimentin methylation is detected in a manner consistent with that described in Li et al, (Li M, et al. (2009) Sensitive digital quantification of DNA methylation in clinical samples. Nat Biotechnol 27(9):858-863). In some embodiments, the vimentin methylation patterns are determined in a nucleotide sequence having at least 80%, 85%, 90%, 91%, 92%, 93%, 94%, 95%, 96%, 97%, 98%, 99% or 100% identity to SEQ ID NO: 16207 or 16208. In some embodiments, the methylation patterns are determined in any of the following nucleic acid sequence combinations: a) vimentin and SQBE5; b) vimentin and SQBE7, c) vimentin and SQBE16, d) vimentin and SQBE17 or e) vimentin and SQBE18.

[0108] In particular embodiments, the disclosure provides for a nucleotide sequence comprising a sequence having at least 80%, 85%, 90%, 91%, 92%, 93%, 94%, 95%, 96%, 97%, 98%, 99% or 100% identity to any of the following sequences: 8209-8222, 8251-8264, 8293-8306, 8335-8348, 8405-8409, 8420-8424, 12563-12568, 12581-12586, 12599-12604, 12617-12622, 12647-12649 or 12656-12658, or fragments and/or reverse complements thereof. In particular embodiments, the disclosure provides for a nucleotide sequence comprising a sequence having at least 80%, 85%, 90%, 91%, 92%, 93%, 94%, 95%, 96%, 97%, 98%, 99% or 100% identity to any of the following sequences: 12563-12568, 12581-12586, 12599-12604, 12617-12622, 12647-12649 or 12656-12658, or fragments and/or reverse complements thereof. In particular embodiments, the disclosure provides for a nucleotide sequence comprising a sequence having at least 80%, 85%, 90%, 91%, 92%, 93%, 94%, 95%, 96%, 97%, 98%, 99% or 100% identity to any of the following sequences: 8209-8222, 8251-8264, 8293-8306, 8335-8348, 8405-8409, or 8420-8424, or fragments and/or reverse complements thereof.

[0109] In some embodiments, the disclosure provides for a bisulfite-converted nucleotide sequence comprising a sequence having at least 80%, 85%, 90%, 91%, 92%, 93%, 94%, 95%, 96%, 97%, 98%, 99% or 100% identity to any of the following sequences: SEQ ID NOs: 8307-8313, 8315-8327, 8329-8334, 8349-8355, 8357-8369, 8371-8376, 8411, 8412, 8414, 8416, 8417, 8419, 8426, 8427, 8429, 8431, 8432, 8434, 12605-12616, 12623-12634, 12650-12655, or 12659-12664, or fragments and/or reverse complements thereof. In some embodiments, the sequence comprises a sequence having at least 80%, 85%, 90%, 91%, 92%, 93%, 94%, 95%, 96%, 97%, 98%, 99% or 100% identity to any of the following sequences: SEQ ID NOs: 8307-8313, 8315-8327, 8329-8334, 8349-8355, 8357-8369, 8371-8376, 8411, 8412, 8414, 8416, 8417, 8419, 8426, 8427, 8429, 8431, or 8432, 8434. In some embodiments, the sequence comprises a sequence having at least 80%, 85%, 90%, 91%, 92%, 93%, 94%, 95%, 96%, 97%, 98%, 99% or 100% identity to any of the following sequences: SEQ ID NOs: 12605-12616, 12623-12634, 12650-12655, or 12659-12664.

[0110] In some embodiments, the disclosure provides for a bisulfite-converted nucleotide sequence comprising a sequence having at least 80%, 85%, 90%, 91%, 92%, 93%, 94%, 95%, 96%, 97%, 98%, 99% or 100% identity to any of the following sequences: SEQ ID NOs: 8223-8250, 8265-8292, 12569-12580, or 12587-12598, or fragments and/or reverse complements thereof. In some embodiments, the sequence comprises a sequence having at least 80%, 85%, 90%, 91%, 92%, 93%, 94%. 95%, 96%, 97%, 98%, 99% or 100% identity to any of the following sequences: SEQ ID NOs: 8223-8250 or 8265-8292. In some embodiments, the sequence comprises a sequence having at least 80%, 85%, 90%, 91%, 92%, 93%, 94%, 95%, 96%, 97%, 98%, 99% or 100% identity to any of the following sequences: SEQ ID NOs: 12569-12580 or 12587-12598.

[0111] In some embodiments, the sample for use in any of the methods disclosed herein is a tissue sample taken from the subject. In some embodiments, the sample is tissue sample from the esophagus. In some embodiments, the sample is a biopsy or a brushing. In some embodiments, the sample is a biopsy or brushing of the esophagus. In some embodiments, the sample is a body fluid. In some embodiments, the body fluid is blood, serum, saliva, spit, stool, urine or an esophageal washing.

[0112] The present disclosure contemplates methods of selecting an individual to undergo a diagnostic procedure to determine the presence of Barrett's esophagus, Barrett's esophagus with dysplasia (e.g., Barrett's esophagus with low-grade or high-grade dysplasia), or of esophageal adenocarcinoma, by obtaining a biological sample from an individual, and determining in the sample the presence of DNA methylation in at least one of any of the sequences disclosed herein. In some embodiments, the disclosure provides for a method of selecting a subject for monitoring of esophageal neoplasia, wherein the presence of DNA methylation in at least one of any of the sequences disclosed herein is detected in a sample from the subject. In some embodiments, detection is achieved by any one or more of DNA sequencing, next generation sequencing, methylation specific PCR, methylation specific PCR combined with a fluorogenic hybridization probe, real time methylation specific PCR, or hybridization to an array. In some embodiments, the detection in the sample is indicative that the subject is at high risk of progression to esophageal neoplasia (e.g., esophageal cancer). In some embodiments, the subject is monitored by endoscopy. In some embodiments, a sample from a subject in which DNA methylation of at least one of any of the sequences disclosed herein is detected, is indicative that the subject should be administered a particular treatment. In some embodiments, the treatment is selected from the group consisting of endoscopic removal or ablation of an esophageal neoplasia, and/or surgery, radiation, or chemotherapy treatment of esophageal adenocarcinoma. in some embodiments, the sequence is any one or more sequence selected from the group consisting of a sequence having at least 80%, 85%, 90%, 91%, 92%, 93%, 94%, 95%, 96%, 97%, 98%, 99% or 100% identity to any of the following sequences: SEQ ID NOs: 1-856, 2569-3424, 5137-5926; 7507-7558, 7663-7714, 7819-7866, 7963-7990, 8047-8074, 8131-8156, 8209-8222, 8251-8264, 8293-8306, 8335-8348, 8405-8409, and 8420-8424, or fragments or complements thereof.

[0113] The present disclosure also contemplates methods of selecting an individual to undergo a diagnostic procedure to determine presence of Barrett's esophagus with low-grade dysplasia, Barrett's esophagus with high grade dysplasia or of esophageal adenocarcinoma, by obtaining a biological sample from an individual, and determining in the sample the presence of DNA methylation in at least one of any of the sequences disclosed herein. In some embodiments, the sequence is any one or more sequence selected from the group consisting of sequences having at least 80%, 85%, 90%, 91%, 92%, 93%, 94%, 95%, 96%, 97%, 98%, 99% or 100% identity to any of the following sequences: SEQ ID NOs: 8447-8818, 9563-9934, 10679-10972, 11561-11662, 11867-11968, 12173-12266, 12455-12466, 12491-12502, 12527-12538, 12563-12568, 12581-12586, 12599-12604, 12617-12622, 12647-12649, or 12656-12658, or fragments or complements thereof. The present disclosure further contemplates that the method may further comprise determining the status of somatic mutation(s) in TP53 in the sample. For example, a method comprising determining the status of methylation of chromosomal loci e.g., Up15-1, Up35-1, Up35-2, Up3, Up27, and Up10 in a sample; and determining the presence or absence of somatic mutation(s) in TP53 in the sample is contemplated.

[0114] The present disclosure further contemplates that the method may further comprise determining the status of somatic mutation(s) in TP53 in the sample. For example, a method comprising determining the status of methylation of chromosomal loci e.g., Up15-1, Up35-1, Up35-2, Up3, Up27, and Up10 in a sample; and determining the presence or absence of somatic mutation(s) in TP53 in the sample is contemplated. In certain embodiments, the method optionally further comprises detecting the presence or absence of a somatic mutation in TP53. In certain embodiments, the TP53 somatic mutation, as described herein, is any one or more mutation at any one or more amino acid residue corresponding to amino acid residue 72, 105, 108, 110, 113, 124, 127, 132, 144, 152, 163, 175, 183, 194, 213, 214, 218, 232, 234, 248, 265, 273, 278, 306, 337, 347, or 639 of SEQ ID NO: 16205. In certain embodiments, the TP53 somatic mutation is any non-synonomous somatic mutation known in the art. In certain embodiments, the TP53 somatic mutation is any one or more mutation selected from the group consisting of: Leu194Arg, Gly105Asp, Arg273His, Tyr163His, Ile232Thr, Arg213Ter, Arg273His, Arg248Gln, Arg175His, Arg110delinsGlnSer, Ser183Ter, Arg248Gln, Arg337Leu, Lys132Arg, Leu265ThrfsTer7, Arg306Ter, Cys124TrpfsTer25, Pro72Arg, Val218Glu, His214Leu, Gln144Ter, Phe113Ser, Tyr234His, Ser127Phe, Pro278Ala, Ala347Thr, and Pro152Leu of SEQ ID NO: 16205. In certain embodiments, the TP53 mutation is any one or more non-synonymous somatic mutation at any one or more nucleotide position corresponding to nucleotide position 108, 215, 314, 338, 380, 395, 430, 455, 487, 524, 548, 581, 637, 639, 641, 653, 695, 700, 743, 818, 832, 916, 1010, or 1039 of SEQ ID NO: 16206.

[0115] The present disclosure also contemplates methods of selecting an individual to undergo a treatment for Barrett's esophagus, Barrett's esophagus with low grade dysplasia, Barrett's esophagus with high grade dysplasia or for esophageal adenocarcinoma, by obtaining a biological sample from an individual, and determining in the sample the presence of DNA methylation in at least one of any of the sequences disclosed herein. In some embodiments, the sequence is any one or more sequence selected from the group consisting of sequence having at least 80%, 85%, 90%, 91%, 92%, 93%, 94%, 95%, 96%, 97%, 98%, 99% or 100% identity to any of the following sequences: SEQ ID NOs: 1-856, 2569-3424, 5137-5926; 7507-7558, 7663-7714, 7819-7866, 7963-7990, 8047-8074, 8131-8156, 8209-8222, 8251-8264, 8293-8306, 8335-8348, 8405-8409, or 8420-8424, or fragments or complements thereof. In some embodiments, the present disclosure further contemplates that the method may further comprise determining the status of somatic mutation(s) in TP53 in the sample. For example, a method comprising determining the status of methylation of chromosomal loci e.g., Up15-1, Up35-2, Up35-2, Up3, Up27, and Up10 in a sample; and determining the presence or absence of somatic mutation(s) in TP53 in the sample is contemplated.

[0116] The present disclosure also contemplates methods of selecting an individual to undergo a treatment for Barrett's esophagus, Barrett's esophagus with low-grade dysplasia, Barrett's esophagus with high grade dysplasia or for esophageal adenocarcinoma, by obtaining a biological sample from an individual, and determining in the sample the presence of DNA methylation in at least one of any of the sequences disclosed herein. In some embodiments, the sequence is any one or more sequence selected from the group consisting of sequence having at least 80%, 85%, 90%, 91%, 92%, 93%, 94%, 95%, 96%, 97%, 98%, 99% or 100% identity to any of the following sequences: SEQ ID NOs: 8447-8818, 9563-9934, 10679-10972, 11561-11662, 11867-11968, 12173-12266, 12455-12466, 12491-12502, 12527-12538, 12563-12568, 12581-12586, 12599-12604, 12617-12622, 12647-12649, or 12656-12658, or fragments or complements thereof. The present disclosure further contemplates that the method may further comprise determining the status of somatic mutation(s) in TP53 in the sample. For example, a method comprising determining the status of methylation of chromosomal loci e.g., Up15-1, Up35-1, Up35-2, Up3, Up27, and Up10 in a sample; and determining the presence or absence of somatic mutation(s) in TP53 in the sample is contemplated. The present disclosure also contemplates methods of selecting an individual to undergo enhanced surveillance for the development of Barrett's esophagus with low grade dysplasia, Barrett's esophagus with high grade dysplasia or of esophageal adenocarcinoma, by obtaining a biological sample from an individual, and determining in the sample the presence of DNA methylation in at least one of any of the sequences disclosed herein. In some embodiments, the sequence is any one or more sequence selected from the group consisting of a sequence having at least 80%, 85%, 90%, 91%, 92%, 93%, 94%, 95%, 96%, 97%, 98%, 99% or 100% identity to any of the following sequences: SEQ ID NOs: 8447-8818, 9563-9934, 10679-10972, 11561-11662, 11867-11968, 12173-12266, 12455-12466, 12491-12502, 12527-12538, 12563-12568, 12581-12586, 12599-12604, 12617-12622, 12647-12649, or 12656-12658, or fragments or complements thereof. The present disclosure further contemplates that the method may further comprise determining the status of somatic mutation(s) in TP53 in the sample. For example, a method comprising determining the status of methylation of chromosomal loci e.g., Up15-1, Up35-1, Up35-2, Up3, Up27, and Up10 in a sample; and determining the presence or absence of somatic mutation(s) in TP53 in the sample is contemplated. The present disclosure also contemplates methods of determining the response of an individual with esophageal cancer to therapy by obtaining a biological sample from an individual with esophageal cancer, and determining the presence of methylation in at least one of any of the sequences disclosed herein. In some embodiments, the sequence is any one or more sequence selected from the group consisting of sequences having at least 80%, 85%, 90%, 91%, 92%, 93%, 94%, 95%, 96%, 97%, 98%, 99% or 100% identity to any of the following sequences: SEQ ID NOs: 1-856, 2569-3424, 5137-5926; 7507-7558, 7663-7714, 7819 7866, 7963-7990, 8047-8074, 8131-8156, 8209-8222, 8251-8264, 8293-8306, 8335-8348, 8405-8409, or 8420-8424, 8447-8818, 9563-9934, 10679-10972; SEQ ID NOs: 11561-11662, 11867-11968, 12173-12266; SEQ ID NOs: 12455-12466, 12491-12502, 12527-12538, 12563-12568, 12581-12586, 12599-12604, 12617-12622, 12647-12649, and 12656-12658, or fragments or complements thereof. In some implementations, an increase in levels of methylation over time is indicative of disease progression and a need for a change in therapy (such as modifying the dosing regime of an exiting therapy, or administering a new therapeutic(s) either alone or in combination with the existing therapy), and an absence of increase in levels of methylation over time or decrease in levels of methylation over time is indicative that a change in therapy is not required. The present disclosure further contemplates that the method may further comprise determining the status of somatic mutation(s) in TP53 in the sample. For example, a method comprising determining the status of methylation of chromosomal loci e.g., Up15-1, Up35-1, Up35-2, Up3, Up27, and Up10 in a sample; and determining the presence or absence of somatic mutation(s) in TP53 in the sample is contemplated.

[0117] The present disclosure also contemplates method of distinguishing EAC and/or low/high grade dysplasia from BE by obtaining a biological sample from an individual, and determining in the sample the presence of DNA methylation in at least one of any of the sequences disclosed herein, In some embodiments, the sequence is any one or more sequence selected from the group consisting of sequences having at least 80%, 85%, 90%, 91%, 92%, 93%, 94%, 95%, 96%, 97%, 98%, 99% or 100% identity to any of the following sequences: SEQ ID NOs: 8447-8818, 9563-9934, 10679-10972; SEQ ID NOs: 11561-11662, 11867-11968, 12173-12266; SEQ ID NOs: 12455-12466, 12491-12502, 12527-12538, 12563-12568, 12581-12586, 12599-12604, 12617-12622, 12647-12649, and 12656-12658, or fragments or complements thereof. The present disclosure further contemplates that the method may further comprise determining the status of somatic mutation(s) in TP53 in the sample. For example, a method comprising determining the status of methylation of chromosomal loci e.g., Up15-1, Up35-1, Up35-2, Up3, Up27, and Up10 in a sample; and determining the presence or absence of somatic mutation(s) in TP53 in the sample is contemplated. In certain embodiments, the absence of methylation at Up15-1, Up35-1, Up35-2, Up3, Up27, and Up10; and the absence of a somatic mutation in TP53 may be indicative of non-dysplastic Barret's esophagus. In certain embodiments, the presence of methylation at any one of Up15-1, Up35-1, Up35-2, Up3, Up27, and Up10; or the presence of a somatic mutation in TP53 may be indicative of esophageal adenocarcinoma or of Barrett's with high grade dysplasia.

[0118] The present disclosure also contemplates method of distinguishing EAC and/or low/high grade dysplasia from BE by obtaining a biological sample from an individual, and determining in the sample the presence of DNA methylation in at least one of any of the sequences disclosed herein. In some embodiments, the sequence is any one or more sequence selected from the group consisting of sequences having at least 80%, 85%, 90%, 91%, 92%, 93%, 94%, 95%, 96%, 97%, 98%, 99% or 100% identity to any of the following sequences: SEQ ID NOs: 8447-8818, 9563-9934, 10679-10972; SEQ ID NOs: 11561-11662, 11867-11968, 12173-12266; SEQ ID NOs: 12455-12466, 12491-12502, 12527-12538, 12563-12568, 12581-12586, 12599-12604, 12617-12622, 12647-12649, and 12656-12658, or fragments or complements thereof. The present disclosure further contemplates that the method may further comprise determining the status of somatic mutation(s) in TP53 in the sample. For example, a method comprising determining the status of methylation of chromosomal loci e.g., Up15-1, Up35-1, Up35-2, Up3, Up27, and Up10 in a sample; and determining the presence or absence of somatic mutation(s) in TP53 in the sample is contemplated. In certain embodiments, the absence of methylation at Up15-1, Up35-1, Up35-2, Up3, Up27, and Up10; and the absence of a somatic mutation in TP53 may be indicative of non-dysplastic Barret's esophagus. In certain embodiments, the presence of methylation at any one of Up15-1, Up35-1, Up35-2, Up3, Up27, and Up10; or the presence of a somatic mutation in TP53 may be indicative of esophageal adenocarcinoma.

[0119] The present disclosure also contemplates a method of monitoring the progression (or regression) of esophageal neoplasias over time. The method involves detecting the methylation status of one or more nucleotide sequences selected from the group consisting of sequences having at least 80%, 85%, 90%, 91%, 92%, 93%, 94%, 95%, 96%, 97%, 98%, 99% or 100% identity to any of the following sequences: SEQ ID NOs: 1-856, 2569-3424, 5137-5926; 7507-7558, 7663-7714, 7819-7866, 7963-7990, 8047-8074, 8131-8156, 8209-8222, 8251-8264, 8293-8306, 8335-8348, 8405-8409, and 8420-8424, 8447-8818, 9563-9934, 10679-10972; SEQ ID NOs: 11561-11662, 11867-11968, 12173-12266; SEQ ID NOs: 12455-12466, 12491-12502, 12527-12538, 12563-12568, 12581-12586, 12599-12604, 12617-12622, 12647-12649, and 12656-12658, or fragments or complements thereof in samples from a subject at a first time and at a later time. In certain embodiments, neoplasia regression may be indicated by the absence of methylation in the nucleotide sequence taken at a later time and the presence of methylation in the nucleotide sequence taken at the first time. In certain embodiments, neoplasia progression may be indicated by the presence of methylation in the nucleotide sequence taken at a later time and the absence of methylation in the nucleotide sequence taken at the first time. The present disclosure further contemplates that the method may further comprise determining the status of somatic mutation(s) in TP53 in the samples. In some embodiments, neoplastic regression may be indicated by the presence of methylated chromosomal loci e.g., methylation of Up15-1, Up35-1, Up35-2, Up3, Up27, and/or Up10 or the presence of a somatic mutation in TP53 in a first sample; and the absence of methylated chromosomal loci e.g., unmethylated Up15-1, Up35-1, Up35-2, Up3, Up27, and Up10, and the absence of somatic mutation(s) in TP53 in a later sample. In some embodiments, neoplastic progression may be indicated by the presence of unmethylated chromosomal loci e.g., unmethylated Up15-1, Up35-1, Up35-2, Up3, Up27, and Up10; and the absence of somatic mutation(s) in TP53 in a first sample; and the presence of methylated chromosomal loci e.g., methylated Up15-1, Up35-1, Up35-2, Up3, Up27, and/or Up10, or the presence of a somatic mutation in TP53 in a later sample.

[0120] The present disclosure also provides sequences that will hybridize under highly stringent conditions to the nucleotide sequences of any one or more of SEQ ID NOs: 1-8444 and 8447-16204, or fragments or complements thereof. As discussed above, one of ordinary skill in the art will understand readily that appropriate stringency conditions which promote DNA hybridization can be varied. One of ordinary skill in the art will understand readily that appropriate stringency conditions which promote DNA hybridization can be varied. For example, one could perform the hybridization at 6.0× sodium chloride/sodium citrate (SSC) at about 45° C., followed by a wash of 2.0× SSC at 50° C. For example, the salt concentration in the wash step can be selected from a low stringency of about 2.0× SSC at 50° C. to a high stringency of about 0.2× SSC at 50° C. In addition, the temperature in the wash step can be increased from low stringency conditions at room temperature, about 22° C., to high stringency conditions at about 65° C. Both temperature and salt may be varied, or temperature or salt concentration may be held constant while the other variable is changed. In one embodiment, the disclosure provides nucleic acids which hybridize under low stringency conditions of 6× SSC at room temperature followed by a wash at 2× SSC at room temperature.

[0121] In other embodiments, the disclosure also provides the methylated forms of the nucleotide sequences of any one or more of SEQ ID NOs: 1-8444 and 8447-16204, or fragments thereof, wherein the cytosine bases of the CpG islands present in the sequences are methylated. In other words, the nucleotide sequences listed of any one or more of SEQ ID NOs: 1-8444 or 8447-16204 or fragments or complements thereof may be either in the methylated status (e.g., as seen in neoplasias) or in the unmethylated status (e.g., as seen in normal cells). In further embodiments, the nucleotide sequences of the disclosure can be isolated, recombinant, and/or fused with a heterologous nucleotide sequence, or in a DNA library.

[0122] In certain embodiments, the present disclosure provides bisulfite-converted nucleotide sequences, for example, bisulfite-converted sequences selected from any of the sequences disclosed herein. In some embodiments, the sequence is selected from the group consisting of sequences having at least 80%, 85%, 90%, 91%, 92%, 93%, 94%, 95%, 96%, 97%, 98%, 99% or 100% identity to any of the following sequences: SEQ ID NOs: 857-2568, 3425-5136, 5927-7506, 7559 7662, 7715-7818, 7867-7962, 7991-8046, 8075-8130, 8157-8208, 8223-8250, 8265-8292, 8307-8334, 8349-8376, 8410-8419, 8425-8434, and/or fragments thereof, and/or the reverse complements thereof. In yet other embodiments, the disclosure provides bisulfite-converted sequences selected from the group consisting of sequences having at least 80%, 85%, 90%, 91%, 92%, 93%, 94%, 95%, 96%, 97%, 98%, 99% or 100% identity to any of the following sequences: SEQ ID NOs: 8819-9562, 9935-10678, 10973-11560; 11663-11866, 11969-12172, 12267-12454; 12467-12490, 12503-12526, 12539-12562, 12569-12580, 12587-12598, 12605-12616, 12623-12634, 12650-12655, and 12659-12664, and/or fragments thereof, and/or the reverse complements thereof. In yet other embodiments, the disclosure provides bisulfite-converted sequences selected from the group consisting of sequences having at least 80%, 85%, 90%, 91%, 92%, 93%, 94%, 95%, 96%, 97%, 98%, 99% or 100% identity to any of the following sequences:: SEQ ID NOs: 13145-14092, 14567-15514, 15561-15652; 15733-15892, 15973-16132, 16143-16162; 16169-16180, 16187-16198, and 16201-16204, and/or fragments thereof, and/or the reverse complements thereof.

[0123] A fragment of any of the nucleotide sequences disclosed herein may be of any length, so long as the methylation status of that nucleotide sequence may be determined. In some embodiments, the nucleotide sequence is at least 10, 15, 25, 30, 40, 50, 60, 70, 80, 90, 100, 110, 120, 130, 140, 150, 160, 170, 180, 190, 200, 250, 300, 350, 400, 450, 500, 600, 700, 800, 900, 1000, 1200, 1400, 1500, 1700, or 2000 nucleotides in length. In some embodiments, the nucleotide sequence is at least 10-2000, 10-1000, 10-500, 10-200, 10-150, 10-100, 50-2000, 50-1000, 50-500, 50-200, 50-150, 50-400, 80-2000, 80-4000, 80-500, 80-150, 80-100, 100-2000, 100-1000, 100-500, 100-200, or 100-150 nucleotides in length.

[0124] Such bisulfite-converted nucleotide sequences can be used for detecting the methylation status, for example, by an MSP reaction or by direct sequencing (e.g, next generation sequencing). These bisulfite-converted sequences are also of use for designing primers for MSP reactions that specifically detect methylated or unmethylated nucleotide sequences following bisulfite conversion. In yet other embodiments, the bisulfite-converted nucleotide sequences of the disclosure also include nucleotide sequences that will hybridize under highly stringent conditions to any nucleotide sequence of any one or more of SEQ ID NOs: 1-8444 and 8447-16204, or fragments or complements thereof.

[0125] In further aspects, the application provides methods for producing such bisulfite-converted nucleotide sequences, for example, the application provides methods for treating a nucleotide sequence with a bisulfite agent such that the unmethylated cytosine bases are converted to a different nucleotide base such as a uracil.

[0126] In yet other aspects, the application provides oligonucleotide primers for amplifying a region within the nucleic acid sequence of any one or more of SEQ ID NOs: 1-8444 and 8447-16204. In certain aspects, a pair of the oligonucleotide primers can be used in a detection assay, such as the HpaII assay. In certain aspects, primers used in an MSP reaction can specifically distinguish between methylated and non-methylated DNA.

[0127] The primers of the disclosure have sufficient length and appropriate sequence so as to provide specific initiation of amplification nucleic acids. Primers of the disclosure are designed to he “substantially” complementary to each strand of the nucleic acid sequence to be amplified, In some embodiments, the primer is selected from the group consisting of sequences having 80%, 85%, 90%, 91%, 92%, 93%, 94%, 95%, 96%, 97%, 98%, 99%, or 100% identity to any of SEQ ID NOs: 8377-8404, 8435-8446, 12635-42646, and 12665-12670. In some embodiments, the primer comprises at least 1, 2, 3, 4, 5, 6, 7, 8, 9, 10, 11, 12, 13, 14, 15, 16, 17, 18, 19, 20, 21, 22, 23, 24, 25, 26, 27, 28, 29, 30, 31, 32, 33, 34, or 35 consecutive nucleotides of any of the primer sequences of SEQ ID NOs: 8377-8404, 8435-8446, 12635-12646, and 12665-12670. While exemplary primers include the sequences of any sequence having at least 80%, 85%, 90%, 91%, 92%, 93%, 94%, 95%, 96%, 97%, 98%, 99%, or 100% identity to any of SEQ ID NOs: 8377-8404, 8435-8446, 12635-12646, and 12665-12670, or fragments thereof, it is understood that any primers that hybridize with the bisulfite-converted sequence of any one or more of SEQ ID NOs: 1-8444 and 8447-16204 are included within the scope of this disclosure and is useful in the method of the disclosure for detecting methylated nucleic acid, as described. Similarly, it is understood that any primers that would serve to amplify a methylation sensitive restriction site or sites within the differentially methylated region of the informative loci of any of the sequences of SEQ ID NOs: 1-8444 or 8447-16204, or fragments or complements thereof are included within the scope of this disclosure and is useful in the method of the disclosure for detecting nucleic methylated nucleic acid, as described.

[0128] The oligonucleotide primers of the disclosure may he prepared by using any suitable method, such as conventional phosphotriester and phosphodiester methods or automated embodiments thereof. In one such automated embodiment, diethylphosphoramidites are used as starting materials and may be synthesized as described by Beaucage, et al. (Tetrahedron Letters, 22:1859-1862, 1981). One method of synthesizing oligonucleotides on a modified solid support is described in U.S. Pat. No. 4,458,066.

### IV. Assays and Drug Screening Methodologies

[0129] In certain aspects, the application provides assays and methods using any of the informative loci, or bisulfite converted methylated or umnethylated sequences thereof, disclosed herein. In some embodiments, the informative loci comprise a sequence having at least 80%, 85%, 90%, 91%, 92%, 93%, 94%, 95%, 96%, 97%, 98%, 99%, or 100% identity to any of the sequences of SEQ ID NOs: 1-428, 2569-2996, 5137-5531, 7507-7532, 7663-7668, 7819-7842, 7963-7976, 8047-8060, 8131-8143, 8209-8222, 8293-8306, 8405-8409, 8447-8632, 9563-9748, 10679-40825, 11561-11611, 11867-11917, 12173-12219, 12455-12460, 12491-12496, 12527-12532, 12563-12568, 12599-42604, 12647-12649, 12671-42908, 14093-14329, 15515-15537, 15653-15692, 15893-15932, 16133-16137, 16163-16165, 16181-16183, 16199, 429-856, 2997-3424, 5532-5926, 7533-7558, 7689-7714, 7843-7866, 7977-7990, 8061-8074, 8144-8156, 8251-8264, 8335-8348, 8420-8424, 8633-8818, 9749-9934, 10826-10972, 11612-11662, 11918-11968, 12220-12266, 12461-12466, 12497-12502, 12533-12538, 12581-12586, 12617-12622, 12656-12658, 12909-13144, 14330-14566, 15538-15560, 15693-15732, 15933-15972, 16138-16142, 16166-16168, 16184-16186 or 16200 or any fragments or complements thereof. In some embodiments, the informative loci are used as molecular markers to distinguish between healthy cells and metaplastic cells (e.g., Barrett's esophageal cells). In some embodiments, the informative loci are used as molecular markers to distinguish between healthy cells and neoplastic cells (e.g., cancer cells). In particular embodiments, the informative loci are used as molecular markers to distinguish. between healthy cells and esophageal adenocarcinoma cells. In some embodiments, the informative loci are used as molecular markers to distinguish between Barrett's esophagus cells and cancer cells. In some embodiments, the informative loci are used as molecular markers to distinguish between Barrett's esophagus cells and esophageal adenocarcinoma cells. For example, in one embodiment, the application provides methods and assays using any of the informative loci comprising a sequence having at least 80%, 85%, 90%, 91%, 92%, 93%, 94%, 95%, 96%, 97%, 98%, 99%, or 100% identity to any one or more of SEQ ID NOs: 8447-8818, 9563-9934, 10679-10972, 11561-11662, 11867-11968, 12173-12266, 12455-12466, 12491-12502, 12527-12538, 12563-12568, 12581-12586, 12599-12604, 12617-12622, 12647-12649, OR 12656-12658, or any fragments or complements thereof as markers that distinguish between healthy cells and neoplasia cells. In other embodiments, the application provides methods and assays using the informative loci comprising a sequence having at least 80%, 85%, 90%, 91%, 92%, 93%, 94%, 95%. 96%, 97%, 98%, 99%, or 100% identity to any one or more of SEQ ID NOs: 1-856, 2569-3424, 5137-5926, 7507-7558, 7663-7714, 7819-7866, 7963-7990, 8047-8047, 8131-8156, 8209-8222, 8251-8264, 8293-8306, 8335-8348, 8405-8409, 8420-8424, 8447-8818, 9563-9934, 10679-10972, 11561-11662, 11867-11968, 12173-12266, 12455-12466, 12491-12502, 12527-12538, 12563-12568, 12581-12586, 12599-12604, 12617-12622, 12647-12649, 12656-12658, 12671-13144, 14093-14566, 15515-15560, 15653-15732, 15893-15972, 16135-16142, 16163-16168, 16181-16186 and/or 16199-16200 or any fragments or complements thereof as markers that distinguish between healthy cells and cells derived from neoplasias of the upper gastrointestinal tract. In one aspect, a molecular marker of the invention is a differentially methylated sequence of an informative locus. In certain aspects, the application provides assays and methods using the informative loci comprising a sequence having at least 80%, 85%, 90%, 91%, 92%, 93%, 94%, 95%, 96%, 97%, 98%, 99%, or 100% identity to any one or more of SEQ ID NOs: 1-856, 2569-3424, 5137-5926, 7507-7558, 7663-7714, 7819-7866, 7963-7990, 8047-8047, 8131-8156, 8209-8222, 8251-8264, 8293-8306, 8335-8348, 8405-8409, 8420-8424, 8447-8818, 9563-9934, 10679-10972, 11561-11662, 11867-11968, 12173-12266, 12455-12466, 12491-12502, 12527-12538, 12563-12568, 12581-12586, 12599-12604, 12617-12622, 12647-12649, 12656-12658, 12671-13144, 14093-14566, 15515-15560, 15653-15732, 15893-15972, 16135-16142, 16163-16168, 16181-16186 and/or 16199-16200 or any fragments or complements thereof in combination with the status of somatic mutation(s) in TP53 as molecular markers that distinguish between healthy cells and cancer cells. For example, in one embodiment, the application provides methods and assays using the informative loci comprising a sequence having at least 80%, 85%, 90%, 91%, 92%, 93%, 94%, 95%, 96%, 97%, 98%, 99%, or 100% identity to any one or more of SEQ ID NOs: 1-856, 2569-3424, 5137-5926, 7507-7558, 7663-7714, 7819-7866, 7963-7990, 8047-8047, 8131-8156, 8209-8222, 8251-8264, 8293-8306, 8335-8348, 8405-8409, 8420-8424, 8447-8818, 9563-9934, 10679-10972, 11561-11662, 11867-11968, 12173-12266, 12455-12466, 12491-12502, 12527-12538, 12563-12568, 12581-12586, 12599-12604, 12617-12622, 12647-12649, 12656-12658, 12671-13144, 14093-14566, 15515-15560, 15653-15732, 15893-15972, 16135-46142, 16163-16168, 16181-16186 and/or 16199-16200 or any fragments or complements thereof and the status of somatic mutation(s) in TP53 as markers that distinguish between healthy cells and neoplasia cells (e.g. cancer/esophageal adenocarcinoma cells). In other embodiments, the application provides methods and assays using the informative loci disclosed herein (e.g., chromosomal loci Up15-1, Up35-1, Up35-2, Up3, Up27, and Up10) and the status of somatic mutation(s) in TP53 as markers that distinguish between healthy cells and cells derived from neoplasias of the upper gastrointestinal tract. In one aspect, a molecular marker of the invention is a differentially methylated sequence of an informative locus.

[0130] In certain embodiments, the application provides assays for detecting differentially methylated nucleotide sequences, Thus, a differentially methylated nucleotide sequence, in its methylated state, can serve as a target for detection using various methods described herein and the methods that are well within the purview of the skilled artisan in view of the teachings of this application.

[0131] In certain aspects, such methods for detecting methylated nucleotide sequences are based on treatment of genomic DNA with a chemical compound which converts non-methylated C, but not methylated C (i.e., 5 mC), to a different nucleotide base. One such compound is sodium bisulfite (also referred to simply as “bisulfite” herein), which converts C, but not 5 mC, to U. Methods for bisulfite treatment of DNA are known in the art (Herman, et al., 1996, Proc Natl Acad Sci USA, 93:9821-6; Herman and Baylin, 1998, Current Protocols in Human Genetics, N. E. A. Dracopoli, ed., John Wiley & Sons, 2:10.6.1-10.6.10; U.S. Pat. No. 5,786,146). To illustrate, when a DNA molecule that contains unmethylated C nucleotides is treated with sodium bisulfite to become a compound-converted DNA, the sequence of that DNA is changed (C→U). Detection of the U in the converted nucleotide sequence is indicative of an unmethylated C.

[0132] The different nucleotide base (e.g., U) present in compound-converted nucleotide sequences can subsequently be detected in a variety of ways. In a particular embodiment, the present invention provides a method of detecting U in compound-converted DNA sequences by using “methylation sensitive PCR” (MSP) (see, e.g., Herman, et al., 1996, Proc. Natl. Acad. Sci. USA, 93;9821-9826; U.S. Pat. No. 6,265,171; U.S. Pat. No, 6,017,704; U.S. Pat. No. 6,200,756). In MSP, one set of primers (i.e., comprising a forward and a reverse primer) amplifies the compound-converted template sequence if C bases in CpG dinucleotides within the DNA are methylated. This set of primers is called “methylation-specific primers,” Another set of primers amplifies the compound-converted template sequence if C bases in CpG dinucleotides within the 5′ flanking sequence are not methylated. This set of primers is called “unmethylation-specific primers.”

[0133] In MSP, the reactions use the compound-converted DNA from a sample in a subject. In assays for methylated DNA, methylation-specific primers are used. In the case where C within CpU dinucleotides of the target sequence of the DNA are methylated, the methylation-specific primers will amplify the compound-converted template sequence in the presence of a polymerase and an MSP product will be produced. If C within CpG dinucleotides of the target sequence of the DNA is not methylated, the methylation-specific primers will not amplify the compound-converted template sequence in the presence of a polymerase and an MSP product will not be produced. In some embodiments, any of the bisulfite converted methylated sequences disclosed herein is used as a marker for a particular indication.

[0134] It is often also useful to run a control reaction for the detection of unmethylated DNA. The reaction uses the compound-converted DNA from a sample in a subject and unmethylation-specific primers are used. In the case where C within CpU dinucleotides of the target sequence of the DNA are unmethylated, the unmethylation specific primers will amplify the compound-converted template sequence in the presence of a polymerase and an MSP product will be produced. If C within CpU dinucleotides of the target sequence of the DNA is methylated, the unmethylation-specific primers will not amplify the compound-converted template sequence in the presence of a polymerase and an MSP product will not be produced. Note that a biologic sample will. often contain a mixture of both neoplastic cells that give rise to a signal with methylation specific primers, and normal cellular elements that give rise to a signal with unmethylation-specific primers. The unmethylation specific signal is often of use as a control reaction, but does not in this instance imply the absence of neoplasia as indicated by the positive signal derived from reactions using the methylation specific primers. In some embodiments, any of the bisulfite converted unmethylated sequences disclosed herein are used as controls. In some embodiments, the unmethylated control sequences are any of the bisulfite converted sequences of SEQ ID NOs: 857-1284, 3425-3852, 5927-6321, 7559-7584, 7715-7740, 7867-7890, 7991-8004, 8075-8088, 8157-8169, 8223-8236, 8307-8320, 8410-8414, 8819-9004, 9935-10120, 10973-11119, 11663-11713, 11969-12019, 12267-12313, 12467-12472, 12503-12508, or 12539-12544, 12569-12574, 12605-12610, 12650-12652, 1713-2140, 4281-4708, 6717-7111, 7611-7636, 7767-7792, 7915-7938, 8019-8032, 8103-8116, 8183-8195, 8265-8278, 8349-8362, 8425-8429, 9191-9376, 10307-10492, 11267-11413, 11765-11815, 12071-12121, 12361-12407, 12479-12484, 12515-12520, 12551-12556, 12587-12592, 12623-12628, or 12659-12661 in which every “Y” position is a “T.”

[0135] Primers for a MSP reaction are derived from the compound-converted template sequence. Herein, “derived from” means that the sequences of the primers are chosen such that the primers amplify the compound-converted template sequence in a MSP reaction. Each primer comprises a single-stranded DNA fragment which is at least 8 nucleotides in length. In some embodiments, the primers are less than 50 nucleotides in length, or in some embodiments, from 15 to 35 nucleotides in length. Because the compound-converted template sequence can be either the Watson strand or the Crick strand of the double-stranded DNA that is treated with sodium bisulfite, the sequences of the primers is dependent upon whether the Watson or Crick compound-converted template sequence is chosen to be amplified in the MSP. Either the Watson or Crick strand can be chosen to be amplified.

[0136] The compound-converted template sequence, and therefore the product of the MSP reaction, is, in some embodiments, between 20 to 3000 nucleotides in length. In other embodiments, the product of the MSP reaction is between 50 to 1000 nucleotides in length. In other embodiments, the product of the MSP reaction is between 50 to 500 nucleotides in length. In other embodiments, the product of the MSP reaction is between 80-150 nucleotides in length. In some embodiments, the product of the MSP reaction is at least 20, 30, 40, 50, 60, 70, 80, 90, 100, 110, 120, 130, 140, 150, 160, 170, 180, 190, 200, 210, 220, 230, 240 or 250 nucleotides in length. In some embodiments, the methylation-specific primers result in an MSP product of a different length than the MSP product produced by the unmethylation-specific primers.

[0137] A variety of methods can be used to determine if an MSP product has been produced in a reaction assay. One way to determine if an MSP product has been produced in the reaction is to analyze a portion of the reaction by agarose gel electrophoresis. For example, a horizontal agarose gel of from 0.6 to 2.0% agarose is made and a portion of the MSP reaction mixture is electrophoresed through the agarose gel. After electrophoresis, the agarose gel is stained with ethidium bromide. MSP products are visible when the gel is viewed during illumination with ultraviolet light. By comparison to standardized size markers, it is determined if the MSP product is of the correct expected size.

[0138] Other methods can be used to determine whether a product is made in an MSP reaction. One such method is called “real-time PCR.” Real-time PCR utilizes a thermal cycler (i.e., an instrument that provides the temperature changes necessary for the PCR reaction to occur) that incorporates a fluorimeter (i,e. an instrument that measures fluorescence). The real-time PCR reaction mixture also contains a reagent whose incorporation into a product can be quantified and whose quantification is indicative of copy number of that sequence in the template. One such reagent is a fluorescent dye, called SYBR Green I (Molecular Probes, Inc.; Eugene, Oreg.) that preferentially binds double-stranded DNA and whose fluorescence is greatly enhanced by binding of double-stranded DNA. When a PCR reaction is performed in the presence of SYBR Green I, resulting DNA products bind SYBR Green I and fluorescence. The fluorescence is detected and quantified by the fluorimeter. Such technique is particularly useful for quantification of the amount of the product in the PCR reaction. Additionally, the product from the PCR reaction may be quantitated in “real-time PCR” by the use of a variety of probes that hybridize to the product including TaqMan probes and molecular beacons. Quantitation may be on an absolute basis, or may be relative to a constitutively methylated DNA standard, or may be relative to an unmethylated DNA standard. In one instance the ratio of methylated derived product to unmethylated derived product may be constructed.

[0139] Methods for detecting methylation of the DNA according to the present disclosure are not limited to MSP, and may cover any assay for detecting DNA methylation. Another example method of detecting methylation of the DNA is by using “methylation-sensitive” restriction endonucleases. Such methods comprise treating the genomic DNA isolated from a subject with a methylation-sensitive restriction endonuclease and then using the restriction endonuclease-treated DNA as a template in a PCR reaction. Herein, methylation-sensitive restriction endonucleases recognize and cleave a specific sequence within the DNA if C bases within the recognition sequence are not methylated. If C bases within the recognition sequence of the restriction endonuclease are methylated, the DNA will not be cleaved. Examples of such methylation-sensitive restriction endonucleases include, but are not limited to HpaII, SmaI, SacII, EagI, BstUI, and BssHII. In this technique, a recognition sequence for a methylation-sensitive restriction endonuclease is located within the template DNA, at a position between the forward and reverse primers used for the PCR reaction. In the case that a C base within the methylation-sensitive restriction endonuclease recognition sequence is not methylated, the endonuclease will cleave the DNA template and a PCR product will not be formed when the DNA is used as a template in the PCR reaction. In the case that a C base within the methylation-sensitive restriction endonuclease recognition sequence is methylated, the endormclease will not cleave the DNA template and a PCR product will be formed when the DNA is used as a template in the PCR reaction. Therefore, methylation of C bases can be determined by the absence or presence of a PCR product (Kane, et al., 1997, Cancer Res, 57:808-11). No sodium bisulfite is used in this technique.

[0140] Yet another exemplary method of detecting methylation of the DNA is called the modified MSP, which method utilizes primers that are designed and chosen such that products of the MSP reaction are susceptible to digestion by restriction endonucleases, depending upon whether the compound-converted template sequence contains CpG dinucleotides or UpG dinucleotides.

[0141] Yet other methods for detecting methylation of the DNA include the MS-SnuPE methods. This method uses compound-converted DNA as a template in a primer extension reaction wherein the primers used produce a product, dependent upon whether the compound-converted template contains CpG dinucleotides or UpG dinucleotides (see e.g., Gonzalgo, et al., 1997, Nucleic Acids Res., 25:2529-31).

[0142] Another exemplary method of detecting methylation of the DNA is called COBRA (i.e., combined bisulfite restriction analysis). This method has been routinely used for DNA methylation detection and is well known in the art (see, e.g., Xiong, et al., 1997, Nucleic Acids Res, 25:2532-4). In this technique, methylation-sensitive restriction endonucleases recognize and cleave a specific sequence within the DNA if C bases within the recognition sequence are methylated. If C bases within the recognition sequence of the restriction endonuclease are not methylated, the DNA will not be cleaved. In some embodiments, the method utilizes methylation-sensitive restriction endonucleases.

[0143] Another exemplary method of detecting methylation of DNA requires hybridization of a compound converted DNA to arrays that include probes that hybridize to sequences derived from a methylated template.

[0144] Another exemplary method of detecting methylation of DNA includes precipitation of methylated DNA with antibodies that bind methylated DNA or with other proteins that bind methylated DNA, and then detection of DNA sequences in the precipitate. The detection of DNA could be done by PCR based methods, by hybridization to arrays, or by other methods known to those skilled in the art.

[0145] Another exemplary method of detecting methylated DNA is bisulfite sequencing that involves amplification of a target region of bisulfite converted DNA using methylation indifferent PCR primers that amplify converted DNAs derived from both methylated and unmethylated templates. The methylation indifferent primers are often designed to be both methylation indifferent and bisulfite specific, i.e. to amplify only bisulfite converted target DNAs and not to amplify non-converted target sequences. In some embodiments, the amplified DNAs then may be characterized by Next Generation Sequencing methods that allow each cytosine base in the original template to be assessed within each DNA sequence read fhr the presence of methylation (retention of cytosine) or the absence of methylation (conversion to thymidine). The percent of methylation at each cytosine base in the original template can then be calculated by the percent of DNA reads in which the cytosine is preserved as cytosine versus is converted to thymidine. Similarly, the percent of methylation across a region of interest can be assessed by determining a rule for assessing the region as methylated or unmethylated in an individual DNA read (i.e. determining a cutoff for methylation in the region that will categorize the region as “methylated”), and then determining the percent of DNA reads in which the region qualifies as methylated.

[0146] In certain embodiments, the disclosure provides methods that involve directly sequencing the product resulting from an MSP reaction to determine if the compound-converted template sequence contains CpG dinucleotides or UpG dinucleotides. Molecular biology techniques such as directly sequencing a PCR product are well known in the art.

[0147] In some embodiments, methylation of DNA may be measured as a percentage of total DNA. High levels of methylation may be 1-100% methylation, for example, 1%, 10%, 20%, 30%, 40%, 50%, 60%, 70%, 80%, 90%, or 100% methylation. Low levels of methylation may be 0%-0.99% methylation, for example, 0%, 0.1%, 0.5%, 0.6%, 0.7%, 0.8%, 0.9%. At least some normal tissues, for example, normal esophagus samples, may not have any detectable methylation.

[0148] The skilled artisan will appreciate that the present disclosure is based in part, on the recognition that any one of the informative loci disclosed herein may include nucleotide sequences that encode polypeptides that, for example, may function as a tumor suppressor gene. Accordingly, the application further provides methods for detecting such polypeptides in cell samples. In some embodiments, the disclosure provides detection methods by assaying such polypeptides so as to determine whether a patient has or does not have a disease condition. Further, such a disease condition may be characterized by decreased levels of such polypeptides. in certain embodiments, the disclosure provides methods for determining whether a patient is or is not likely to have cancer by detecting such polypeptides. In further embodiments, the disclosure provides methods for determining whether the patient is having a relapse or determining whether a patient's cancer is responding to treatment.

[0149] Optionally, such methods involve obtaining a quantitative measure of the protein in the sample. In view of this specification, one of skill in the art will recognize a wide range of techniques that may be employed to detect and optionally quantitate the presence of a protein. In some embodiments, a protein is detected with an antibody. In many embodiments, an antibody-based detection assay involves bringing the sample and the antibody into contact so that the antibody has an opportunity to bind to proteins having the corresponding epitope. In many embodiments, an antibody-based detection assay also typically involves a system for detecting the presence of antibody-epitope complexes, thereby achieving a detection of the presence of the proteins having the corresponding epitope. Antibodies may be used in a variety of detection techniques, including enzyme-linked immunosorbent assays (ELISAs), immunoprecipitations, Western blots. Antibody-independent techniques for identifying protein may also be employed. For example, mass spectroscopy, particularly coupled with liquid chromatography, permits detection and quantification of large numbers of proteins in a sample. Two-dimensional gel electrophoresis may also be used to identify proteins, and may be coupled with mass spectroscopy or other detection techniques, such as N-terminal protein sequencing. RNA aptamers with specific binding for the protein of interest may also be generated and used as a detection reagent. Samples should generally be prepared in a manner that is consistent with the detection system to be employed. For example, a sample to be used in a protein detection system should generally be prepared in the absence of proteases. Likewise, a sample to be used in a nucleic acid detection system should generally be prepared in the absence of nucleases. In many instances, a sample for use in an antibody-based detection system will not be subjected to substantial preparatory steps. For example, urine may be used directly, as may saliva and blood, although blood will, in certain embodiments, be separated into fractions such as plasma and serum.

[0150] In certain embodiments, a method of the disclosure comprises detecting the presence of an informative loci-expressed nucleic acid, such as an mRNA, in a sample. Optionally, the method involves obtaining a quantitative measure of the informative loci-expressed nucleic acid in the sample. In view of this specification, one of skill in the art will recognize a wide range of techniques that may be employed to detect and optionally quantitate the presence of a nucleic acid. Nucleic acid detection systems generally involve preparing a purified nucleic acid fraction of a sample, and subjecting the sample to a direct detection assay or an amplification process followed by a detection assay. Amplification may be achieved, for example, by polymerase chain reaction (PCR), reverse transcriptase (RT) and coupled RT-PCR. Detection of a nucleic acid is generally accomplished by probing the purified nucleic acid fraction with a probe that hybridizes to the nucleic acid of interest, and in many instances, detection involves an amplification as well, Northern blots, dot blots, microarrays, quantitative PCR, and quantitative RT-PCR are all well known methods for detecting a nucleic acid in a sample.

[0151] In certain embodiments, the disclosure provides nucleic acid probes that bind specifically to an informative loci nucleic acid. Such probes may be labeled with, for example, a fluorescent moiety, a radionuclide, an enzyme or an affinity tag such as a biotin moiety. For example, the TaqMan® system employs nucleic acid probes that are labeled in such a way that the fluorescent signal is quenched when the probe is free in solution and bright when the probe is incorporated into a larger nucleic acid.

[0152] Immunoscintigraphy using monoclonal antibodies directed at the informative loci may be used to detect and/or diagnose a cancer. For example, monoclonal antibodies against the informative loci labeled with ⁹⁹Technetium, ¹¹¹Indium, ¹²⁵Iodine-may be effectively used for such imaging. As will be evident to the skilled artisan, the amount of radioisotope to be administered is dependent upon the radioisotope. Those having ordinary skill in the art can readily formulate the amount of the imaging agent to be administered based upon the specific activity and energy of a given radionuclide used as the active moiety. Typically 0.1-100 millicuries per dose of imaging agent, 1-10 millicuries, or often 2-5 millicuries are administered. Thus, compositions according to the present invention useful as imaging agents comprising a targeting moiety conjugated to a radioactive moiety comprise 0.1-100 millicuries, in some embodiments 1-10 millicuries, in some embodiments 2-5 millicuries, in some embodiments 1-5 millicuries.

[0153] A variety of methods can be used to determine if TP53 contains a somatic mutation, as will be evident to the skilled artisan. In some embodiments, the TP53 gene or protein sequence is determined and any change in the determined sequence relative to the wildtype sequence is detected. In some embodiments, the TP53 gene sequence is determined by PCR, RT-PCR Northern Blot, Southern Blot, and/or in situ hybridization. Another way to determine if TP53 contains a somatic mutation may involve the use of an antibody-based detection assay (e.g. ELISA, immunohistochemistry, and/or Western Blot). In some embodiments, the antibody-based detection assay utilizes an antibody that binds to a mutant TP53 protein with a tighter affinity than it binds to a wildtype TP53 protein. The skilled artisan will also readily appreciate methods of determining somatic mutations in TP53 based on the disclosures of U.S. Pat. No. 5,843,654, U.S. Pat. No. 5,620,848, EP0390323 and U.S. Pat. No. 5,527,676, all of which are herein incorporated by reference in their entirely.

[0154] In some embodiments, the disclosure provides for a device useful for detecting the methylation status of any of the informative loci, or fragments or complements thereof, disclosed herein. In some embodiments, the disclosure provides for a kit comprising components useful for detecting the methylation status of the informative loci, or fragments, or complements thereof, disclosed herein. In some embodiments, the kit comprises a swallowable balloon for collecting an esophageal sample from the subject. In some embodiments, the kit comprises any of the swallowable balloon devices disclosed in WO 2015/089422, which is incorporated herein in its entirety.

[0155] In certain embodiments, the present disclosure provides drug screening assays for identifying test compounds which potentiate the tumor suppressor function of polypeptides encoded by sequences located in the informative loci disclosed herein. In one aspect, the assays detect test compounds which potentiate the expression level of polypeptides encoded by sequences located in the informative loci disclosed herein. In another aspect, the assays detect test compounds which inhibit the methylation of DNA. In certain embodiments, drug screening assays can be generated which detect test compounds on the basis of their ability to interfere with stability or function of polypeptides encoded by sequences located in the informative loci disclosed herein.

[0156] A variety of assay formats may be used and, in light of the present disclosure, those not expressly described herein will nevertheless be considered to be within the purview of ordinary skill in the art. Assay formats can approximate such conditions as protein expression level, methylation status of nucleotide sequences, tumor suppressing activity, and may be generated in many different forms. In many embodiments, the disclosure provides assays including both cell-free systems and cell-based assays which utilize intact cells.

[0157] Compounds to be tested can be produced, for example, by bacteria, yeast or other organisms (e.g., natural products), produced chemically (e.g., small molecules, including peptidomimetics), or produced recombinantly. The efficacy of the compound can be assessed by generating dose response curves from data obtained using various concentrations of the test compound. Moreover, a control assay can also be performed to provide a baseline for comparison. In the control assay, the formation of complexes is quantitated in the absence of the test compound.

[0158] In many drug screening programs which test libraries of compounds and natural extracts, high throughput assays are desirable in order to maximize the number of compounds surveyed in a given period of time. Assays of the present invention which are performed in cell-free systems, such as may be developed with purified or semi-purified proteins or with lysates, are often preferred as “primary” screens in that they can be generated to permit rapid development and relatively easy detection of an alteration in a molecular target which is mediated by a test compound. Moreover, the effects of cellular toxicity and/or bioavailability of the test compound can be generally ignored in the in vitro system, the assay instead being focused primarily on the effect of the drug on the molecular target as may be manifest in an alteration of binding affinity with other proteins or changes in enzymatic properties of the molecular target.

[0159] In certain embodiments, test compounds identified from these assays may be used in a therapeutic method of treating cancer.

[0160] Still another aspect of the application provides transgenic non-human animals which express a gene located within any one of the informative loci disclosed herein, or which have had one or more of such genomic gene(s) disrupted in at least one of the tissue or cell-types of the animal.

[0161] In another aspect, the application provides an animal model for cancer, which has a mis-expressed allele of a gene located within any one of the informative loci disclosed herein. Such a mouse model can then be used to study disorders arising from mis-expression of genes located within any one of the informative loci disclosed herein.

[0162] Genetic techniques which allow for the expression of transgenes can be regulated via site-specific genetic manipulation in vivo are known to those skilled in the art. For instance, genetic systems are available which allow for the regulated expression of a recombinase that catalyzes the genetic recombination a target sequence. As used herein, the phrase “target sequence” refers to a nucleotide sequence that is genetically recombined by a recombinase. The target sequence is flanked by recombinase recognition sequences and is generally either excised or inverted in cells expressing recombinase activity. Recombinase catalyzed recombination events can be designed such that recombination of the target sequence results in either the activation or repression of expression of the polypeptides. For example, excision of a target sequence which interferes with the expression of a recombinant gene can be designed to activate expression of that gene. This interference with expression of the protein can result from a variety of mechanisms, such as spatial separation of the gene from the promoter element or an internal stop codon. Moreover, the transgene can be made wherein the coding sequence of the gene is flanked recombinase recognition sequences and is initially transfected into cells in a 3′ to 5′ orientation with respect to the promoter element. In such an instance, inversion of the target sequence will reorient the subject gene by placing the 5′ end of the coding sequence in an orientation with respect to the promoter element which allow for promoter driven transcriptional activation.

[0163] In an illustrative embodiment, either the cre/loxP recombinase system of bacteriophage P1 (Lakso et al., (1992) Proc. Natl. Acad. Sci. USA 89:6232-6236; Orban et al., (1992) Proc. Natl. Acad. Sci. USA 89:6861-6865) or the FLP recombinase system of Saccharomyces cerevisiae (O'Gorman et al., (1991) Science 251:1351-1355; PCT publication WO 92/15694) can be used to generate in vivo site-specific genetic recombination systems. Cre recombinase catalyzes the site-specific recombination of an intervening target sequence located between loxP sequences. loxP sequences are 34 base pair nucleotide repeat sequences to which the Cre recombinase binds and are required for Cre recombinase mediated genetic recombination. The orientation of loxP sequences determines whether the intervening target sequence is excised or inverted when Cre recombinase is present (Abremski et al., (1984) J. Biol. Chem. 259:1509-1514); catalyzing the excision of the target sequence when the loxP sequences are oriented as direct repeats and catalyzes inversion of the target sequence when loxP sequences are oriented as inverted repeats.

### V. Subjects and Samples

[0164] In certain aspects, the invention relates to a subject suspected of having or has: a cancer, a metaplasia, or a neoplasia of the upper gastrointestinal tract (e.g., esophageal cancer). Alternatively, a subject may be undergoing routine screening and may not necessarily be suspected of having such metaplasia or neoplasia. In some embodiments, the subject is a human subject, and the neoplasia is a neoplasia of the upper gastrointestinal tract, such as the esophagus. In some embodiments, the subject is a human subject, and the metaplasia is Barrett's esophagus.

[0165] Assaying for biomarkers discussed above in a sample from subjects not known to have, e.g., a metaplasia or neoplasia of the upper or lower gastrointestinal tract can aid in diagnosis of such a metaplasia or neoplasia in the subject. To illustrate, detecting the methylation status of the nucleotide sequences by MSP can be used by itself, or in combination with detecting the somatic mutation status of TP53 or other various assays, to improve the sensitivity and/or specificity for detecting, e.g., a neoplasia of the upper or lower gastrointestinal tract, In some embodiments, such detection is made at an early stage in the development of cancer, so that treatment is more likely to be effective.

[0166] In some embodiments, an informative loci in a subject is considered “methylated” for the purposes of determining whether or not the subject is prone to developing and/or has developed a metaplasia in the esophagus (e.g., Barrett's esophagus) or neoplasia (e.g., Barrett's esophagus with dysplasia such as high-grade or low-grade dysplasia) (e.g., esophageal cancer such as esophageal adenocarcinoma.) if the loci is at least 10%, 20%, 30%, 40%, 50%, 60%, 70%, 80%, 90%, or 100% methylated. In some embodiments, a DNA sample from a subject is treated with bisulfite, and the resulting bisulfite sequence corresponds to any of the nucleotide sequences disclosed herein comprising a “Y” nucleotide. In some embodiments, if at least 1, 2, 3, 4, 5, 6, 7, 8, 9, 10, 11, 12, 13, 14, 15, 16, 17, 18, 19, 20, 21, 22, 23, 24, 25, 26, 27, 28, 29, or 30 of the Y residues of the bisulfite-converted sequence have a C, the sequence is considered “methylated” for the purposes of determining whether or not the subject is prone to developing and/or has developed a metaplasia in the esophagus (e.g., Barrett's esophagus) or neoplasia (e.g., Barrett's esophagus with dysplasia such as high-grade or low-grade dysplasia) (e.g esophageal cancer such as esophageal adenocarcinoma). In some embodiments, a DNA sample from a subject is treated with isulfite, and the resulting bisulfite sequence corresponds to any of the nucleotide sequences disclosed herein comprising a “Y” nucleotide. In some embodiments, if at least 10%, 20%, 30%, 40%, 50%, 60%, 70%, 80%, 90%, or 100% of the Y residues of the bisulfite-converted sequence have a C, the sequence is considered “methylated” for the purposes of determining whether or not the subject is prone to developing and/or has developed a metaplasia in the esophagus (e.g., Barrett's esophagus) or neoplasia (e.g., Barrett's esophagus with dysplasia such as high-grade or low-grade dysplasia) (e.g., esophageal cancer such as esophageal adenocarcinoma). In some embodiments, a subject is determined to be prone to developing and/or has developed a metaplasia in the esophagus (e.g., Barrett's esophagus) or neoplasia (e.g. Barrett's esophagus with dysplasia such as high-grade or low-grade dysplasia) (e.g., esophageal cancer such as esophageal adenocarcinoma) if a certain number of “Y” nucleotides in a bisulfite convened sequence are cytosines. In some embodiments, the certain number is at least 1, 2, 3, 4, 5, 6, 7, 8, 9, 10, 11, 12, 13, 14, 15, 16, 17, 18, 19, 20, 21, 22, 23, 24, 25, 26, 27, 28, 29, or 30 of the Y residues of the bisulfite-converted sequence. In some embodiments, the certain number is least 10%, 20%, 30%, 40%, 50%, 60%, 70%, 80%, 90%, or 100% of the Y residues of the bisulfite-converted sequence. In certain embodiments, a subject is determined to be prone to developing and/or has developed a metaplasia in the esophagus (e.g., Barrett's esophagus) or neoplasia (e.g., esophageal cancer such as esophageal adenocarcinoma) (e.g., Barrett's esophagus with dysplasia such as high-grade or low-grade dysplasia) if a certain percentage of DNA molecules from a sample from a subject are determined to be “methylated,” as defined herein. In some embodiments, the certain percentage of DNA molecules is at least 10%, 20%, 30%, 40%, 50%, 60%, 70%, 80%, 90%, or 100% of the DNA molecules from the sample are determined to he “methylated.” In some embodiments, the the percentage of methylated DNA molecules is determined using next-generation sequencing. Exemplary cut-offs of DNA methylation and DNA molecule percentages may be found in the Examples section provided herein.

[0167] In addition to diagnosis, assaying of a marker in a sample from a subject not known to have, e.g., a metaplasia or neoplasia of the upper gastrointestinal tract, can be prognostic for the subject (i.e., indicating the probable course of the disease). To illustrate, subjects having a predisposition to develop a metaplasia or neoplasia of the upper gastrointestinal tract may possess methylated nucleotide sequences. Assaying of methylated informative loci in a sample from subjects either by itself, or in combination with assaying for somatic mutation(s) in TP53, can also be used to select a particular therapy or therapies which are particularly effective against, e.g., a neoplasia of the upper gastrointestinal tract in the subject, or to exclude therapies that are not likely to be effective.

[0168] Assaying of methylated informative loci in samples from subjects that are known to have, or to have had, a cancer is also useful. For example, the present methods can he used to identify whether therapy is effective or not for certain subjects. One or more samples are taken from the same subject prior to and following therapy, and assayed for any one or more of the informative loci markers either by itself or themselves, or in combination with assaying for somatic mutation(s) in TP53. A finding that an informative locus is methylated in the sample taken prior to therapy and absent (or at a lower level) after therapy may indicate that the therapy is effective and need not be altered. In those cases where the informative locus is methylated in the sample taken before therapy and in the sample taken after therapy, it may be desirable to alter the therapy to increase the likelihood that the cancer will be reduced in the subject. Thus, the present method may obviate the need to perform more invasive procedures which are used to determine a patient's response to therapy.

[0169] Cancers frequently recur following therapy in patients with advanced cancers. in this and other instances, the assays of the invention are useful for monitoring over time the status of a cancer associated with silencing of genes located in the informative loci disclosed herein. For subjects in whom a cancer is progressing, there can be no DNA methylation in some or all samples when the first sample is taken and then appear in one or more samples when the second sample is taken, For subjects in which cancer is regressing, DNA methylation may be present in one or a number of samples when the first sample is taken and then be absent in some or all of these samples when the second sample is taken.

[0170] Samples for use with the methods described herein may be essentially any biological material of interest. For example, a sample may be a bodily fluid sample from a subject, a tissue sample from a subject, a solid or semi-solid sample from a subject, a primary cell culture or tissue culture of materials derived from a subject, cells from a cell line, or medium or other extracellular material from a cell or tissue culture, or a xenograft (meaning a sample of a cancer from a first subject, e.g., a human, that has been cultured in a second subject, e.g., an immuno-compromised mouse). The term “sample” as used herein is intended to encompass both a biological material obtained directly from a subject (which may be described as the primary sample) as well as any manipulated forms or portions of a primary sample. A sample may also be obtained by contacting a biological material with an exogenous liquid, resulting in the production of a lavage liquid containing some portion of the contacted biological material. Furthermore, the term “sample” is intended to encompass the primary sample after it has been mixed with one or more additive, such as preservatives, chelators, anti-clotting factors, etc.

[0171] In certain embodiments, a bodily fluid sample is a blood sample. In this case, the term “sample” is intended to encompass not only the blood as obtained directly from the patient but also fractions of the blood, such as plasma, serum, cell fractions (e.g., platelets, erythrocytes, and lymphocytes), protein preparations, nucleic acid preparations, etc. In some embodiments, the bodily fluid may be derived from the stomach, for example, gastric secretions, acid reflux, or vomit. In other embodiments, the bodily fluid may be a fluid secreted by the pancreas or bladder. In other embodiments, the body fluid may be saliva, spit, or an esophageal washing. In certain embodiments, a tissue sample is a biopsy taken from the mucosa of the gastrointestinal tract, In other embodiments, a tissue sample is the brushings from, e.g., the esophagus of a subject.

[0172] A subject is in some embodiments a human subject, but it is expected that the molecular markers disclosed herein, and particularly their homologs from other animals, are of similar utility in other animals. In certain embodiments, it may be possible to detect a biomarker described herein (e.g., DNA methylation or protein expression level) directly in an organism without obtaining a separate portion of biological material. In such instances, the term “sample” is intended to encompass that portion of biological material that is contacted with a reagent or device involved in the detection process.

[0173] In certain embodiments, DNA which is used as the template in an MSP reaction is obtained from a bodily fluid sample. Examples of bodily fluids are blood, saliva, spit or an esophageal washing. Other body fluids can also be used. Because they can be easily obtained from a subject and can be used to screen for multiple diseases, blood or blood-derived fractions are especially useful. Blood-derived fractions can comprise blood, serum, plasma, or other fractions. For example, a cellular fraction can be prepared as a “huffy coat” (i.e., leukocyte-enriched blood portion) by centrifuging 5 ml of whole blood for 10 min at 800 times gravity at room temperature. Red blood cells sediment most rapidly and are present as the bottom-most fraction in the centrifuge tube. The huffy coat is present as a thin creamy white colored layer on top of the red blood cells. The plasma portion of the blood forms a layer above the buffy coat. Fractions from blood can also be isolated in a variety of other ways. One method is by taking a fraction or fractions from a gradient used in centrifugation to enrich for a specific size or density of cells.

[0174] DNA is then isolated from samples from the bodily fluids. Procedures for isolation of DNA from such samples are well known to those skilled in the art. Commonly, such DNA isolation procedures comprise lysis of any cells present in the samples using detergents, for example. After cell lysis, proteins are commonly removed from the DNA using various proteases. RNA is removed using RNase. The DNA is then commonly extracted with phenol, precipitated in alcohol and dissolved in an aqueous solution.

### VI. Therapeutic Methods

[0175] In some embodiments, the disclosure provides for a method of determining whether a subject has any one or more of the methylated informative loci disclosed herein that are indicative of the presence of a metaplasia in the esophagus (e.g., Barrett's esophagus), wherein if the subject is determined to have a metaplasia in the esophagus (e.g., Barrett's esophagus), the subject is treated with an agent that treats the metaplasia in the esophagus (e.g., Barrett's esophagus). In some embodiments, the disclosure provides for a method of treating a subject determined to have a metaplasia in the esophagus (e.g., Barrett's esophagus). In some embodiments, the treatment of a metaplasia in the esophagus (e.g., Barrett's esophagus) encompasses administration of any one or more of the following compounds: proton pump inhibitors (PPIs) such as omeprazole (Prilosec, Zegerid), lansoprazole (Prevacid), pantoprazole (Protonix), rabeprazole (AcipHex), esomeprazole (Nexium), dexlmsoprazole (Dexilant). Histamine H2 receptor blocking agents such as cimetidine (Tagamet), ranitidine (Zantac), famotidine (Pepcid) and nizatidine (Axid). Tums, Rolaids, or other quick-acting reflux medications. Prokinetic agents, or drugs that help move food through the gastrointestinal tract more quickly, offer an attractive alternative either alone or in combination with acid inhibition. In some embodiments, the treatment of a metaplasia in the esophagus (e.g., Barrett's esophagus) is endoscopic mucosal resection (EMR); photodynamic therapy (PDT); radiofrequency ablation (RFA); argon plasma coagulation (APC); cryotherapy, and/or surgery (e.g. esophagectomy, anti-reflux surgery).

[0176] In some embodiments, the disclosure provides for a method of determining whether a subject has any one or more of the methylated informative loci disclosed herein that are indicative of esophageal neoplasia (e.g., esophageal cancer), wherein if the subject is determined to have an esophageal neoplasia (e.g, esophageal cancer), the subject is treated with an agent that treats the esophageal neoplasia (e.g., esophageal cancer). In some embodiments, the disclosure provides for a method of determining whether a subject has any one or more of the methylated informative loci disclosed herein in combination with any of the TP53 somatic mutations disclosed herein that are indicative of esophageal neoplasia (e.g., esophageal cancer), wherein if the subject is determined to have an esophageal neoplasia (e.g., esophageal cancer), the subject is treated with an agent that treats the esophageal neoplasia (e.g., esophageal cancer). In some embodiments, the disclosure provides for a method of treating a subject determined to have esophageal neoplasia (e.g., esophageal cancer). In some embodiments, the esophageal neoplasia. is Barrett's esophagus with low grade dysplasia, Barrett's esophagus with high grade dysplasia (HGD) and/or esophageal adenocarcinoma (EAC). In some embodiments, the treatment of esophageal neoplasia (e.g., esophageal cancer) encompasses surgery (e.g. esophagectomy), radiation therapy, chemoradiation therapy and/or chemotherapy. In some embodiments, the treatment of esophageal neoplasia (e.g., esophageal cancer) encompasses administering one or more chemotherapeutic agent, such as any one or more therapeutic agent selected from the group consisting of carboplatin and paclitaxel (Taxol®) (which may be combined with radiation); cisplatin and 5-fluororacil (5-FU) (often combined with radiation); EU: epirubicine (Ellence®), cisplatin, and 5-FU (especially for gastroesophageal junction tumors); DCF: docetaxel (Taxotere®), cisplatin, and 5-FU; Cisplatin with capecitabine (Xeloda®); oxaliplatin and either 5-FU or capecitabine; doxorubicin (Adriamycin®), bleomycin, mitomycin, methotrexate, vinorelbine (Navelbine®), topotecan, and irinotecan (Camptosar®). In some embodiments, for some esophagus cancers that overexpress the HER2 protein on the surface of their cells, chemotherapy may be used along with the targeted drug trastuzumab. Ramucirumab may be used to treat cancers that start at the gastroesophageal (GE) junction when they are advanced. In some embodiments, the treatment encompasses endoscopic treatments, such as endoscopic mucosal resection (EMR) followed by treatment with proton pump inhibitors, photodynamic therapy (PDT); radiofrequency ablation (RFA); laser ablation; argon plasma coagulation (APC); electrocoagulation (electrofulguration); or esophageal stent.

[0177] The terms “treatment”, “treating”, “alleviation” and the like are used herein to generally mean obtaining a desired pharmacologic and/or physiologic effect, and may also be used to refer to improving, alleviating, and/or decreasing the severity of one or more symptoms of a condition being treated. The effect may be prophylactic in terms of completely or partially delaying the onset or recurrence of a disease, condition, or symptoms thereof, and/or may he therapeutic in terms of a partial or complete cure for a disease or condition and/or adverse effect attributable to the disease or condition. “Treatment” as used herein covers any treatment of a disease or condition of a mammal, particularly a human, and includes: (a) preventing the disease or condition from occurring in a subject which may be predisposed to the disease or condition but has not yet been diagnosed as having it; (b) inhibiting the disease or condition (e.g., arresting its development); or (c) relieving the disease or condition (e.g., causing regression of the disease or condition, providing improvement in one or more symptoms).

[0178] Treating a metaplasia (e.g., Barrett's esophagus) and/or a neoplasia (e.g., esophageal cancer) in a subject refers to improving (improving the subject's condition), alleviating, delaying or slowing progression or onset, decreasing the severity of one or more symptoms associated with a metaplasia (e.g., Barrett's esophagus) and/or a neoplasia (e.g., esophageal cancer). For example, treating a metaplasia or neoplasia includes any one or more of: reducing growth, proliferation and/or survival of metaplastic/neoplastic cells, killing metaplastic/neoplastic cells (e.g., by necrosis, apoptosis or autophagy), decreasing metaplasia/neoplasia size, decreasing rate of metaplasia/neoplasia size increase, halting increase in metaplasia/neoplasia size, improving ability to swallow, decreasing internal bleeding, decreasing incidence of vomiting, reducing fatigue, decreasing the number of metastases, decreasing pain, increasing survival, and increasing progression free survival.

### EXEMPLIFICATION

[0179] The invention now being generally described, it will be more readily understood by reference to the following examples, which are included merely for purposes of illustration of certain aspects and embodiments of the present invention, and are not intended to limit the invention.

### Example 1

### Identification of Esophageal Cancer Informative Loci

[0180] Methylated informative loci were initially identified using the technique of reduced representation bisulfite sequencing (RRBS) in a discovery set of 23 paired biopsies of normal squamous esophagus and matched esophageal adenocarcinomas, along with biopsies of 8 Barrett's esophagus tissue, and along with brushings of 8 Barrett's esophagus tissues (one BE brushing case also having a matched biopsy).

[0181] Discovery data were initially analyzed for each individual CpG residue in the RRBS data set. Individual CpGs were considered methylated in EAC if they showed methylation in less than 10% of DNA sequence reads in all of the informative squamous samples, where at least 4 squamous samples were informative, where an informative sample had equal to or greater than 20 reads covering the CpG, and if 8 or more of the informative EAC samples demonstrated percent methylation at a level that was at least 20 percentage points greater than the methylation level of the most methylated normal squamous sample. CpGs were similarly defined as methylated in Barrett's esophagus if they showed methylation of less than 10% of DNA sequence reads of all informative squamous samples, where an informative sample had equal to or greater than 20 reads covering the CpG, and if 3 or more of the informative BE samples demonstrated percent methylation at a level that was at least 20 percentage points greater than the methylation level of the most methylated normal squamous sample. CpUs meeting criteria for methylation in both EACs and BE were defined as methylated in both EAC and BE. Such methylated CpGs were then aggregated into patches by grouping together methylated CpGs that were within 200 bp of one another. Patches may consist of 1 CpG up to any number of CpGs that meet the above criteria.

[0182] The names assigned to 428 genomic patches defined as methylated in both EAC and BE by the criteria above were recorded, and the sequences of these loci correspond to SEQ ID NOs: 1-856. The genomic coordinates of the genomic patches defined as methylated by the above criteria were also recorded. The genomic sequences of these patches on the respective genomic (+) and (−) strands were determined and recorded. (Upper and lower case designations were used according to those of the UCSC browser, where lower case sequences are lower complexity DNA sequences). The bisulfite converted sequences of these corresponding patches (i.e. the bisulfite converted sequence of the (+) strand and the bisulfite converted sequence of the (−) strand) were determined and recorded (see sequences of SEQ ID NOs: 857-1281 and 1713-2140 for the bisulfite converted sequences of the respective (+) and (−) strands). C residues that may be methylated or unmethylated, and hence may be bisulfite converted to T (if unmethylated) or remain as a C (if methylated), were designated with a Y (where Y denotes C or T), and where, after bisulfite conversion, actual maintenance of a Y designated base as a C was scored as methylation at that base. Thus, these sequences represent the group of all combinations of all sequences in which 0, 1, or more than one Y is converted to a T. The reverse complements of the bisulfite converted sequences of the (+) and (−) strands will be obvious to one of ordinary skill in the art and are also included by implication in this disclosure. The bisulfite converted sequences of the fully methylated form of the corresponding patches (i.e. in which all Y bases in every bisulfite converted sequence are retained as a C), corresponding to the (+) strand the (−) strand were determined and recorded (see sequences of SEQ ID NOs: 1285-1712 and 2141-2568 for the bisulfite converted sequences of the fully methylated form of the (+) and (−) strands respectively of the corresponding patches). The reverse complements of the bisulfite converted methylated (+) stand and (−) stand sequences will be obvious to one of ordinary skill in the art and are also included by implication in this disclosure.

[0183] Patches were expanded by 100 base pairs on either side so as to accommodate either the design of amplification pincers or to enclude additional presumptively methylated bases. The sequences of these expanded patches correspond to SEQ ID NOs: 2569-3424 and their genomic coordinates were also recorded. The genomic sequences of these expanded patches on the respective genomic (+) and (−) strands were determined and recorded. (Upper and lower case designations were used according to those of the UCSC browser, where lower case sequences are lower complexity DNA sequences). The bisulfite converted sequences of these corresponding expanded patches (i.e. the bisulfite converted sequence of the (+) strand and the bisuifite converted sequence of the (−) strand) were determined and recorded (see sequences of SEQ ID NOs: 3425-3852 and 4281-4708 for the bisulfite converted sequences of the respective (+) and (−) strands). C residues that may be methylated or unmethylated, and hence may be bisulfite converted to T (if unmethylated) or remain as a C (if methylated), were designated with a Y (where Y denotes Cor T), and where, after bisulfite conversion, actual maintenance of a Y designated base as a C was scored as methylation at that base. Thus, these sequences represent the group of all combinations of all sequences in which 0, 1, or more than one Y is converted to a T. The reverse complements of the bisulfite converted sequences of the (+) and (−) strands will be obvious to one of ordinary skill in the art and are also included by implication in this disclosure. The bisulfite converted sequences of the fully methylated form of the corresponding expanded patches (i.e. in which all Y bases in every bisulfite converted sequence are retained as a C), corresponding to the (+) strand the (−) strand were determined and recorded (see sequences of SEQ ID NOs: 3853-4280 and 4789-5136 for the bisulfite converted sequences of the fully methylated form of the (+) and (−) strands respectively of the corresponding expanded patches). The reverse complements of the bisulfite converted methylated (+) stand and (−) stand sequences will be obvious to one of ordinary skill in the art and are also included by implication in this disclosure.

[0184] CpG islands overlapping patches that may contain additional CpGs that are methylated coordinately with patches were also defined. The sequences of these CpG islands correspond to SEQ ID NOs: 5137-5926. The genomic coordinates of the CpG islands were also recorded. The genomic sequences of these expanded patches on the respective genomic (+) and (−) strands were determined and recorded. (Upper and lower case designations were used according to those of the UCSC browser, where lower case sequences are lower complexity DNA sequences). The bisulfite converted sequences of these corresponding CpG islands (i.e. the bisulfite converted sequence of the (+) strand and the bisulfite converted sequence of the (−) strand) were determined and recorded (see sequences of SEQ ID NOs: 5927-6321 and 6717-7111 for the bisulfite converted sequences of the respective (+) and (−) strands). C residues that may he methylated or unmethylated, and hence may be bisulfite converted to T (if unmethylated) or remain as a C (if methylated), were designated with a Y (where Y denotes C or T), and where, after bisulfite conversion, actual maintenance of a Y designated base as a C was scored as methylation at that base. Thus, these sequences represent the group of all combinations of all sequences in which 0, 1, or more than one Y is converted to a T. The reverse complements of the bisulfite converted sequences of the (+) and (−) strands will be obvious to one of ordinary skill in the art and are also included by implication in this disclosure. The bisuifite converted sequences of the fully methylated form of the corresponding CpG islands (i.e. in which all Y bases in every bisulfite converted sequence are retained as a C), corresponding to the (+) strand the (−) strand were determined and recorded (see sequences of SEQ ID NOs: 6322-6716 and 7112-7506 for the bisulfite converted sequences of the fully methylated form of the (+) and (−) strands respectively of the corresponding CpG islands). The reverse complements of the bisulfite converted methylated (+) stand and (−) stand sequences will be obvious to one of ordinary skill in the art and are also included by implication in this disclosure.

[0185] Regions of Interest (ROI) were defined that provided preferred regions for design of PCR amplicons that would encompass preferred patches. The genomic coordinates of the ROI were also recorded. The sequences of the (+) strands of the Regions of Interest correspond to SEQ ID NOs: 8209-8222, and the sequences of the (−) strands Regions of Interest correspond to SEQ ID NOs: 8251-8261. (Upper and lower case designations were used according to those of the UCSC browser, where lower case sequences are lower complexity DNA sequences). The bisulfite converted sequences of these corresponding Regions of Interest (i.e. the bisulfite converted sequence of the (+) strand and the bisulfite converted sequence of the (−) strand) were determined and recorded (see sequences of SEQ ID NOs: 8223-8236 and 8265-8278 for the bisulfite converted sequences of the respective (+) and (−) strands), C residues that may be methylated or unmethylated, and hence may be bisulfite converted to T (if unmethylated) or remain as a C (if methylated), were designated with a Y (where Y denotes C or T), and where, after bisulfite conversion, actual maintenance of a Y designated base as a C was scored as methylation at that base. Thus, these sequences represent the group of all combinations of all sequences in which 0, 1, or more than one Y is converted to a T. The reverse complements of the bisulfite converted sequences of the (+) and (−) strands will be obvious to one of ordinary skill in the art and are also included by implication in this disclosure. The bisulfite converted sequences of the fully methylated form of the Regions of Interest (i.e. in which all Y bases in every bisulfite converted sequence are retained as a C), corresponding to the (+) strand the (−) strand were determined and recorded (see sequences of SEQ ID NOs: 8237-8250 and 8279-8292 for the bisulfite converted sequences of the fully methylated form of the (+) and (−) strands respectively of the corresponding Regions of Interest). The reverse complements of the bisulfite converted methylated (+) stand and (−) stand sequences will be obvious to one of ordinary skill in the art and are also included by implication in this disclosure.

[0186] Specific PCR Amplicons were defined within the Regions of Interest (ROI). The genomic coordinates of the Amplicons were recorded. The sequences of the (+) strands of the Amplicons correspond to SEQ ID NOs: 8293-8306 and 8405-8409, and the sequences of the (−) strands of the Amplicons correspond to SEQ ID NOs: 8335-8348 and 8420-8424. (Upper and lower case designations were used according to those of the UCSC browser, where lower case sequences are lower complexity DNA sequences). The bisulfite converted sequences of these Amplicons (i.e. the bisulfite converted sequence of the (+) strand and the bisulfite converted sequence of the (−) strand) were determined and recorded (see sequences of SEQ ID NOs: 8307-8320 and 8410-8414 for the bisulfite converted sequences of the (+) strands and see sequences of SEQ ID NOs: 8349-8362 and 8425-8429 and for the bisulfite converted sequences of the (−) strands). C residues that may be methylated or unmethylated, and hence may be bisulfite converted to T (if unmethylated) or remain as a C (if methylated), were designated with a Y (where V denotes C or T), and where, after bisulfite conversion, actual maintenance of a Y designated base as a C was scored as methylation at that base. Thus, these sequences represent the group of all combinations of all sequences in which 0, 1, or more than one Y is converted to a T. The reverse complements of the hisulfite converted sequences of the (+) and (−) strands will be obvious to one of ordinary skill in the art and are also included by implication in this disclosure. The bisulfite converted sequences of the filly methylated form of the Amplicons (i.e. in which all Y bases in every bisulfite converted sequence are retained as a C), corresponding to the (+) strand the (−) strand were determined and recorded (see sequences of SEQ ID NOs: 8321-8334 and 8415-8419 for the bisulfite converted sequences of the fully methylated form of the (+) strands and see sequences of SEQ ID NOs: 8363-8376 and 8430-8434 for the bisulfite converted sequences of the fully methylated form of the (−) strands). The reverse complements of the bisulfite converted methylated (+) and (−) stand sequences will be obvious to one of ordinary skill in the art and are also included by implication in this disclosure. Sequences of PCR primers used in amplification of the Amplicons are provided as SEQ ID NOs: 8377-8404 and 8435-8444.

[0187] Confirmatory analysis of candidate loci was then done using bisulfite sequencing of candidate loci that were amplified using bisulfite specific but methylation independent amplification primers. This employed a new sample set of biopsies from: 23 EACs, 8 HGD, 15 non-dysplastic BE from individuals without known higher grade lesions. In addition, biopsies were obtained from 5 cases of BE adjacent to MD, and from 11 cases of BE adjacent to an EAC. These were not included in analyses of non-dysplastic BE. In addition biopsies were obtained from 33 normal squamous mucosa samples.

[0188] Table 1 describes the performance in the confirmatory sample set using bisulfite sequencing analysis of amplicons of select loci having strong performance characteristics and identified in the studies discussed above. In Table 1, columns C S disclose the performance of the select amplicons. For each DNA sequence read across each amplicon, the number of CpGs that were methylated. was counted, and the read was classified as methylated or unmethyled using cutoffs for a required number of methylated CpUs on the amplicon. Table 1, row 3 lists the number of CpUs between the amplification primers for each of the amplicons, Table 1, row 4 lists the number of CpUs that need to be methylated on an individual read to count that read as methylated (e.g. for SqBE 2 there are 16 CpG residsudes between the primers, and 14+(meaning >=14) CpGs must be methylated on a read to score it as methylated. Table 1, rows 6, 7, and 8 record the sensitivity for detecting esophageal adenocarcinomas (EACs) (row 6), high grade dysplasias (HOD) (row 7) and non-dysplastic Barrett's esophagus (non-dysplastic BE) (row 8), using criteria in which a sample was detected if it demonstrated methylation in greater than 10% (0.1) of all DNA reads. Table 1, row 9 records the specificity of each amplicon for not detecting normal squamous mucosa again using criteria in which a sample was detected if it demonstrated methylation in greater than 10% (0.1) of all DNA reads. Table 1, row 11 records the specificity of each amplicon for not detecting normal squamous mucosa now using criteria in which a sample was detected if it demonstrated methylation in greater than 1% (0.01) of all DNA reads. As a comparator, Table 1, column B provides the same data for detecting methylation in the Vimentin (VIM) locus amplified using primers disclosed in Li et al. (Li M, et al. (2009) Sensitive digital quantification of DNA methylation in clinical samples. Nat Biotechnol 27(9):858-863). These primers correspond to SEQ ID NOs: 8445-8446. The amplicons amplified using these primers are as follows:

Vimentin amplicon (+) strand (SEQ ID NO: 16207):
tTYGTttTttTAtYGtAGGATGTTYGGYGGttYGGGtAtYGYGAGtYGGt
YGAGtTttAGtYGGAGtTAYGTGAtTAYGTttAttYGtAttTAtAGttTG
GGtAGt
Vimentin amplicon (−) strand (SEQ ID NO: 16208):
GtTGtttAGGtTGTAGGTGYGGGTGGAYGTAGTtAYGTAGtTtYGGtTGG
AGtTYGGtYGGtTYGYGGTGttYGGGtYGtYGAAtATttTGYGGTAGGAG
AYGAG

[0189] Amplicons (and patches) need not be used individually, but can be combined into panels for detection of esophageal neoplasia. Examples of such panels, and their associated per statistics, are provided in Table 1, columns 1 through AG that provide the markers in the panel and the sensitivity and specificity resulting from the marker combination (when the combination is positive if any member of the combination is positive). The sensitivity for detection of EAC (100%), HGD (88%), and BE (100%) is the same among the combinations shown of: all amplicons, 17 amplicons, 15 amplicons, 4 amplicons, three of four combinations of 3 amplicons (columns Y, Z, AA), and for one combination of 2 amplicons (column AF). Specificity for not detecting normal squamous (97%), at a detection cutoff of 10% of reads being methylated, is the same for all combinations shown of: 15 amplicons, 4 amplicons, 3 amplicons, or 2 amplicons. When specificity is determined using a cutoff of 1% of reads being methylated, then among amplicons with the highest sensitivity, the highest specificity is 94%, demonstrated by the combination of 3 amplicons of Table 1, column Z, followed by 91% specificity demonstrated by combinations shown of: 4 amplicons, two combinations of three amplicons, and one combination of 2 amplicons.

TABLE 1
A

| | | C | D | E | F | G | H | I | J | K |
|---|---|---|---|---|---|---|---|---|---|---|
| | B | SqBE | SqBE | SqBE | SqBE | SqBE | SqBE | SqBE | SqBE | SqBE |
| A | VIM | 2 | 5 | 7 | 9 | 10 | 11-1 | 11-2 | 13 | 14-2 |
| Number of CpGs in | 10 | 16 | 15 | 27 | 31 | 10 | 17 | 10 | 19 | 22 |
| amplicon analysis | | | | | | | | | | |
| Number of CpGs used | 5+ | 14+ | 8+ | 10+ | 16+ | 5+ | 8+ | 5+ | 10+ | 14+ |
| for methylation call | | | | | | | | | | |
| Cut-off = 0.1 | | | | | | | | | | |
| Sensitivity EAC | 70% | 74% | 100% | 40% | 65% | 96% | 4% | 87% | 38% | 64% |
| Sensitivity HGD | 63% | 50% | 100% | 57% | 50% | 75% | 0% | 63% | 33% | 43% |
| Sensitivity for non- | 100% | 81% | 70% | 56% | 69% | 88% | 0% | 94% | 21% | 56% |
| dysplasticBarrets | | | | | | | | | | |
| Specificity Sq | 97% | 97% | 100% | 100% | 97% | 97% | 100% | 97% | 97% | 97% |
| Cut-off = 0.01 | | | | | | | | | | |
| Specificity Sq | 91% | 94% | 100% | 100% | 94% | 94% | 91% | 91% | 93% | 91% |

A

| | L | M | N | O | P | Q | R | S |
|---|---|---|---|---|---|---|---|---|
| | SqBE | SqBE | SqBE | SqBE | SqBE | SqBE | SqBE | SqBE |
| A | 15 | 16-1 | 16-2 | 17-1 | 18 | 22-1 | 22-2 | 23 |
| Number of CpGs in | 11 | 26 | 26 | 22 | 21 | 9 | 20 | 10 |
| amplicon analysis | | | | | | | | |
| Number of CpGs used | 5+ | 9+ | 8+ | 12+ | 9+ | 6+ | 11+ | 6+ |
| for methylation call | | | | | | | | |
| Cut-off = 0.1 | | | | | | | | |
| Sensitivity EAC | 74% | 52% | 9% | 74% | 91% | 87% | 82% | 59% |
| Sensitivity HGD | 63% | 50% | 0% | 63% | 63% | 88% | 88% | 43% |
| Sensitivity for non- | 100% | 44% | 13% | 100% | 81% | 100% | 88% | 63% |
| dysplasticBarrets | | | | | | | | |
| Specificity Sq | 94% | 97% | 100% | 97% | 97% | 97% | 97% | 97% |
| Cut-off = 0.01 | | | | | | | | |
| Specificity Sq | 91% | 94% | 94% | 94% | 94% | 94% | 94% | 94% |

B

| | | U | | | | |
|---|---|---|---|---|---|---|
| | | All 17 | | | | |
| | | SqBE amplicons: | V | | | |
| | | SqBE 2 SqBE 5 | 15 SqBE | | | |
| | | SqBE 7 SqBE 9 | amplicons: SqBE 5 | W | | |
| | | SqBE 10 SqBE 11-1 | SqBE 7 SqBE 9 | 4 best | | |
| | T | SqBE 11-2 SqBE 13 | SqBE 10 SqBE 11-1 | amplicons with | | |
| | All | SqBE 14-2 SqBE 15 | SqBE 11-2 SqBE 13 | highest EAC calls | X | Y |
| | amplicon | SqBE 16-1 SqBE 16-2 | SqBE 14-2 SqBE 16-1 | (SqBE 10 SqBE 11-2 | trio1 | trio2 |
| | together, | SqBE 17-1 SqBE 18 | SqBE 16-2 SqBE 17-1 | SqBE 18 SqBE 22-1) | (SqBE 10 | (SqBE 10 |
| | including | SqBE 22-1 SqBE 22-2 | SqBE 18 SqBE 22-1 | perform as well | SqBE 11-2 | SqBE 11-2 |
| A | VIM | SqBE 23 | SqBE 22-2 SqBE 23 | as 16 amplicons | SqBE 18) | SqBE 22-1) |
| Number of CpGs in | | | | | | |
| amplicon analysis | | | | | | |
| Number of CpGs used | | | | | | |
| for methylation call | | | | | | |
| Cut-off = 0.1 | | | | | | |
| Sensitivity EAC | 100% | 100% | 100% | 100% | 100% | 100% |
| Sensitivity HGD | 88% | 88% | 88% | 88% | 75% | 88% |
| Sensitivity for non- | 100% | 100% | 100% | 100% | 100% | 100% |
| dysplasticBarrets | | | | | | |
| Specificity Sq | 91% | 91% | 97% | 97% | 97% | 97% |
| Cut-off = 0.01 | | | | | | |
| Specificity Sq | 82% | 85% | 85% | 91% | 91% | 91% |

B

| | Z | AA | | | | | | |
|---|---|---|---|---|---|---|---|---|
| | trio3 | trio4 | AB | AC | AD | AE | AF | AG |
| | (SqBE 10 | (SqBE 11-2 | double1 | double2 | double3 | double4 | double5 | double6 |
| | SqBE 18 | SqBE 18 | (SqBE 10 | (SqBE 10 | (SqBE 11-2 | (SqBE 10 | (SqBE 11-2 | (SqBE 18 |
| A | SqBE 22-1) | SqBE 22-1) | SqBE 11-2) | SqBE 18) | SqBE 18) | SqBE 22-1) | SqBE 22-1) | SqBE 22-1) |
| Number of CpGs in | | | | | | | | |
| amplicon analysis | | | | | | | | |
| Number of CpGs used | | | | | | | | |
| for methylation call | | | | | | | | |
| Cut-off = 0.1 | | | | | | | | |
| Sensitivity EAC | 100% | 100% | 100% | 100% | 100% | 96% | 100% | 96% |
| Sensitivity HGD | 88% | 88% | 75% | 75% | 63% | 88% | 88% | 88% |
| Sensitivity for non- | 100% | 100% | 100% | 94% | 100% | 100% | 100% | 100% |
| dysplasticBarrets | | | | | | | | |
| Specificity Sq | 97% | 97% | 97% | 97% | 97% | 97% | 97% | 97% |
| Cut-off = 0.01 | | | | | | | | |
| Specificity Sq | 94% | 91% | 91% | 94% | 91% | 94% | 91% | 94% |

### Example 2

### Identification of Esophageal Cancer Informative Loci to Detect Progression of Esophageal Neoplasia

[0190] Discovery data were also analyzed for each individual CpG residue in the RRBS data set to identify loci that could be used to distinguish EAC from BE. Individual CpGs were considered methylated in EAC versus BE if they showed methylation of less than 10% of reads of all informative BE samples, where at least 3 BE samples were informative, and if they showed methylation of less than 10% of reads of all informative normal squamous samples, and where an informative sample had equal to or greater than 20 reads covering the CpG, and if 6 or more of the EAC samples demonstrated percent methylation at a level that was at least 20 percentage points greater than the methylation level of the most methylated BE sample. CpGs meeting criteria for methylation in EAC versus and BE are defined as methylated in EAC vs BE. Such methylated CpGs were then aggregated into patches in instances in which methylated CpGs were within 200 bp one another.

[0191] 186 genomic patches defined as methylated in EACs versus BE in the discovery set were identified (see SEQ ID NOs: 8447-8818). The genomic coordinates of the genomic patches defined as methylated by the above criteria were also recorded. The genomic sequences of these patches on the respective genomic (+) and (−) strands were determined and recorded. (Upper and lower case designations were used according to those off the UCSC browser, where lower case sequences are lower complexity DNA sequences). The bisulfite converted sequences of these corresponding patches (i.e. the bisulfite converted sequence of the (+) strand and the bisulfite converted sequence of the (−) strand) were determined and recorded (see sequences of SEQ ID NOs: 8819-9004 and 9191-9376 for the bisulfite converted sequences of the respective (+) and (−) strands). C residues that may be methylated or unmethylated, and hence may be bisulfite converted to T (if unmethylated) or remain as a C (if methylated), were designated with a Y (where Y denotes C or T), and where, after bisulfite conversion, actual maintenance of a Y designated base as a C was scored as methylation at that base. Thus, these sequences represent the group of all combinations of all sequences in which 0, 1, or more than one Y is converted to a T. The reverse complements of the bisulfite converted sequences of the (+) and (−) strands will be obvious to one of ordinary skill in the art and are also included by implication in this disclosure. The bisulfite converted sequences of the fully methylated form of the corresponding patches (i.e. in which all Y bases in every bisulfite converted sequence are retained as a C), corresponding to the (+) strand the (−) strand were determined and recorded (see sequences of SEQ ID NOs: 9005-9190 and 9377-9562 for the bisulfite converted sequences of the fully methylated form of the (+) and (−) strands respectively of the corresponding patches). The reverse complements of the bisulfite converted methylated (+) stand and (−) stand sequences will he obvious to one of ordinary skill in the art and are also included by implication in this disclosure.

[0192] Patches were expanded by 100 base pairs on either side so as to accommodate either the design of amplification pinlers or to enclude additional presumptively methylated bases. The sequences of these expanded patches correspond to SEQ ID NOs: 9563-9934 and their genomic coordinates were also recorded. The genomic sequences of these expanded patches on the respective genomic (+) and (−) strands were determined and recorded. (Upper and lower case designations were used according to those of the UCSC browser, where lower case sequences are lower complexity DNA sequences). The bisulfite converted sequences of these corresponding expanded patches (i.e. the bisulfite converted sequence of the (+) strand and the bisulfite converted sequence of the (−) strand) were determined and recorded (see sequences of SEQ ID NOs: 9935-10120 and 10307-10492 for the bisulfite converted sequences of the respective (+) and (−) strands). C residues that may be methylated or unmethylated, and hence may be bisulfite converted to T (if unmethylated) or remain as a C (if methylated), were designated with a Y (where Y denotes C or T), and where, after bisulfite conversion, actual maintenance of a Y designated base as a C was scored as methylation at that base. Thus, these sequences represent the group of all combinations of all sequences in which 0, 1, or more than one Y is converted to a T. The reverse complements of the bisulfite converted sequences of the (+) and (−) strands will he obvious to one of ordinary skill in the art and are also included by implication in this disclosure. The bisulfite converted sequences of the fully methylated form of the corresponding expanded patches (i.e. in which all Y bases in every bisulfite converted sequence are retained as a C), corresponding to the (+) strand the (−) strand were determined and recorded (see sequences of SEQ ID NOs: 10121-10306 and 10493-10678 for the bisulfite converted sequences of the fully methylated form of the (+) and (−) strands respectively of the corresponding expanded patches). The reverse complements of the bisulfite converted methylated (+) stand and (−) stand sequences will be obvious to one of ordinary skill in the art and are also included by implication in this disclosure.

[0193] CpG islands overlapping patches that may contain additional CpGs that are methylated coordinately with patches were also defined. The sequences of these CpG islands correspond to SEQ ID NOs: 10679-10972. The genomic coordinates of the CpG islands were also recorded. The genomic sequences of these expanded patches on the respective genomic (+) and (−) strands were determined and recorded. (Upper and lower case designations were used according to those of the UCSC browser, where lower case sequences are lower complexity DNA sequences). The bisulfite converted sequences of these corresponding CpG islands (i.e. the bisulfite converted sequence of the (+) strand and the bisulfite converted sequence of the (−) strand) were determined and recorded (see sequences of SEQ ID NOs: 10973-11119 and 11267-11413 for the bisulfite converted sequences of the respective (+) and (−) strands). C residues that may be methylated or unmethylated, and hence may be bisulfite converted to T (if unmethyiated) or remain as a C (if methylated), were designated with a Y (where Y denotes C or T), and where, after hisulfite conversion, actual maintenance of a Y designated base as a C was scored as methylation at that base. Thus, these sequences represent the group of all combinations of all sequences in which 0, 1, or more than one Y is converted to a T. The reverse complements of the bisulfite converted sequences of the (+) and (−) strands will be obvious to one of ordinary skill in the art and are also included by implication in this disclosure. The bisulfite converted sequences of the fully methylated form of the corresponding CpG islands (i.e. in which all Y bases in every bisulfite converted sequence are retained as a C), corresponding to the (+) strand the (−) strand were determined and recorded (see sequences of SEQ ID NOs: 11120-11266 and 11414-11266 for the bisulfite converted sequences of the fully methylated form of the (+) and (−) strands respectively of the corresponding CpG islands). The reverse complements of the bisulfite converted methylated (+) stand and (−) stand sequences will he obvious to one of ordinary skill in the art and are also included by implication in this disclosure,

[0194] Regions of interest (ROI) were defined that provided preferred regions for design of PCR amplicons that would encompass preferred patches. The genomic coordinates of the ROI were also recorded. The sequences of the (+) strands of the Regions of Interest correspond to SEQ ID NOs: 12563-12568, and the sequences of the (−) strands Regions of Interest correspond to SEQ ID NOs: 12581-12586. (Upper and lower case designations were used according to those of the UCSC browser, where lower case sequences are lower complexity DNA sequences). The bisulfite converted sequences of these corresponding Regions of Interest (i.e. the bisulfite converted sequence of the (+) strand and the bisulfite converted sequence of the (−) strand) were determined and recorded (see sequences of SEQ ID NOs: 12569-12574 and 12587-12592 for the bisulfite converted sequences of the respective (+) and (−) strands). C residues that may he methylated or unmethylated, and hence may be bisulfite converted to T (if unmethylated) or remain as a C (if methylated), were designated with a Y (where Y denotes C or T), and where, after bisulfite conversion, actual maintenance of a Y designated base as a C was scored as methylation at that base. Thus, these sequences represent the group of all combinations of all sequences in which 0, 1, or more than one Y is converted to a T. The reverse complements of the bisulfite converted sequences of the (+) and (−) strands will be obvious to one of ordinary skill in the art and are also included by implication in this disclosure. The bisulfite converted sequences of the fully methylated form of the Regions of Interest (i.e. in which all Y bases in every bisulfite converted sequence are retained as a C), corresponding to the (+) strand the (−) strand were determined and recorded (see sequences of SEQ ID NOs: 12575-12580 and 12593-12598 for the bisulfite converted sequences of the fully methylated form of the (+) and (−) strands respectively of the corresponding Regions of Interest). The reverse complements of the bisulfite converted methylated (+) stand and (−) stand sequences will be obvious to one of ordinary skill in the art and are also included by implication in this disclosure.

[0195] Specific PCR Amplicons were defined within the Regions of Interest (ROI). The genomic coordinates of the Amplicons were recorded. The sequences of the (+) strands of the Amplicons correspond to SEQ ID NOs: 12599-12604 and 12647-12649, and the sequences of the (−) strands of the Amplicons correspond to SEQ ID NOs: 12617-12622 and 12656-12658. (Upper and lower case designations were used according to those of the UCSC browser, where lower case sequences are lower complexity DNA sequences). The bisulfite converted sequences of these Amplicons (i.e. the bisulfite converted sequence of the (+) strand and the bisulfite converted sequence of the (−) strand) were determined and recorded (see sequences of SEQ ID NOs: 12605-12610 and 12650-12652 for the bisulfite converted sequences of the (+) strands and see sequences of SEQ ID NOs: 12623-12628 and 12659-12661 and for the bisulfite converted sequences of the (−) strands). C residues that may be methylated or unmethylated, and hence may be bisulfite converted to T (if unmethylated) or remain as a C (if methylated), were designated with a Y (where denotes C or T), and where, after bisulfite conversion, actual maintenance of a Y designated base as a C was scored as methylation at that base. Thus, these sequences represent the group of all combinations of all sequences in which 0, 1, or more than one Y is converted to a T. The reverse complements of the bisulfite converted sequences of the (+) and (−) strands will be obvious to one of ordinary skill in the art and are also included by implication in this disclosure. The bisulfite converted sequences of the fully methylated form of the Amplicons (i.e. in which all Y bases in every bisulfite converted sequence are retained as a C), corresponding to the (+) strand the (−) strand were determined and recorded (see sequences of SEQ ID NOs: 12611-12616 and 12653-12655 for the bisulfite converted sequences of the fully methylated form of the (+) strands and see sequences of SEQ ID NOs: 12629-12634 and 12662-12664 for the bisulfite converted sequences of the fully methylated form of the (−) strands). The reverse complements of the bisulfite converted methylated (+) stand and (−) stand sequences will be obvious to one of ordinary skill in the art and are also included by implication in this disclosure. Sequences of PCR primers used in amplification of the Amplicons are provided as SEQ ID NOs: 12635-12646 and 12665-12670.

[0196] Confirmatory analysis of candidate loci was then done using bisulfite sequencing of candidate loci that were amplified using bisulfite specific but methylation independent amplification primers. This employed a new sample set of biopsies from: 23 EACs, 8 HGD, 15 non-dysplastic BE from individuals without known higher grade lesions. In addition, biopsies were obtained from 5 cases of BE adjacent to HGD, and from 11 cases of BE adjacent to an EAC. These are not included in analyses of non-dysplastic BE. In addition biopsies were obtained from 33 normal squamous mucosa samples.

[0197] Table 2 describes the performance in the confirmatory sample set using bisulfite sequencing analysis of amplicons from select loci defined as methylated in EACs versus BE and having preferred marker characteristics. In Table 2, Columns B-J disclose the performance of the amplicons in the confirmatory data set. In this data set, methylation was calculated as the average level of methylation of all CpGs in between the primers for amplifying the amplicon. For each read across each amplicon the number of CpGs that were methylated was counted and the read was classified as methylated or unmethyled using cutoffs for a required number of methylated CpGs on the amplicon. Table 2, row 3 lists the number of CpGs between the amplification primers for each of the amplicons. Table 2, row 4 lists the number of CpGs that need to be methylated on an individual read to count that read as methylated (e.g. for Up3 there are 36 CpG residues between the primers, and 25+ (meaning>=25) CpGs must be methylated on a read to score it as methylated). Table 2, rows 6 and 7 record the sensitivity for detecting EACs (row 6) and HGD (row 7) using criteria in which a sample was detected if it demonstrated methylation in greater than 10% (0.1) of all DNA reads. Table 2, rows 8 and 9 record the specificity of each amplicon for not detecting non-dysplastic BE (row 8) and for not detecting normal squamous mucosa (row 9) again using criteria in which a sample was detected if it demonstrated methylation in greater than 10% (0.1) of all DNA reads. Table 2, rows 11 and 12 record the specificity of each amplicon for not detecting non-dysplastic BE (row 11) and for not detecting normal squamous mucosa (row 12) using criteria in which a sample was detected if it demonstrated methylation in greater than 1% (0.01) of all DNA reads. Amplicons (and patches) need not be used individually, but can be combined into panels for detection of esophageal neoplasia. Performance statistics of selected panels of amplicons are provided in Table 2 columns K through V that provides the sensitivity and specificity of the panels (when the combination is positive if any member of the combination is positive).

TABLE 2
A

| | B | C | D | E | F | G | H | I | J |
|---|---|---|---|---|---|---|---|---|---|
| A | Up3 | Up10 | Up15_ampl1 | Up15_ampl2 | Up20_ampl1 | Up20_ampl2 | Up27 | Up35_ampl1 | Up35_ampl2 |
| Number of CpGs in | 36 | 30 | 25 | 26 | 21 | 16 | 21 | 26 | 18 |
| amplicon analysis | | | | | | | | | |
| Number of CpGs used | 25+ | 17+ | 15+ | 15+ | 11+ | 6+ | 11+ | 14+ | 10+ |
| for methylation call | | | | | | | | | |
| Cut-off = 0.1 | | | | | | | | | |
| Sensitivity EAC | 15% | 40% | 22% | 26% | 37% | 0% | 20% | 45% | 30% |
| Sensitivity HGD | 0% | 25% | 13% | 0% | 33% | 0% | 17% | 17% | 25% |
| Specificity for non- | 100% | 100% | 100% | 94% | 100% | 100% | 100% | 100% | 100% |
| dysplastic BE | | | | | | | | | |
| Specificity Sq | 100% | 100% | 100% | 97% | 100% | 100% | 97% | 100% | 100% |
| Cut-off = 0.01 | | | | | | | | | |
| Specificity for non- | 100% | 100% | 100% | 94% | 94% | 100% | 100% | 100% | 100% |
| dysplastic BE | | | | | | | | | |
| Specificity Sq | 100% | 88% | 100% | 91% | 90% | 100% | 93% | 100% | 100% |

B

| | K | | M | N | | |
|---|---|---|---|---|---|---|
| | All amplicons | L | 7 amplicon | 7 amplicon | | |
| | together: Up3, | 6 core | combo 1: | combo 2: | | P |
| | Up10, Up15-1, | amplicon: | up10 and Up3, | Up35-2 and Up3, | O | 3 mplicon |
| | Up15-2, Up20-1, | Up3, Up15-1, | Up15-1, Up15-2, | Up15-1, Up15-2, | 2 amplicon | combo 1 |
| | Up20-2, Up27, | Up15-2, Up20-1, | Up20-1, Up27, | Up20-1, Up27, | combo: | Up15-1, Up35-1, |
| A | Up35-1, Up35-2 | Up27, Up35-1 | Up35-1 | Up35-1 | Up15-1, Up35-1 | Up10 |
| Number of CpGs in | | | | | | |
| amplicon analysis | | | | | | |
| Number of CpGs used | | | | | | |
| for methylation call | | | | | | |
| Cut-off = 0.1 | | | | | | |
| Sensitivity EAC | 65% | 65% | 65% | 65% | 52% | 57% |
| Sensitivity HGD | 50% | 38% | 50% | 50% | 25% | 38% |
| Specificity for non- | 94% | 94% | 94% | 94% | 100% | 100% |
| dysplastic BE | | | | | | |
| Specificity Sq | 94% | 94% | 94% | 94% | 100% | 100% |
| Cut-off = 0.01 | | | | | | |
| Specificity for non- | 88% | 88% | 88% | 88% | 100% | 100% |
| dysplastic BE | | | | | | |
| Specificity Sq | 82% | 82% | 82% | 82% | 100% | 94% |

B

| | Q | R | S | T | U | V |
|---|---|---|---|---|---|---|
| | 3 amplicon | 4 amplicon | 4 amplicon | 4 amplicon | 4 amplicon | 4 amplicon |
| | combo 2: | combo 1: | combo 2: | combo 3: | combo 4: | combo 5: |
| | Up15-1, Up35-1, | Up15-1, Up35-1, | Up15-1, Up35-1, | Up15-1, Up35-1, | Up15-1, Up35-1, | Up15-1, Up35-1, |
| A | Up20-1 | Up10, Up15-2 | Up10, Up27 | Up15-2, Up20-1 | Up15-2, Up27 | Up20-1, Up27 |
| Number of CpGs in | | | | | | |
| amplicon analysis | | | | | | |
| Number of CpGs used | | | | | | |
| for methylation call | | | | | | |
| Cut-off = 0.1 | | | | | | |
| Sensitivity EAC | 57% | 61% | 61% | 61% | 61% | 61% |
| Sensitivity HGD | 38% | 38% | 38% | 38% | 25% | 38% |
| Specificity for non- | 100% | 94% | 100% | 94% | 94% | 100% |
| dysplastic BE | | | | | | |
| Specificity Sq | 100% | 97% | 97% | 97% | 94% | 97% |
| Cut-off = 0.01 | | | | | | |
| Specificity for non- | 94% | 94% | 100% | 88% | 94% | 94% |
| dysplastic BE | | | | | | |
| Specificity Sq | 91% | 88% | 91% | 85% | 88% | 88% |

[0198] In addition, RRBS discovery data was analyzed to identify CpG residues that demonstrated: i) at least 3 informative BE, which in every informative BE demonstrated at least 90% methylation; and where ii) no more than 5% of informative normal squamous samples demonstrated methylation level below 90%; and that iii) demonstrated at least 6 informative EAC, where in these informative EACs the level of methylation was at least 20 percentage points lower than the methylation level of the least methylated BE. CpGs meeting these criteria are defined as unmethylated in EAC versus BE. Such unmethylated CpGs were then aggregated into patches by grouping together unmethylated CpGs that were within 200 hp of one another. Unmethylated in EAC patches may consist of 1 CpG up to any number of CpGs that meet the above criteria.

### Example 3

### Identification of Esophageal Cancer Informative Loci to Detect Progression of Esophageal Neoplasia

[0199] Biopsy samples (that overlapped with the confirmatory biopsy sample set) were further analyzed in tests of panels of markers for detecting the progression of Barrett's esophagus to Barrett's esophagus high grade dysplasia (HGD) or to esophageal adenocarcinoma (EAC). For each panel of markers, FIG. 1 shows the sensitivity (percentage of samples detected), the specificity (percentage of samples not detected), the total number of samples studied, and the total number of positive samples. Three panels of markers were selected for study. The first marker panel consisted of detecting at least one of the following four methylated markers: Up15-1, Up35-1, Up27, and Up10 (using bisulfite sequencing analysis of the corresponding amplicons and using the criteria for detection specified in table 2A). The second panel consisted of testing for somatic non-synonymous mutations in TP53 in assays in which TP53 was amplified from genomic DNA using a set of PCR amplicons that spanned the TP53 coding region and in which Next Generation DNA Sequencing was then used to compare TP53 sequences from esophageal lesions versus matched normal esophagus tissue. Samples were classified as detected if a TP53 mutant allele frequency of greater than or equal to 10% was identified. The third panel was a combination of detection of methylation in any of Up15-1, Up35-1, Up27, and Up10 or detection of mutation in TP53.

[0200] Table 3 shows the individual performance of biomarkers in detecting the different sample types of the 1st validation biopsies set using different cut-off criteria for methylation than the analysis of table 2. Shown is the performance for detection of different sample types of 5 different methylated DNA markers tested by bisulfite sequencing analysis of the corresponding amplicons (Up3, Up10, Up27, Up35-1, Up35-2). Table 3 specifies the number of CpGs required to be methylated on a DNA sequence read to classify that read as methylated for this analysis. Results are presented when samples are considered methylated if greater than or equal to 1% of all DNA sequence reads are classified as methylated, or if greater than or equal to 10% of all DNA sequence reads are classified as methylated. Also shown is the performance for detecting samples of testing for non-synonymous somatic mutation in assays in which TP53 was amplified from genomic DNA using a set of PCR amplicons that spanned the TP53 coding region and in which Next Generation DNA Sequencing was then used to compare TP53 sequences from esophageal lesions versus matched normal esophagus tissue. Shown are rates of sample detection (expressed as sensitivity or specificity) when samples are classified as TP53 mutant if greater than or equal to 3% of TP53 reads are scored as mutant, or if greater than or equal to 10% of TP53 reads are scored as mutant.

TABLE 3

| | Unchanged CpG # cut-off | | | Updated CpG # Cut-off | | |
|---|---|---|---|---|---|---|
| | applied to all sample sets | | | applied to all sample sets | | |
| | Up3 | Up35-1 | Up35-2 | Up10 | Up27 | |
| | 25 + CpGs | 14 + CpGs | 10 + CpGs | 26 + CpGs | 15 + CpGs | |
| | >1% = | >1% = | >1% = | >1% = | >1% = | p53 |
| Category | positive | positive | positive | positive | positive | >3% |
| Sensitivity EAC | 20% | 50% | 35% | 30% | 20% | 70% |
| Sensitivity for BEs | 7% | 20% | 19% | 0% | 7% | 25% |
| synchronous to EAC | | | | | | |
| or HGD | | | | | | |
| Sensitivity HGD | 17% | 33% | 38% | 0% | 17% | 25% |
| Specificity Sq | 100% | 100% | 100% | 100% | 97% | 100% |
| Specificity for non- | 100% | 100% | 100% | 100% | 100% | 100% |
| dysplastic BE | | | | | | |
| | >10% = | >10% = | >10% = | >10% = | >10% = | >10% = |
| | positive | positive | positive | positive | positive | positive |
| Sensitivity EAC | 15% | 45% | 30% | 10% | 15% | 61% |
| Sensitivity for BEs | 7% | 7% | 6% | 0% | 7% | 19% |
| matching higher | | | | | | |
| pathologies, either | | | | | | |
| EAC or HGD | | | | | | |
| Sensitivity HGD | 0% | 17% | 25% | 0% | 17% | 25% |

[0201] Table 4 shows the performance of selected combinations of the methylated DNA markers (Up3, Up10, Up27, Up35-1, Up35-2) for detection of different sample types in the experiment presented in Table 3. Samples are scored as methylated if any member of the marker combination panel scores the sample as methylated. Results are presented when the individual markers are considered methylated if greater than or equal to 1% of all DNA sequence reads are classified as methylated, or if greater than or equal to 10% of all DNA sequence reads are classified as methylated.

TABLE 4
A

| Cut-off for positivity | | | | | | | | |
|---|---|---|---|---|---|---|---|---|
| (e.i. samples is | | | | | | | | |
| positive if more than | | | | | | | | |
| this % of reads are | | Up3 | Up3 | Up3 | Up3 | Up35-1 | Up35-1 | Up35-1 |
| methylated at the | | and | and | and | and | and | and | and |
| given number of CpGs) | Category | Up35-1 | Up35-2 | Up10 | Up27 | Up35-2 | Up10 | Up27 |
| 1% | Sensitivity EAC | 50% | 45% | 50% | 35% | 50% | 60% | 60% |
| 1% | Sensitivity for BEs | 20% | 20% | 11% | 13% | 27% | 11% | 20% |
| | synchronous to EAC | | | | | | | |
| | or HGD | | | | | | | |
| 1% | Sensitivity HGD | 33% | 33% | 25% | 33% | 33% | 50% | 50% |
| 1% | Specificity Sq | 100% | 100% | 100% | 97% | 100% | 100% | 97% |
| 1% | Specificity for non- | 100% | 100% | 100% | 100% | 100% | 100% | 100% |
| | dysplastic BE | | | | | | | |
| 10% | Sensitivity EAC | 45% | 35% | 30% | 25% | 45% | 50% | 50% |
| | Sensitivity for BEs | 13% | 13% | 11% | 13% | 7% | 0% | 13% |
| | matching higher | | | | | | | |
| | pathologies, either | | | | | | | |
| | EAC or HGD | | | | | | | |
| 10% | Sensitivity HGD | 17% | 33% | 0% | 17% | 33% | 25% | 33% |

A

| Cut-off for positivity | | | | | | |
|---|---|---|---|---|---|---|
| (e.i. samples is | | | | | | |
| positive if more than | | | | | | |
| this % of reads are | | Up35-2 | Up35-2 | Up10 | Up3. | Up3. |
| methylated at the | | and | and | and | Up35-1, | Up35-1, |
| given number of CpGs) | Category | Up10 | Up27 | Up27 | Up35-2 | Up10 |
| 1% | Sensitivity EAC | 50% | 50% | 40% | 50% | 60% |
| 1% | Sensitivity for BEs | 11% | 27% | 0% | 27% | 11% |
| | synchronous to EAC | | | | | |
| | or HGD | | | | | |
| 1% | Sensitivity HGD | 50% | 50% | 0% | 33% | 50% |
| 1% | Specificity Sq | 100% | 97% | 94% | 100% | 100% |
| 1% | Specificity for non- | 100% | 100% | 100% | 100% | 100% |
| | dysplastic BE | | | | | |
| 10% | Sensitivity EAC | 30% | 40% | 20% | 45% | 50% |
| | Sensitivity for BEs | 0% | 13% | 0% | 13% | 11% |
| | matching higher | | | | | |
| | pathologies, either | | | | | |
| | EAC or HGD | | | | | |
| 10% | Sensitivity HGD | 50% | 50% | 0% | 33% | 25% |

B

| Cut-off for positivity | | | | | | | | |
|---|---|---|---|---|---|---|---|---|
| (e.i. samples is | | | | | | | | |
| positive if more than | | | | | | | | Up3. |
| this % of reads are | | Up3. | Up3. | Up3. | Up3. | Up35-1, | Up35-2, | Up35-1, |
| methylated at the | | Up35-1, | Up35-2, | Up35-2, | Up10, | Up10, | Up10, | Up35-2, |
| given number of CpGs) | Category | Up27 | Up10 | Up27 | Up27 | up27 | up27 | Up10 |
| 1% | Sensitivity EAC | 60% | 60% | 55% | 60% | 70% | 60% | 60% |
| 1% | Sensitivity for BEs | 20% | 11% | 27% | 11% | 11% | 11% | 11% |
| | synchronous to EAC | | | | | | | |
| | or HGD | | | | | | | |
| 1% | Sensitivity HGD | 50% | 50% | 50% | 25% | 50% | 50% | 50% |
| 1% | Specificity Sq | 97% | 100% | 97% | 94% | 94% | 94% | 100% |
| 1% | Specificity for non- | 100% | 100% | 100% | 100% | 100% | 100% | 100% |
| | dysplastic BE | | | | | | | |
| 10% | Sensitivity EAC | 50% | 30% | 40% | 40% | 60% | 40% | 50% |
| | Sensitivity for BEs | 20% | 11% | 20% | 11% | 0% | 0% | 11% |
| | matching higher | | | | | | | |
| | pathologies, either | | | | | | | |
| | EAC or HGD | | | | | | | |
| 10% | Sensitivity HGD | 33% | 50% | 50% | 0% | 25% | 50% | 50% |

B

| Cut-off for positivity | | | | | | |
|---|---|---|---|---|---|---|
| (e.i. samples is | | | | | | |
| positive if more than | | Up3. | Up35-1, | Up3, | Up3, | |
| this % of reads are | | Up35-1, | Up35-2, | Up35-2, | Up35-1, | All 5 |
| methylated at the | | Up35-2, | Up10 | Up10 | Up10 | markers |
| given number of CpGs) | Category | Up27 | Up27 | Up27 | Up27 | together |
| 1% | Sensitivity EAC | 60% | 70% | 70% | 70% | 70% |
| 1% | Sensitivity for BEs | 27% | 11% | 11% | 11% | 11% |
| | synchronous to EAC | | | | | |
| | or HGD | | | | | |
| 1% | Sensitivity HGD | 50% | 50% | 50% | 50% | 50% |
| 1% | Specificity Sq | 97% | 94% | 94% | 94% | 94% |
| 1% | Specificity for non- | 100% | 100% | 100% | 100% | 100% |
| | dysplastic BE | | | | | |
| 10% | Sensitivity EAC | 50% | 40% | 40% | 60% | 60% |
| | Sensitivity for BEs | 20% | 11% | 11% | 11% | 11% |
| | matching higher | | | | | |
| | pathologies, either | | | | | |
| | EAC or HGD | | | | | |
| 10% | Sensitivity HGD | 50% | 50% | 50% | 25% | 50% |

[0202] Samples summarized in Table 3 and Table 4 were additionally tested for non-synonymous somatic mutations in TP53. Table 5 shows performance of selected combinations of methylated DNA markers (Up3, Up10, Up27, Up35-1,Up35-2) plus testing for mutations in TP53 (p53) for detection of different sample types. Samples are scored as detected if any member of the marker combination panel scores the sample as methylated or if analysis for TP53 mutations scores the sample as TP53 mutant. Shown is the performance of the marker panel in which samples are scored as detected if any methylation marker is detected as methylated at greater than or equal to 1% of DNA reads, or if TP53 is detected as mutant at greater than or equal to 10% of the DNA sequence reads. Also shown is the performance of the marker panel in which samples are scored as detected if any methylation marker is detected as methylated at greater than or equal to 10% of DNA reads, or if TP53 is detected as mutant at greater than or equal to 10% of the DNA sequence reads.

TABLE 5
A

| Cut-off for positivity | | | | | | | |
|---|---|---|---|---|---|---|---|
| (e.i. sample is | | | | | | | |
| positive if more than | | | | | | | |
| this % of reads are | P53 | | | | | | |
| methylated at the | cut- | | Up-3 | Up35-1 | Up35-2 | Up10 | Up27 |
| given number of CpGs) | off | Category | and p53 | and p53 | and p53 | and p53 | and p53 |
| 1% | 10% | Sensitivity EAC | 70% | 80% | 70% | 60% | 70% |
| 1% | 10% | Sensitivity for BEs | 20% | 20% | 19% | 11% | 27% |
| | | synchronous to EAC | | | | | |
| | | or HGD | | | | | |
| | 10% | Sensitivity HGD | 33% | 50% | 38% | 25% | 33% |
| 1% | 10% | Specificity Sq | 100% | 100% | 100% | 100% | 97% |
| 1% | 10% | Specificity for non- | 100% | 100% | 100% | 100% | 100% |
| | | dysplastic BE | | | | | |
| | | | Individual Methylation Markers + P53 | | | | |
| 10% | 10% | Sensitivity EAC | 70% | 80% | 70% | 60% | 70% |
| | 10% | Sensitivity for BEs | 20% | 20% | 19% | 11% | 27% |
| | | matching higher | | | | | |
| | | pathologies, either | | | | | |
| | | EAC or HGD | | | | | |
| 10% | 10% | Sensitivity HGD | 33% | 50% | 38% | 25% | 33% |

B

| Cut-off for positivity | | | | | | | | | |
|---|---|---|---|---|---|---|---|---|---|
| (e.i. sample is | | | | | | | | | |
| positive if more than | | | | | | | | | |
| this % of reads are | P53 | | Up3 and | Up3 and | Up3 and | Up35-2 and | Up35-2 and | Up10 and | Up3. Up35-2, |
| methylated at the | cut- | | Up35-2 | Up10 and | Up27 and | Up10 and | Up27 and | Up27 and | Up10 and |
| given number of CpGs) | off | Category | and p53 | p53 | p53 | p53 | p53 | p53 | p53 |
| 1% | 10% | Sensitivity EAC | 80% | 80% | 80% | 70% | 80% | 80% | 60% |
| 1% | 10% | Sensitivity for BEs | 20% | 11% | 27% | 11% | 27% | 11% | 11% |
| | | synchronous to EAC | | | | | | | |
| | | or HGD | | | | | | | |
| | 10% | Sensitivity HGD | 50% | 25% | 33% | 50% | 50% | 25% | 50% |
| 1% | 10% | Specificity Sq | 100% | 100% | 97% | 100% | 97% | 94% | 100% |
| 1% | 10% | Specificity for non- | 100% | 100% | 100% | 100% | 100% | 100% | 100% |
| | | dysplastic BE | | | | | | | |
| | | | Methylation Marker Combinations Merged with P53 Mutation | | | | | | |
| 10% | 10% | Sensitivity EAC | 75% | 70% | 75% | 70% | 80% | 70% | 30% |
| | 10% | Sensitivity for BEs | 20% | 11% | 27% | 11% | 27% | 11% | 11% |
| | | matching higher | | | | | | | |
| | | pathologies, either | | | | | | | |
| | | EAC or HGD | | | | | | | |
| 10% | 10% | Sensitivity HGD | 50% | 25% | 33% | 50% | 50% | 25% | 50% |

B

| Cut-off for positivity | | | | | | | |
|---|---|---|---|---|---|---|---|
| (e.i. sample is | | | | | | | |
| positive if more than | | | | | | | |
| this % of reads are | P53 | | Up3. Up35-2, | Up3. Up10, | Up35-2, Up10, | Up35-1, Up35-2, | Up3, Up35-2, |
| methylated at the | cut- | | Up27 and | Up27 and | up27 and | Up10 Up27 | Up10 Up27 |
| given number of CpGs) | off | Category | p53 | p53 | p53 | and p53 | and p53 |
| 1% | 10% | Sensitivity EAC | 85% | 90% | 80% | 90% | 90% |
| 1% | 10% | Sensitivity for BEs | 27% | 11% | 11% | 11% | 11% |
| | | synchronous to EAC | | | | | |
| | | or HGD | | | | | |
| | 10% | Sensitivity HGD | 50% | 25% | 50% | 50% | 50% |
| 1% | 10% | Specificity Sq | 97% | 94% | 94% | 94% | 94% |
| 1% | 10% | Specificity for non- | 100% | 100% | 100% | 100% | 100% |
| | | dysplastic BE | | | | | |
| | | | Methylation Marker Combinations Merged with P53 Mutation | | | | |
| 10% | 10% | Sensitivity EAC | 80% | 80% | 80% | 80% | 80% |
| | 10% | Sensitivity for BEs | 27% | 11% | 11% | 11% | 11% |
| | | matching higher | | | | | |
| | | pathologies, either | | | | | |
| | | EAC or HGD | | | | | |
| 10% | 10% | Sensitivity HGD | 50% | 25% | 50% | 50% | 50% |

[0203] DNA was also extracted from esophageal samples that were also obtained by cytology brushings of the esophagus. The sample set included brushings from 49 esophageal adenocarcinomas (EAC); 14 carcinomas of the gastroesophageal junction (JCA); 8 Barrett's esophagus with low grade dysplasia (LGD); 9 Barrett's esophagus with high-grade dysplasia (HGD); 33 cases of Barrett's esophagus without dysplasia from cases without HGD or EAC, otherwise termed non-dysplastic BE, that included 13 cases of short segment Barrett's esophagus (SSBE). Also included were brushings of the gastroesophageal junction (normal GEJ) from 62 individuals without Barrett's esophagus, without HGD, without EAC. This included individuals with gastroesophageal reflux disease, with eosinophilic esophagitis, or without any disease. Also included were 176 brushings of normal squamous esophagus from each of the above individuals. These DNA samples were analyzed for methylation by bisulfite sequencing of selected amplicons and were also analyzed for non-synonymous somatic mutations in TP53.

[0204] Table 6 shows the individual performance of biomarkers in detecting the different sample types of the validation brushings set. Shown is the performance for detection of different sample types of 5 different methylated DNA markers analyzed by bisulfite sequencing of selected amplicons (Up3, Up10, Up27, Up35-1, Up35-2). The table specifies the number of CpGs required to be methylated on a DNA sequence read to classify that read as methylated. Results are presented when samples are considered methylated if greater than or equal to 1% of all DNA sequence reads are classified as methylated, or if greater than or equal to 10% of all DNA sequence reads are classified as methylated. Also shown is the performance for detecting samples of testing for somatic mutation in assays in which TP53 was amplified from genomic DNA using a set of PCR amplicons that spanned the TP53 coding region and in which Next Generation DNA Sequencing was then used to compare TP53 sequences from esophageal lesions versus matched normal esophagus tissue. Shown are rates of sample detection (expressed as sensitivity or specificity) when samples are classified as TP53 mutant if greater than or equal to 3% of TP53 reads are scored as mutant, or if greater than or equal to 10% of TP53 reads are scored as mutant.

TABLE 6

| | Unchanged CpG # cut-off applied to all sample sets | | |
|---|---|---|---|
| | Up-3 25 + | Up35-1 | |
| | CpGs | 14 + CpGs | Up35-2 10 + CpGs |
| Category | >1% = positive | >1% = positive | >1% = positive |
| Sensitivity EAC | 44% | 57% | 57% |
| Sensitivity JCA | 14% | 43% | 21% |
| Sensitivity LGD | 25% | 38% | 25% |
| Sensitivity HGD | 67% | 56% | 50% |
| Specificity normal GEJ | 98% | 98% | 98% |
| Specificity for “non-dysplastic | 95% | 100% | 100% |
| BE”-excluding SSBE | | | |
| Specificity for all BE without | 97% | 85% | 94% |
| dysplasia (including SSBE and | | | |
| non-dysplastic BE) | | | |
| | >10% = positive | >10% = positive | >10% = positive |
| Sensitivity EAC | 21% | 57% | 45% |
| Sensitivity JCA | 7% | 29% | 7% |
| Sensitivity LGD | 13% | 38% | 25% |
| Sensitivity HGD | 33% | 56% | 30% |
| Specificity normal GEJ | 100% | 100% | 100% |
| Specificity for “non-dysplastic | 100% | 100% | 100% |
| BE”-excluding SSBE | | | |
| Specificity for all BE without | 100% | 88% | 97% |
| dysplasia (including SSBE and | | | |
| non-dysplastic BE) | | | |
| | Updated CpG # cut-off applied to | | |
| | all sample sets | | |
| | Up10 | | |
| | 26 + CpGs | Up27 15 + CpGs | p53 |
| Category | >1% = positive | >1% = positive | >3% |
| Sensitivity EAC | 31% | 43% | 59% |
| Sensitivity JCA | 43% | 14% | 50% |
| Sensitivity LGD | 0% | 13% | 13% |
| Sensitivity HGD | 22% | 20% | 40% |
| Specificity normal | 98% | 100% | 100% |
| GEJ | | | |
| Specificity for “non- | 100% | 95% | 100% |
| dysplastic BE”- | | | |
| excluding SSBE | | | |
| Specificity for all BE | 100% | 94% | 97% |
| without dysplasia | | | |
| (including SSBE and | | | |
| non-dysplastic BE) | | | |
| | >10% = positive | >10% = positive | >10% = positive |
| Sensitivity EAC | 25% | 29% | 47% |
| Sensitivity JCA | 29% | 7% | 29% |
| Sensitivity LGD | 0% | 13% | 0% |
| Sensitivity HGD | 11% | 20% | 40% |
| Specificity normal | 100% | 100% | 100% |
| GEJ | | | |
| Specificity for “non- | 100% | 95% | 100% |
| dysplastic BE”- | | | |
| excluding SSBE | | | |
| Specificity for all BE | 100% | 97% | 97% |
| without dysplasia | | | |
| (including SSBE and | | | |
| non-dysplastic BE) | | | |

[0205] Table 7 shows the performance of selected combinations of the methylated DNA markers (Up3, Up10, Up27, Up35-1, Up35-2) for detection of different sample types in the esophageal brushings samples presented in Table 6. Samples are scored as methylated if any member of the marker combination panel scores the sample as methylated. Results are presented when the individual markers are considered methylated if greater than or equal to 1% of all DNA sequence reads are classified as methylated, or if greater than or equal to 10% of all DNA sequence reads are classified as methylated.

TABLE 7
A

| Cut-off for positivity | | | | | | | |
|---|---|---|---|---|---|---|---|
| (e.i. sample is | | | | | | | |
| positive if more than | | | | | | | |
| this % of reads are | | Up3 | Up3 | Up3 | Up3 | Up35-1 | Up35-1 |
| methylated at the | | and | and | and | and | and | and |
| given number of CpGs) | Category | Up35-1 | Up35-2 | Up10 | Up27 | Up35-2 | Up10 |
| 1% | Sensitivity EAC | 63% | 60% | 57% | 56% | 61% | 71% |
| 1% | Sensitivity JCA | 43% | 21% | 50% | 29% | 43% | 57% |
| 1% | Sensitivity LGD | 38% | 38% | 14% | 25% | 38% | 29% |
| 1% | Sensitivity HGD | 78% | 78% | 78% | 67% | 56% | 78% |
| 1% | Specificity normal GEJ | 98% | 98% | 97% | 98% | 98% | 97% |
| 1% | Specificity for non-dyspl BE | 95% | 95% | 95% | 90% | 100% | 100% |
| 1% | Specificity all BE without | 84% | 94% | 97% | 91% | 85% | 85% |
| | dysplasia(including SSBE, | | | | | | |
| | and non-dysplastic BE) | | | | | | |
| 10% | Sensitivity EAC | 56% | 48% | 38% | 38% | 57% | 67% |
| 10% | Sensitivity JCA | 29% | 7% | 29% | 14% | 29% | 43% |
| 10% | Sensitivity LGD | 38% | 38% | 0% | 25% | 38% | 29% |
| 10% | Sensitivity HGD | 67% | 44% | 33% | 44% | 56% | 67% |

A

| Cut-off for positivity | | | | | | |
|---|---|---|---|---|---|---|
| (e.i. sample is | | | | | | |
| positive if more than | | | | | | |
| this % of reads are | | Up35-1 | Up35-2 | Up35-2 | Up10 | Up3. |
| methylated at the | | and | and | and | and | Up35-1, |
| given number of CpGs) | Category | Up27 | Up10 | Up27 | Up27 | Up35-2 |
| 1% | Sensitivity EAC | 67% | 71% | 63% | 58% | 63% |
| 1% | Sensitivity JCA | 50% | 50% | 36% | 43% | 43% |
| 1% | Sensitivity LGD | 38% | 29% | 25% | 14% | 38% |
| 1% | Sensitivity HGD | 67% | 67% | 60% | 33% | 78% |
| 1% | Specificity normal GEJ | 98% | 97% | 98% | 98% | 98% |
| 1% | Specificity for non-dyspl BE | 95% | 100% | 95% | 95% | 95% |
| 1% | Specificity all BE without | 82% | 94% | 91% | 94% | 84% |
| | dysplasia(including SSBE, | | | | | |
| | and non-dysplastic BE) | | | | | |
| 10% | Sensitivity EAC | 65% | 58% | 55% | 42% | 63% |
| 10% | Sensitivity JCA | 36% | 29% | 14% | 36% | 29% |
| 10% | Sensitivity LGD | 38% | 25% | 25% | 14% | 38% |
| 10% | Sensitivity HGD | 67% | 44% | 50% | 22% | 78% |

B

| Cut-off for positivity | | | | | | | | |
|---|---|---|---|---|---|---|---|---|
| (e.i. sample is | | | | | | | | |
| positive if more than | | | | | | | | |
| this % of reads are | | Up3. | Up3. | Up3. | Up3. | Up3. | Up35-1, | Up35-2, |
| methylated at the | | Up35-1, | Up35-1, | Up35-2, | Up35-2, | Up10, | Up10, | Up10, |
| given number of CpGs) | Category | Up10 | Up27 | Up10 | Up27 | Up27 | up27 | up27 |
| 1% | Sensitivity EAC | 72% | 69% | 70% | 67% | 64% | 77% | 75% |
| 1% | Sensitivity JCA | 57% | 50% | 50% | 36% | 50% | 57% | 50% |
| 1% | Sensitivity LGD | 29% | 38% | 29% | 38% | 14% | 29% | 29% |
| 1% | Sensitivity HGD | 89% | 78% | 89% | 78% | 78% | 89% | 78% |
| 1% | Specificity normal GEJ | 97% | 98% | 97% | 98% | 97% | 97% | 97% |
| 1% | Specificity for non-dyspl BE | 95% | 90% | 95% | 90% | 90% | 95% | 95% |
| 1% | Specificity all BE without | 84% | 81% | 94% | 91% | 91% | 82% | 91% |
| | dysplasia(including SSBE, | | | | | | | |
| | and non-dysplastic BE) | | | | | | | |
| 10% | Sensitivity EAC | 66% | 65% | 57% | 56% | 49% | 71% | 63% |
| 10% | Sensitivity JCA | 43% | 36% | 29% | 14% | 36% | 50% | 36% |
| 10% | Sensitivity LGD | 29% | 38% | 29% | 38% | 14% | 29% | 29% |
| 10% | Sensitivity HGD | 67% | 78% | 44% | 56% | 44% | 78% | 56% |

B

| Cut-off for positivity | | | | | | | |
|---|---|---|---|---|---|---|---|
| (e.i. sample is | | | | | | | |
| positive if more than | | Up3. | Up3. | Up35-1, | Up3, | Up3, | |
| this % of reads are | | Up35-1, | Up35-1, | Up35-2, | Up35-2, | Up35-1, | All 5 |
| methylated at the | | Up35-2, | Up35-2, | Up10 | Up10 | Up10 | markers |
| given number of CpGs) | Category | Up10 | Up27 | Up27 | Up27 | Up27 | together |
| 1% | Sensitivity EAC | 72% | 69% | 74% | 74% | 77% | 77% |
| 1% | Sensitivity JCA | 57% | 50% | 50% | 50% | 57% | 57% |
| 1% | Sensitivity LGD | 29% | 38% | 29% | 29% | 29% | 29% |
| 1% | Sensitivity HGD | 89% | 78% | 89% | 89% | 89% | 89% |
| 1% | Specificity normal GEJ | 97% | 98% | 97% | 97% | 97% | 97% |
| 1% | Specificity for non-dyspl BE | 95% | 90% | 90% | 90% | 90% | 90% |
| 1% | Specificity all BE without | 84% | 81% | 91% | 91% | 81% | 81% |
| | dysplasia(including SSBE, | | | | | | |
| | and non-dysplastic BE) | | | | | | |
| 10% | Sensitivity EAC | 66% | 65% | 62% | 62% | 70% | 70% |
| 10% | Sensitivity JCA | 43% | 36% | 36% | 36% | 50% | 50% |
| 10% | Sensitivity LGD | 29% | 38% | 29% | 29% | 29% | 29% |
| 10% | Sensitivity HGD | 67% | 78% | 56% | 56% | 78% | 78% |

[0206] Table 8 shows the performance of selected combinations of methylated DNA markers (Up3, Up10, Up27, Up35-1, Up35-2) plus testing for mutations in TP53 (p53) for detection of different sample types in the esophageal brushings samples presented in Tables 6 and 7. Samples are scored as detected if any member of the marker combination panel scores the sample as methylated or if analysis for TP53 mutations scores the sample as TP53 mutant. Shown is the performance of the marker panel in which samples are scored as detected if any methylation marker is detected as methylated at greater than or equal to 1% of DNA reads, or if TP53 is detected as mutant at greater than or equal to 3% or at greater than or equal to 10% of the DNA sequence reads. Also shown is the performance of the marker panel in which samples are scored as detected if any methylation marker is detected as methylated at greater than or equal to 10% of DNA reads, or if TP53 is detected as mutant at greater than or equal to 3% or at greater than or equal to 10% of the DNA sequence reads. Marker combination with greater than 90% specificity in all BE without dysplasia are preferred yellow. Marker combinations that additionally show superior sensitivity for EAC are further preferred. Particularly preferred marker combinations are: Up35-2 methylation plus TP53 mutation; Up35-2 methylation plus Up3 methylation plus TP53 mutation; Up10 methylation plus Up3 methylation plus TP53 mutation; Up35-2 methylation plus Up10 methylation plus TP53 mutation; Up10 methylation plus Up27 methylation plus TP53 mutation; Up35-2 methylation plus Up3 methylation plus Up10 methylation plus TP53 mutation.

TABLE 8
A

| Methyl cut-off (samples | | | | | | | | | | |
|---|---|---|---|---|---|---|---|---|---|---|
| are positive if more | | | | | | | | | | |
| than this % of reads | P53 | | | | | | | Up3 | Up3 and | Up3 and |
| are methylated at the | cut- | | Up-3 | Up35-1 | Up35-2 | Up10 | Up27 | Up35-2 | Up10 | Up27 |
| required number of CpGs) | off | Category | and p53 | and p53 | and p53 | and p53 | and p53 | and p53 | and p53 | and p53 |
| 1% | 1% | Sensitivity EAC | 81% | 84% | 86% | 75% | 80% | 88% | 85% | 85% |
| 1% | 1% | Sensitivity JCA | 50% | 64% | 50% | 57% | 57% | 50% | 57% | 57% |
| 1% | 1% | Sensitivity LGD | 25% | 38% | 25% | 14% | 13% | 38% | 14% | 25% |
| 1% | 1% | Sensitivity HGD | 78% | 78% | 70% | 33% | 50% | 89% | 78% | 78% |
| 1% | 1% | Specificity normal | 98% | 98% | 98% | 98% | 100% | 98% | 97% | 98% |
| | | GEJ | | | | | | | | |
| 1% | 1% | Specificity for non- | 95% | 100% | 100% | 100% | 95% | 95% | 95% | 90% |
| | | dysplastic BE | | | | | | | | |
| 1% | 1% | Specificity all BE | 94% | 82% | 91% | 97% | 91% | 91% | 94% | 88% |
| | | without dysplasia | | | | | | | | |
| | | (including SSBE, | | | | | | | | |
| | | and non-dysplastic | | | | | | | | |
| | | BE) | | | | | | | | |
| 1% | 3% | Sensitivity EAC | 77% | 82% | 84% | 73% | 78% | 85% | 83% | 83% |
| 1% | 3% | Sensitivity JCA | 50% | 64% | 50% | 57% | 57% | 50% | 57% | 57% |
| 1% | 3% | Sensitivity LGD | 25% | 38% | 25% | 14% | 13% | 38% | 14% | 25% |
| 1% | 3% | Sensitivity HGD | 78% | 78% | 70% | 33% | 50% | 89% | 78% | 78% |
| 10% | 3% | Sensitivity EAC | 69% | 82% | 80% | 71% | 71% | 79% | 79% | 75% |
| 10% | 3% | Sensitivity JCA | 50% | 57% | 50% | 57% | 50% | 50% | 57% | 50% |
| 10% | 3% | Sensitivity LGD | 25% | 38% | 25% | 14% | 13% | 38% | 14% | 25% |
| 10% | 3% | Sensitivity HGD | 44% | 78% | 60% | 33% | 50% | 56% | 44% | 56% |
| 10% | 10% | Sensitivity EAC | 60% | 73% | 69% | 60% | 65% | 71% | 70% | 69% |
| 10% | 10% | Sensitivity JCA | 29% | 43% | 29% | 43% | 29% | 29% | 43% | 29% |
| 10% | 10% | Sensitivity LGD | 13% | 38% | 25% | 0% | 13% | 38% | 0% | 25% |
| 10% | 10% | Sensitivity HGD | 44% | 78% | 60% | 33% | 50% | 56% | 44% | 56% |

B

| Methyl cut-off (samples | | | | | | | |
|---|---|---|---|---|---|---|---|
| are positive if more | | | | | | Up3. | Up3. |
| than this % of reads | P53 | | Up35-2 | Up35-2 | Up10 and | Up35-2, | Up35-2, |
| are methylated at the | cut- | | and Up10 | and Up27 | Up27 and | Up10 and | Up27 and |
| required number of CpGs) | off | Category | and p53 | and p53 | p53 | p53 | p53 |
| 1% | 1% | Sensitivity EAC | 92% | 90% | 85% | 91% | 92% |
| 1% | 1% | Sensitivity JCA | 57% | 57% | 57% | 57% | 57% |
| 1% | 1% | Sensitivity LGD | 29% | 25% | 14% | 29% | 38% |
| 1% | 1% | Sensitivity HGD | 67% | 80% | 44% | 89% | 89% |
| 1% | 1% | Specificity normal | 97% | 98% | 98% | 97% | 98% |
| | | GEJ | | | | | |
| 1% | 1% | Specificity for non- | 100% | 95% | 95% | 95% | 90% |
| | | dysplastic BE | | | | | |
| 1% | 1% | Specificity all BE | 91% | 88% | 91% | 91% | 88% |
| | | without dysplasia | | | | | |
| | | (including SSBE, | | | | | |
| | | and non-dysplastic | | | | | |
| | | BE) | | | | | |
| 1% | 3% | Sensitivity EAC | 90% | 88% | 83% | 89% | 90% |
| 1% | 3% | Sensitivity JCA | 57% | 57% | 57% | 57% | 57% |
| 1% | 3% | Sensitivity LGD | 29% | 25% | 14% | 29% | 38% |
| 1% | 3% | Sensitivity HGD | 57% | 80% | 44% | 89% | 89% |
| 10% | 3% | Sensitivity EAC | 85% | 86% | 77% | 85% | 85% |
| 10% | 3% | Sensitivity JCA | 57% | 50% | 57% | 57% | 50% |
| 10% | 3% | Sensitivity LGD | 29% | 25% | 14% | 29% | 38% |
| 10% | 3% | Sensitivity HGD | 56% | 70% | 44% | 56% | 67% |
| 10% | 10% | Sensitivity EAC | 77% | 80% | 71% | 77% | 79% |
| 10% | 10% | Sensitivity JCA | 43% | 29% | 43% | 43% | 29% |
| 10% | 10% | Sensitivity LGD | 29% | 25% | 14% | 29% | 38% |
| 10% | 10% | Sensitivity HGD | 56% | 70% | 44% | 56% | 67% |

B

| Methyl cut-off (samples | | | | | Up35-1, | Up3, |
|---|---|---|---|---|---|---|
| are positive if more | | | Up3. | Up35-2, | Up35-2, | Up35-2, |
| than this % of reads | P53 | | Up10, | Up10, | Up10 | Up10 |
| are methylated at the | cut- | | Up27 | up27 | Up27 | Up27 |
| required number of CpGs) | off | Category | and p53 | and p53 | and p53 | and p53 |
| 1% | 1% | Sensitivity EAC | 87% | 94% | 94% | 94% |
| 1% | 1% | Sensitivity JCA | 57% | 57% | 57% | 57% |
| 1% | 1% | Sensitivity LGD | 14% | 29% | 29% | 29% |
| 1% | 1% | Sensitivity HGD | 78% | 78% | 89% | 89% |
| 1% | 1% | Specificity normal | 97% | 97% | 97% | 97% |
| | | GEJ | | | | |
| 1% | 1% | Specificity for non- | 90% | 95% | 90% | 90% |
| | | dysplastic BE | | | | |
| 1% | 1% | Specificity all BE | 88% | 88% | 88% | 88% |
| | | without dysplasia | | | | |
| | | (including SSBE, | | | | |
| | | and non-dysplastic | | | | |
| | | BE) | | | | |
| 1% | 3% | Sensitivity EAC | 85% | 92% | 91% | 91% |
| 1% | 3% | Sensitivity JCA | 57% | 57% | 57% | 57% |
| 1% | 3% | Sensitivity LGD | 14% | 29% | 29% | 29% |
| 1% | 3% | Sensitivity HGD | 78% | 78% | 89% | 89% |
| 10% | 3% | Sensitivity EAC | 81% | 88% | 87% | 87% |
| 10% | 3% | Sensitivity JCA | 57% | 57% | 57% | 57% |
| 10% | 3% | Sensitivity LGD | 14% | 29% | 29% | 29% |
| 10% | 3% | Sensitivity HGD | 56% | 67% | 67% | 67% |
| 10% | 10% | Sensitivity EAC | 74% | 81% | 81% | 81% |
| 10% | 10% | Sensitivity JCA | 43% | 43% | 43% | 43% |
| 10% | 10% | Sensitivity LGD | 14% | 29% | 29% | 29% |
| 10% | 10% | Sensitivity HGD | 56% | 67% | 67% | 67% |

### Example 4

### Analysis of Esophageal Cancer Informative Loci in Formalin Fixed Paraffin Embedded Tissues

[0207] Additional studies were performed on DNAs extracted from formalin fixed paraffin embedded (FFPE) tissue samples of the stomach and esophagus that capture different diagnostic categories other than Barrett's with high grade dysplasia and esophageal adenocarcinoma. Bisulfite converted DNAs from each sample were amplified with bisulfite specific methylation indifferent primers corresponding to selected amplicons and the amplicons were then analyzed by bisulfite sequencing to determine methylation status on the parental DNA templates.

[0208] Table 9 summarizes the side by side comparison of 8 methylated DNA markers in FFPE tissue samples of the stomach and esophagus that capture different diagnostic categories other than Barrett's with high grade dysplasia and esophageal adenocarcinoma. Intestinal metaplasia is abbreviated as IM. Table 9 denotes for each marker the number of methylated cytosine bases required to be detected on a DNA sequence read to classify that read as methylated. Samples are detected as methylated if greater than or equal to 1% of DNA sequence reads are classified as methylated.

TABLE 9
A

| | Marker | | | | | | | |
|---|---|---|---|---|---|---|---|---|
| | VIM | | SqBE5 | | SqBE Up7 | | SqBE11-2 | |
| | CpG cut-off | | | | | | | |
| | 6+ | | 13+ | | 23+ | | 5+ | |
| | Value (% positive samples or total number of samples sequenced) | | | | | | | |
| | % | Total | % | Total | % | Total | % | Total |
| | positive | number | positive | number | positive | number | positive | number |
| BE (IM) | 90% | 30 | 50% | 12 | 50% | 16 | 83% | 30 |
| GEJ/Cardia with IM | 82% | 11 | 0% | 5 | 33% | 6 | 100% | 11 |
| GEJ/Cardia without IM | 0% | 58 | 0% | 33 | 2% | 47 | 31% | 58 |
| columnar mucosa without | 30% | 10 | 0% | 4 | 20% | 5 | 30% | 10 |
| IM taken from patients | | | | | | | | |
| with concurrent IM | | | | | | | | |
| at the same endoscopy | | | | | | | | |
| Normal Distal | 9% | 23 | 8% | 13 | 0% | 16 | 13% | 23 |
| Esophagus-Squamous | | | | | | | | |
| Squamous Mucosa with | 0% | 10 | 0% | 6 | 0% | 5 | 0% | 10 |
| REFLUX Esophagus | | | | | | | | |
| Eosinophilic Eosphagitis | 0% | 15 | 0% | 5 | 0% | 11 | 0% | 15 |
| Gastic Mucosa with IM | 22% | 9 | 0% | 2 | 20% | 5 | 44% | 9 |
| Gastric Fundic Mucosa | 0% | 24 | 0% | 14 | 5% | 21 | 8% | 24 |
| without IM | | | | | | | | |
| Helicobactor Pylori | 8% | 13 | 22% | 9 | 13% | 8 | 69% | 13 |
| Gastritis without IM | | | | | | | | |

B

| | Marker | | | | | | | |
|---|---|---|---|---|---|---|---|---|
| | SqBE14-2 | | SqBE16 | | SqBE17 | | SqBE18 | |
| | CpG cut-off | | | | | | | |
| | 20+ | | 14+ | | 17+ | | 16+ | |
| | Value (% positive samples or total number of samples sequenced) | | | | | | | |
| | % | Total | % | Total | % | Total | % | Total |
| | positive | number | positive | number | positive | number | positive | number |
| BE (IM) | 50% | 16 | 50% | 26 | 69% | 26 | 86% | 29 |
| GEJ/Cardia with IM | 22% | 9 | 18% | 11 | 73% | 11 | 70% | 10 |
| GEJ/Cardia without IM | 2% | 43 | 2% | 55 | 7% | 55 | 0% | 57 |
| columnar mucosa without | 0% | 5 | 11% | 9 | 11% | 9 | 11% | 9 |
| IM taken from patients | | | | | | | | |
| with concurrent IM | | | | | | | | |
| at the same endoscopy | | | | | | | | |
| Normal Distal | 10% | 20 | 5% | 22 | 4% | 23 | 4% | 23 |
| Esophagus-Squamous | | | | | | | | |
| Squamous Mucosa with | 17% | 6 | 0% | 8 | 0% | 9 | 0% | 10 |
| REFLUX Esophagus | | | | | | | | |
| Eosinophilic Eosphagitis | 0% | 8 | 0% | 12 | 8% | 13 | 0% | 12 |
| Gastic Mucosa with IM | 0% | 5 | 0% | 7 | 25% | 8 | 14% | 7 |
| Gastric Fundic Mucosa | 0% | 14 | 0% | 24 | 0% | 24 | 8% | 24 |
| without IM | | | | | | | | |
| Helicobactor Pylori | 14% | 7 | 8% | 13 | 46% | 13 | 15% | 13 |
| Gastritis without IM | | | | | | | | |

[0209] Table 10 summarizes the side by side comparison of 8 methylated DNA markers in FFPE tissue samples of the stomach and esophagus that capture different diagnostic categories other than Barrett's with high grade dysplasia and esophageal adenocarcinoma. Intestinal metaplasia is abbreviated as IM. Table 10 denotes for each marker the number of methylated cytosine bases required to be detected on a DNA sequence read to classify that read as methylated. Samples are detected as methylated if greater than or equal to 10% of DNA sequence reads are classified as methylated.

TABLE 10
A

| | Marker | | | | | | | |
|---|---|---|---|---|---|---|---|---|
| | VIM | | SqBE5 | | SqBE Up7 | | SqBE11-2 | |
| | CpG cut-off | | | | | | | |
| | 6+ | | 13+ | | 23+ | | 5+ | |
| | Value (% positive samples or total number of samples sequenced) | | | | | | | |
| | % | Total | % | Total | % | Total | % | Total |
| | positive | number | positive | number | positive | number | positive | number |
| BE (IM) | 87% | 30 | 50% | 12 | 44% | 16 | 70% | 30 |
| GEJ/Cardia with IM | 82% | 11 | 0% | 5 | 33% | 6 | 91% | 11 |
| GEJ/Cardia without IM | 0% | 58 | 0% | 33 | 2% | 47 | 16% | 58 |
| columnar mucosa without | 0% | 10 | 0% | 4 | 0% | 5 | 10% | 10 |
| IM taken from patients | | | | | | | | |
| with concurrent IM | | | | | | | | |
| at the same endoscopy | | | | | | | | |
| Normal Distal | 9% | 23 | 8% | 13 | 0% | 16 | 13% | 23 |
| Esophagus-Squamous | | | | | | | | |
| Squamous Mucosa with | 0% | 10 | 0% | 6 | 0% | 5 | 0% | 10 |
| REFLUX Esophagus | | | | | | | | |
| Eosinophilic Eosphagitis | 0% | 15 | 0% | 5 | 0% | 11 | 0% | 15 |
| Gastic Mucosa with IM | 11% | 9 | 0% | 2 | 20% | 5 | 22% | 9 |
| Gastric Fundic Mucosa | 0% | 24 | 0% | 14 | 5% | 21 | 4% | 24 |
| without IM | | | | | | | | |
| Helicobactor Pylori | 8% | 13 | 22% | 9 | 13% | 8 | 46% | 13 |
| Gastritis without IM | | | | | | | | |

B

| | Marker | | | | | | | |
|---|---|---|---|---|---|---|---|---|
| | SqBE14-2 | | SqBE16 | | SqBE17 | | SqBE18 | |
| | CpG cut-off | | | | | | | |
| | 20+ | | 14+ | | 17+ | | 16+ | |
| | Value (% positive samples or total number of samples sequenced) | | | | | | | |
| | % | Total | % | Total | % | Total | % | Total |
| | positive | number | positive | number | positive | number | positive | number |
| BE (IM) | 50% | 16 | 42% | 26 | 62% | 26 | 76% | 29 |
| GEJ/Cardia with IM | 22% | 9 | 18% | 11 | 64% | 11 | 70% | 10 |
| GEJ/Cardia without IM | 2% | 43 | 2% | 55 | 0% | 55 | 0% | 57 |
| columnar mucosa without | 0% | 5 | 0% | 9 | 11% | 9 | 11% | 9 |
| IM taken from patients | | | | | | | | |
| with concurrent IM | | | | | | | | |
| at the same endoscopy | | | | | | | | |
| Normal Distal | 10% | 20 | 5% | 22 | 4% | 23 | 4% | 23 |
| Esophagus-Squamous | | | | | | | | |
| Squamous Mucosa with | 17% | 6 | 0% | 8 | 0% | 9 | 0% | 10 |
| REFLUX Esophagus | | | | | | | | |
| Eosinophilic Eosphagitis | 0% | 8 | 0% | 12 | 0% | 13 | 0% | 12 |
| Gastic Mucosa with IM | 0% | 5 | 0% | 7 | 13% | 8 | 14% | 7 |
| Gastric Fundic Mucosa | 0% | 14 | 0% | 24 | 0% | 24 | 0% | 24 |
| without IM | | | | | | | | |
| Helicobactor Pylori | 14% | 7 | 8% | 13 | 46% | 13 | 8% | 13 |
| Gastritis without IM | | | | | | | | |

[0210] Table 11 summarizes performance of different panels comprised of combinations of methylated DNA markers in FETE tissue samples of the stomach and esophagus that capture different diagnostic categories other than Barrett's with high grade dysplasia and esophageal adenocarcinoma. Intestinal metaplasia is abbreviated as IM. Tables 9 and 10 denote for each marker the number of methylated cytosine bases required to be detected on a DNA sequence read to classify that read as methylated. Samples are detected as methylated if greater than or equal to 1% of DNA sequence reads are classified as methylated for any member of the marker panel.

TABLE 11
A

| | Marker combinations | | | | | | |
|---|---|---|---|---|---|---|---|
| | VIM | VIM | VIM | VIM | VIM | SqBE5 | SqBE5 |
| | SqBE5 | SqBE7 | SqBE16 | SqBE17 | SqBE18 | SqBE7 | SqBE16 |
| BE (IM) | 92% | 88% | 92% | 88% | 97% | 71% | 70% |
| GEJ/Cardia with IM | 60% | 83% | 82% | 91% | 80% | 50% | 0% |
| GEJ/Cardia without IM | 0% | 2% | 2% | 7% | 0% | 3% | 3% |
| columnar mucosa without | 25% | 40% | 33% | 33% | 33% | 25% | 0% |
| IM taken from patients | | | | | | | |
| with concurrent IM | | | | | | | |
| at the same endoscopy | | | | | | | |
| Normal Distal | 8% | 6% | 9% | 9% | 9% | 8% | 8% |
| Esophagus-Squamous | | | | | | | |
| Squamous Mucosa with | 0% | 0% | 0% | 0% | 0% | 0% | 0% |
| REFLUX Esophagus | | | | | | | |
| Eosinophilic Eosphagitis | 0% | 0% | 0% | 8% | 0% | 0% | 0% |
| Gastic Mucosa with IM | 0% | 40% | 14% | 38% | 43% | 0% | 0% |
| Gastric Fundic Mucosa | 0% | 5% | 0% | 0% | 8% | 7% | 0% |
| without IM | | | | | | | |
| Helicobactor Pylori | 33% | 13% | 15% | 46% | 15% | 29% | 22% |
| Gastritis without IM | | | | | | | |

B

| | Marker combinations | | | | | | |
|---|---|---|---|---|---|---|---|
| | SqBE5 | SqBE5 | SqBE7 | SqBE7 | SqBE7 | SqBE16 | SqBE16 |
| | SqBE17 | SqBE18 | SqBE16 | SqBE17 | SqBE18 | SqBE17 | SqBE18 |
| BE (IM) | 80% | 91% | 57% | 79% | 94% | 78% | 92% |
| GEJ/Cardia with IM | 80% | 40% | 33% | 50% | 83% | 73% | 70% |
| GEJ/Cardia without IM | 9% | 0% | 2% | 9% | 2% | 8% | 2% |
| columnar mucosa without | 25% | 0% | 40% | 20% | 20% | 22% | 22% |
| IM taken from patients | | | | | | | |
| with concurrent IM | | | | | | | |
| at the same endoscopy | | | | | | | |
| Normal Distal | 8% | 8% | 6% | 0% | 6% | 9% | 5% |
| Esophagus-Squamous | | | | | | | |
| Squamous Mucosa with | 0% | 0% | 0% | 0% | 0% | 0% | 0% |
| REFLUX Esophagus | | | | | | | |
| Eosinophilic Eosphagitis | 20% | 0% | 0% | 10% | 0% | 10% | 0% |
| Gastic Mucosa with IM | 50% | 0% | 25% | 40% | 20% | 33% | 17% |
| Gastric Fundic Mucosa | 0% | 7% | 5% | 5% | 5% | 0% | 8% |
| without IM | | | | | | | |
| Helicobactor Pylori | 44% | 44% | 25% | 50% | 25% | 46% | 23% |
| Gastritis without IM | | | | | | | |

[0211] Table 12 summarizes performance of different panels comprised of combinations of methylated DNA markers in FFPE tissue samples of the stomach and esophagus that capture different diagnostic categories other than Barrett's with high grade dysplasia and esophageal adenocarcinoma. Intestinal metapiasia is abbreviated as Tables 9 and 10 denote for each marker the number of methylated cytosine bases required to be detected on a DNA sequence read to classify that read as methylated. Samples are detected as methylated if greater than or equal to 10% of DNA sequence reads are classified as methylated for any member of the marker panel.

TABLE 12
A

| | Marker combinations | | | | | | |
|---|---|---|---|---|---|---|---|
| | VIM | VIM | VIM | VIM | VIM | SqBE5 | SqBE5 |
| | SqBE5 | SqBE7 | SqBE16 | SqBE17 | SqBE18 | SqBE7 | SqBE16 |
| BE (IM) | 92% | 81% | 88% | 85% | 90% | 71% | 60% |
| GEJ/Cardia with IM | 60% | 83% | 82% | 91% | 80% | 50% | 0% |
| GEJ/Cardia without IM | 0% | 2% | 2% | 0% | 0% | 3% | 3% |
| columnar mucosa without | 0% | 0% | 0% | 11% | 11% | 0% | 0% |
| IM taken from patients | | | | | | | |
| with concurrent IM | | | | | | | |
| at the same endoscopy | | | | | | | |
| Normal Distal | 8% | 6% | 9% | 9% | 9% | 8% | 8% |
| Esophagus-Squamous | | | | | | | |
| Squamous Mucosa with | 0% | 0% | 0% | 0% | 0% | 0% | 0% |
| REFLUX Esophagus | | | | | | | |
| Eosinophilic Eosphagitis | 0% | 0% | 0% | 0% | 0% | 0% | 0% |
| Gastic Mucosa with IM | 0% | 20% | 14% | 13% | 29% | 0% | 0% |
| Gastric Fundic Mucosa | 0% | 5% | 0% | 0% | 0% | 7% | 0% |
| without IM | | | | | | | |
| Helicobactor Pylori | 33% | 13% | 15% | 46% | 15% | 29% | 22% |
| Gastritis without IM | | | | | | | |

B

| | Marker combinations | | | | | | |
|---|---|---|---|---|---|---|---|
| | SqBE5 | SqBE5 | SqBE7 | SqBE7 | SqBE7 | SqBE16 | SqBE16 |
| | SqBE17 | SqBE18 | SqBE16 | SqBE17 | SqBE18 | SqBE17 | SqBE18 |
| BE (IM) | 70% | 91% | 57% | 71% | 81% | 74% | 81% |
| GEJ/Cardia with IM | 80% | 40% | 33% | 50% | 83% | 64% | 70% |
| GEJ/Cardia without IM | 0% | 0% | 2% | 2% | 2% | 2% | 2% |
| columnar mucosa without | 25% | 0% | 0% | 20% | 0% | 11% | 11% |
| IM taken from patients | | | | | | | |
| with concurrent IM | | | | | | | |
| at the same endoscopy | | | | | | | |
| Normal Distal | 8% | 8% | 6% | 0% | 6% | 9% | 5% |
| Esophagus-Squamous | | | | | | | |
| Squamous Mucosa with | 0% | 0% | 0% | 0% | 0% | 0% | 0% |
| REFLUX Esophagus | | | | | | | |
| Eosinophilic Eosphagitis | 0% | 0% | 0% | 0% | 0% | 0% | 0% |
| Gastic Mucosa with IM | 0% | 0% | 25% | 20% | 20% | 17% | 17% |
| Gastric Fundic Mucosa | 0% | 0% | 5% | 5% | 5% | 0% | 0% |
| without IM | | | | | | | |
| Helicobactor Pylori | 44% | 33% | 25% | 50% | 25% | 46% | 15% |
| Gastritis without IM | | | | | | | |

### Methodologies

[0212] Somatic mutations in TP53 were detected using the following method. TP53 exons 2-11 were amplified using a multiplexed series of primer pairs covering all coding sequences and splice junctions. The primers contained additional 5′ end sequences that were then used for secondary amplification that introduced barcode sequences and Illumina I5 and I7 sequences into the final PCR products. PCR products were mixed, purified and analyzed on an Illumina MiSeq instrument. Data analysis was performed using CLCBio software (Qiagen) and VariantStudio software (Illumina).

1. A method of detecting the presence of an esophageal neoplasia or metaplasia in the esophagus in a human subject, comprising:
a) obtaining a human sample; and
b)
i. assaying said sample for the presence of methylation within a nucleotide sequence spanning one or more of any of the chromosomal loci having a sequence that is at least 90% identical to the sequence of any one or more of: SEQ ID NOs: 1-856, 2569-3424, 5137-5926; 7507-7558, 7663-7714, 7819-7866, 7963-7990, 8047-8074, 8131-8156, 8209-8222, 8251-8264, 8293-8306, 8335-8348, 8405-8409, or 8420-8424, or complements or fragments thereof;
ii. assaying said sample for the presence of DNA methylation by assay in a bisulfite converted DNA for retention of a cytosine base at any of the Y positions present in one or more of the nucleotide sequences having at least 90% identical to the sequence of any one or more of SEQ ID NOs: 857-1284, 1713-2140, 3425-3852, 4281-4708, 5927-6321, 6717-7111, 7559-7584, 7611-7636, 7715-7740, 7767-7792, 7867-7890, 7915-7938, 7991-8004, 8019-8032, 8075-8088, 8103-8116, 8157-8169, 8183-8195, 8223-8236, 8265-8278, 8307-8320, 8349-8362, 8410-8414 or 8425-8429;
iii. assaying said sample for the presence of methylation within a nucleotide sequence spanning one or more of any of the chromosomal loci having a sequence that is at least 90% identical to the sequence of any one or more of: SEQ ID NOs: 8447-8818, 9563-9934, 10679-10972, 11561-11662, 11867-11968, 12173-12266, 12455-12466, 12491-12502, 12527-12538, 12563-12568, 12581-12586, 12599-12604, 12617-12622, 12647-12649 or 12656-12658, or complements or fragments thereof; or
iv. assaying said sample for the presence of DNA methylation by assay in a bisulfite converted DNA for retention of a cytosine base at any of the Y positions present in one or more of the nucleotide sequences having at least 90% identical to the sequence of any one or more of SEQ ID NOs: 8819-9004, 9191-9376, 9935-10120, 10307-10492, 10973-11119, 11267-11413, 11663-11713, 11765-11815, 11969-12019, 12071-12121, 12267-12313, 12361-12407, 12467-12472, 12479-12484, 12503-12508, 12515-12520, 12539-12544, 12551-12556, 12569-12574, 12587-12592, 12605-12610, 12623-12628, 12650-12652, or 12659-12661;
wherein methylation of said nucleotide sequence is indicative of an esophageal neoplasia or metaplasia in the esophagus.

2-25. (canceled)

26. A method of treating a subject having a metaplasia in the esophagus or neoplasia, comprising the step of treating the subject with chemotherapy, radiation therapy and/or with the resection of the neoplasia or metaplasia; and/or with ablation of the neoplasia or metaplasia; wherein said subject has been determined to have:
i.) methylation in a sequence that is at least 90% identical to the sequence of any one or more of: SEQ ID NOs: 1-856, 2569-3424, 5137-5926; 7507-7558, 7663-7714, 7819-7866, 7963-7990, 8047-8074, 8131-8156, 8209-8222, 8251-8264, 8293-8306, 8335-8348, 8405-8409, or 8420-8424, or complements or fragments thereof;
ii) DNA methylation by assay in a bisulfite converted DNA for retention of a cytosine base of one or more of the Y positions present in one or more of the nucleotide sequences having at least 90% identity to the sequence of any one or more of: SEQ ID NOs: 857-1284, 1713-2140, 3425-3852, 4281-4708, 5927-6321, 6717-7111, 7559-7584, 7611-7636, 7715-7740, 7767-7792, 7867-7890, 7915-7938, 7991-8004, 8019-8032, 8075-8088, 8103-8116, 8157-8169, 8183-8195, 8223-8236, 8265-8278, 8307-8320, 8349-8362, 8410-8414 or 8425-8429;
iii) methylation within a nucleotide sequence spanning one or more of any of the chromosomal loci having a sequence that is at least 90% identical to the sequence of any one or more of: SEQ ID NOs: 8447-8818, 9563-9934, 10679-10972, 11561-11662, 11867-11968, 12173-12266, 12455-12466, 12491-12502, 12527-12538, 12563-12568, 12581-12586, 12599-12604, 12617-12622, 12647-12649 or 12656-12658, or complements or fragments thereof; or
iv) methylation of a DNA molecule by assay in a bisulfite converted DNA for retention of a cytosine base of one or more of the Y positions present in one or more of the nucleotide sequences having at least 90% identity to the sequence of any one or more of: SEQ ID NOs: 8819-9004, 9191-9376, 9935-10120, 10307-10492, 10973-11119, 11267-11413, 11663-11713, 11765-11815, 11969-12019, 12071-12121, 12267-12313, 12361-12407, 12467-12472, 12479-12484, 12503-12508, 12515-12520, 12539-12544, 12551-12556, 12569-12574, 12587-12592, 12605-12610, 12623-12628, 12650-12652, or 12659-12661.

20. (canceled) and order these in pair

31. A bisulfite converted sequence: p1 a) having at least 80%, 85%, 90%, 91%, 92%, 93%, 94%, 95%, 96%, 97%, 98%, 99% or 100% identity to any one or more of SEQ ID NOs: 857-2568, 3425-5136, 5927-7506, 7559-7662, 7715-7818, 7867-7962, 7991-8046, 8075-8130, 8157-8208, 8223-8250, 8265-8292, 8307-8334, 8349-8376, 8410-8419, 8425-8434, 8819-9562, 9935-10678, 10973-11560; 11663-11866, 11969-12172, 12267-12454; 12467-12490, 12503-12526, 12539-12562, 12569-12580, 12587-12598, 12605-12616, 12623-12634, 12650-12655, or 12659-12664 and/or fragments thereof, and/or the reverse complements thereof including all unique fragments of these sequences and their reverse complements; or
b) comprising the bisulfite-converted nucleotide sequence of any one of the following: Up3, Up10, Up15-1, Up15-2, Up20-1, Up20-2, Up20-2, Up27, Up2, SqBE2, SqBE5, SqBE7, SqBE9, SqBE10, SqBE11-1, SqBE11-2, SqBE13, SqBE14-2, SqBE15, SqBE16-1, SqBE16-2, SqBE17-1, SqBE18, SqBE22-1, SqBE22-2 or SqBE23.

32. A panel of bisulfite converted sequences selected from the sequences of claim 31.

33. The panel of claim 32, wherein the panel corresponds to any combination of the sequences of SEQ ID NOs: 8307-8334, 8349-8376, 8410-8419, 8425-8434, 12605-12616, 12623-12634, 12650-12655, or 12659-12664.

34. An oligonucleotide primer that hybridizes to any of the sequences of claim 31.

35. (canceled)

36. The primers of claim 34, wherein said primers are combined as forward and reverse primers for PCR amplification of any of the bisulfite converted sequences of claim 31.

37. (canceled)

38. A panel of primer pairs selected from the primer pairs of claim 36.

39. The panel of claim 38, wherein the panel corresponds to a combination of primer pairs for amplifying any combination of SEQ ID NOs: 8307-8334, 8349-8376, 8410-8419 or 8425-8434.

40-97. (canceled)

98. The bisulfite-converted nucleotide sequence of claim 31, comprising the bisulfite-converted nucleotide sequence of any one of the following: Up3, Up10, Up15-1, Up15-2, Up20-1, Up20-2, Up20-2, Up27, Up35-1, Up35-2, SqBE2, SqBE5, SqBE7, SqBE9, SqBE10, SqBE11-1, SqBE11-2, SqBE13, SqBE14-2, SqBE15, SqBE16-1, SqBE16-2, SqBE17-1, SqBE18, SqBE22-1, SqBE22-2 or SqBE23.

99-100. (canceled)

101. The bisulfite-converted nucleotide sequence of claim 31, comprising a sequence having at least 80%, 85%, 90%, 91%, 92%, 93%, 94%, 95%, 96%, 97%, 98%, 99% or 100% identity to any of the following sequences: SEQ ID NOs: 8307-8313, 8315-8327, 8329-8334, 8349-8355, 8357-8369, 8371-8376, 8410, 8411, 8412, 8414, 8415, 8416, 8417, 8419, 8425, 8426, 8427, 8429, 8430, 8431, 8432, 8434, 12605-12616, 12623-12634, 12650-12655, or 12659-12664.

102. The bisulfite-converted nucleotide sequence of claim 101, wherein the sequence comprises a sequence having at least 80%, 85%, 90%, 91%, 92%, 93%, 94%, 95%, 96%, 97%, 98%, 99% or 100% identity to any of the following sequences: SEQ ID NOs: 8307-8313, 8315-8327, 8329-8334, 8349-8355, 8357-8369, 8371-8376, 8410, 8411, 8412, 8414, 8415, 8416, 8417, 8419, 8425, 8426, 8427, 8429, 8430, 8431, 8432, or 8434.

103. The bisulfite-converted nucleotide sequence of claim 101, wherein the sequence comprises a sequence having at least 80%, 85%, 90%, 91%, 92%, 93%, 94%, 95%, 96%, 97%, 98%, 99% or 100% identity to any of the following sequences: SEQ ID NOs: 12605-12616, 12623-12634, 12650-12655, or 12659-12664.

104. The bisulfite-converted nucleotide sequence of claim 103, wherein the sequence comprises a sequence having at least 80%, 85%, 90%, 91%, 92%, 93%, 94%, 95%, 96%, 97%, 98%, 99% or 100% identity to any of the following sequences: SEQ ID NOs: 12652, 12655, 12661, or 12664.

105. The bisulfite-converted nucleotide sequence of claim 31, wherein the sequence is a bisulfite-converted sequence of any one of SEQ ID NOs: 8220, 8262, 8304, or 8346.

106. The bisulfite-converted nucleotide sequence of claim 31, wherein the sequence comprises a sequence having at least 80%, 85%, 90%, 91%, 92%, 93%, 94%, 95%, 96%, 97%, 98%, 99% or 100% identity to any of the following sequences: SEQ ID NOs: 8234, 8276, 8318, 8360, 8248, 8290, 8332 or 8374.

107. The bisulfite-converted nucleotide sequence of claim 31, wherein the sequence comprises a sequence having at least 80%, 85%, 90%, 91%, 92%, 93%, 94%, 95%, 96%, 97%, 98%, 99% or 100% identity to either SEQ ID NO: 8318 or 8360.

108. The bisulfite-converted nucleotide sequence of claim 31, wherein the sequence comprises a sequence having at least 80%, 85%, 90%, 91%, 92%, 93%, 94%, 95%, 96%, 97%, 98%, 99% or 100% identity to either SEQ ID NO: 8332 or 8374.

109. The oligonucleotide primer of claim 34, wherein the primer has a nucleotide sequence that is at least 90% identical to either SEQ ID NO: 8388 or 8402, or fragments or complements thereof.

110. The primer pair of claim 36, wherein the primer pair comprises a first nucleotide sequence that is at least 90% identical to SEQ ID NO: 8388, or fragments or complements thereof; and wherein the primer pair comprises a second nucleotide sequence that is at least 90% identical to SEQ ID NO: 8402.

The application's sequence listing, which the Patent Office published only in electronic form, follows.

SEQUENCE LISTING (16204 sequences)

SEQ ID NO: 1 - DNA, 1017 bp, Homo sapiens
cggcgaccccggcccccgcaaggtggggcggcgagcaggagccggggccaggccaggggctcgagctcccgttcgaggggcggggaaggcgggtgacgtgagccgggccgggcgggcggagttgggaccggctccgggaggcgggggcgagcgcgcggagaggcagacgcgaggagggaggcggctgagcagcgcgggcggctctgcggcgggcgcggtgggcgcgggcggcggggccccgggatccccgcgcgcctcctccgcgcggcgccgccgccgcgcgtccccacgccccgcgctccacggcgccctcgccccgcgcgcctctcgtgcccgcctcctgccagtctccgggccgcggccgtctgcagagcgagcgctcagacggagcccccgggcaacttgagtggcgccgatcggcggcggagcctctggcagagccccccgacccggcagcgcggaggggactcgcgtccgtccgcgtcgcgtcaccccaaaccctaagcagcgccgccccatcggcgcggagctccggctggaggcaagagccgcgcgccgggagacacgcaccgtgagcggcagcgccgccggcctccctcctcgccgccccggagggcgaagccgcggctccccagccctttgctgcgccgcgacagcgccggaacacgccccgcctcgctgccgccttcgctgtgccgccggcggagggggccgcgagccccgcgccccggccggaggatgtgcgcccccgcgggccgcccagcctgagccatgcgccccaacggcggcggcgcgccggccggcatggagccccgcgcggccgcgctctgactcgctgtgcgccccgcggccggcgggcggcgggaggcggcggaccgagagccggagaccggcgccgcgggacggaagcgagcgggcgcgggcgccgcgcagatggcctgggcgagccaggtctgaggccccgctccccgaaacgtgaccatgtggattcaacagcttttaggactcaggtgagcg

SEQ ID NO: 2 - DNA, 166 bp, Homo sapiens
cgctcggagcgcgggcggggtcagcttgggcagccgcgggtcgctgctgcgtcggaagtctccgtcgccagggagccccttgggcgccaggtcctgggcccctgggcgaagtcgacgccagaacatgcttggccccgcactcagctcaccgcaccctcagcgcgcg

SEQ ID NO: 3 - DNA, 2 bp, Homo sapiens
cg

SEQ ID NO: 4 - DNA, 2 bp, Homo sapiens
cg

SEQ ID NO: 5 - DNA, 2 bp, Homo sapiens
cg

SEQ ID NO: 6 - DNA, 2 bp, Homo sapiens
cg

SEQ ID NO: 7 - DNA, 2 bp, Homo sapiens
cg

SEQ ID NO: 8 - DNA, 2 bp, Homo sapiens
cg

SEQ ID NO: 9 - DNA, 14 bp, Homo sapiens
cgcgtctcagcgcg

SEQ ID NO: 10 - DNA, 2 bp, Homo sapiens
cg

SEQ ID NO: 11 - DNA, 2 bp, Homo sapiens
cg

SEQ ID NO: 12 - DNA, 2 bp, Homo sapiens
cg

SEQ ID NO: 13 - DNA, 125 bp, Homo sapiens
cggctccacttacctgctccgaagagtggccccagctctgcgcctcttcctgcgaccccacacacagggacagccccaggcacagccccagcagcaggagcatggcggggcgagggcgcgggacg

SEQ ID NO: 14 - DNA, 2 bp, Homo sapiens
cg

SEQ ID NO: 15 - DNA, 131 bp, Homo sapiens
cggggtgtgaagtggcggcgggcagaggggctcgcaggggctgggatccgcgtgcccctctctgcctcggtgcggagcacgatgtgcccgggcgggggcgaggacgtccgggaggggctgggctgcgcacg

SEQ ID NO: 16 - DNA, 94 bp, Homo sapiens
cgggcctgtcctcggctccgctcggagggtgtgcgggttcccgctccgctggccccgcttgcccaccacggcgcgcccaaacccacgcggcccg

SEQ ID NO: 17 - DNA, 2 bp, Homo sapiens
cg

SEQ ID NO: 18 - DNA, 2 bp, Homo sapiens
cg

SEQ ID NO: 19 - DNA, 27 bp, Homo sapiens
cgcgatggggaggggaatacttgcgcg

SEQ ID NO: 20 - DNA, 164 bp, Homo sapiens
cgagattagaggggaaatccgaaaaagcaagcccctgcggcagcagccaggaaacactcgccaggaactggctgcgaccccaactccagcggtccgaagccctagcctccccacccccaccgcggcagagccgccttcgcagacacctcccgaggagaatcgcg

SEQ ID NO: 21 - DNA, 2 bp, Homo sapiens
cg

SEQ ID NO: 22 - DNA, 2 bp, Homo sapiens
cg

SEQ ID NO: 23 - DNA, 68 bp, Homo sapiens
cgctgggcccgccgaggtcggggctttcccatgggagggaggtggctgcggcggaattttcagatgcg

SEQ ID NO: 24 - DNA, 508 bp, Homo sapiens
cggcggcagcgggagcccgagcgctgcgcgcccaccatggccgcccagggagagcccggctacctggcggcgcagtcggaccccggctccaacagcgagcgcagcaccgactccccagtgcccggctccgaggacgacttggtcgccggggcgaccctgcacagcccggagtggagcgaggagcgcttccgcgtggacaggaagaaacttgaggccatgttacaaggtaggcatccctcgtgttctcggactctccgactgagcctctaactccttttcggacatccccaccgcgcgctccggcgcccgctactccagcctacggccggccggtttagctccaggcccgctcccccgcggagccggaggacacccagggactggagacttcgcgggactccccacccttccacgcctctcagatttccaggcgctgggggccctgtgcgaacttgactggcttcagaaaagccgaaggccgagtttgtactggcgcgcccaagttgcg

SEQ ID NO: 25 - DNA, 2 bp, Homo sapiens
cg

SEQ ID NO: 26 - DNA, 2 bp, Homo sapiens
cg

SEQ ID NO: 27 - DNA, 2 bp, Homo sapiens
cg

SEQ ID NO: 28 - DNA, 2 bp, Homo sapiens
cg

SEQ ID NO: 29 - DNA, 4 bp, Homo sapiens
cgcg

SEQ ID NO: 30 - DNA, 2 bp, Homo sapiens
cg

SEQ ID NO: 31 - DNA, 2 bp, Homo sapiens
cg

SEQ ID NO: 32 - DNA, 9 bp, Homo sapiens
cgtgcagcg

SEQ ID NO: 33 - DNA, 2 bp, Homo sapiens
cg

SEQ ID NO: 34 - DNA, 2 bp, Homo sapiens
cg

SEQ ID NO: 35 - DNA, 396 bp, Homo sapiens
cgaggacgaggaggaagaggaggaggaagaagaagaagaggaagaggaggaggaggaggaggaggacgcgtctaggctgagatggttcgcgtggatattgctactcattctaagactgctgcctccgccgccgccgccgccgccgctgctgccgccgccgccgccgccaccatttgccatagctagcaacgggcagccggcgcaggggctcgggggagctcctcccgccgccagcgccaccccaaacacccatcaacagccatattgctgctactgctgccgccgccgccgccgccgcggagcgcgggaggggggcggggaggcgcctgggctcggggcgctgtgcgcgacctggcggggtgcgccgagatatatacagcgagccgccgccgcccg

SEQ ID NO: 36 - DNA, 2 bp, Homo sapiens
cg

SEQ ID NO: 37 - DNA, 70 bp, Homo sapiens
cgggccgccatttgtctacttgtcccatccaggacatctccctaaataatctctaagtggaaaaatcacg

SEQ ID NO: 38 - DNA, 2 bp, Homo sapiens
cg

SEQ ID NO: 39 - DNA, 68 bp, Homo sapiens
cgcgggggacgcggggcgcggcgcgctgagcgcgggtgccgaggctggagggcgcggccgggctcccg

SEQ ID NO: 40 - DNA, 88 bp, Homo sapiens
cgagggtcggctcgctcctggggacccgcggatgtcgcgagggggcgccgcgccactgaaggctgggacgggggcggtgcgcggggcg

SEQ ID NO: 41 - DNA, 2 bp, Homo sapiens
cg

SEQ ID NO: 42 - DNA, 2 bp, Homo sapiens
cg

SEQ ID NO: 43 - DNA, 87 bp, Homo sapiens
cgagttgctccgtttcctcattttgggggcgaagaagggtcggggagtgggggaaagcgggaggcgccgcggcctgggaggcccccg

SEQ ID NO: 44 - DNA, 45 bp, Homo sapiens
cgagcttctgcgctgcctctgtcgtcggagcccgggtttgccacg

SEQ ID NO: 45 - DNA, 2 bp, Homo sapiens
cg

SEQ ID NO: 46 - DNA, 173 bp, Homo sapiens
cggttggaattctcttaagcattgccctgagtctattttcaaatgaaagggggaaaaacccaaaccagattagaatctgaaacagctgaaacagctatcgatttccagcttgctttcaagtctggcagagactgtgaaagtcctaacttctccgcgatgtcagccacggcccg

SEQ ID NO: 47 - DNA, 2 bp, Homo sapiens
cg

SEQ ID NO: 48 - DNA, 48 bp, Homo sapiens
cgaagacgagacgcagagctccaactgcagccagagacaaaggccccg

SEQ ID NO: 49 - DNA, 2 bp, Homo sapiens
cg

SEQ ID NO: 50 - DNA, 2 bp, Homo sapiens
cg

SEQ ID NO: 51 - DNA, 36 bp, Homo sapiens
cgaccgtggcgccagcttcccgccccctctgccccg

SEQ ID NO: 52 - DNA, 2 bp, Homo sapiens
cg

SEQ ID NO: 53 - DNA, 2 bp, Homo sapiens
cg

SEQ ID NO: 54 - DNA, 2 bp, Homo sapiens
cg

SEQ ID NO: 55 - DNA, 2 bp, Homo sapiens
cg

SEQ ID NO: 56 - DNA, 2 bp, Homo sapiens
cg

SEQ ID NO: 57 - DNA, 97 bp, Homo sapiens
cgcttgcaaggacgggagtcggggagggtgtagggcgagtttaaaggacgggcagagcaagccccgggaagaggcaggggttttccctcccgggtcg

SEQ ID NO: 58 - DNA, 2 bp, Homo sapiens
cg

SEQ ID NO: 59 - DNA, 2 bp, Homo sapiens
cg

SEQ ID NO: 60 - DNA, 67 bp, Homo sapiens
cgccagactctcacagtccttcacacgccactcccactgcctcagggaaccacaagcacaggcatcg

SEQ ID NO: 61 - DNA, 2 bp, Homo sapiens
cg

SEQ ID NO: 62 - DNA, 29 bp, Homo sapiens
cgacagggcagagggtcagcagtcacccg

SEQ ID NO: 63 - DNA, 49 bp, Homo sapiens
cggccgagcctaagtggctgaagcgcggacgaggatgcgcggggcctcg

SEQ ID NO: 64 - DNA, 188 bp, Homo sapiens
cgggagctcgaagtcgcctcgagcgggggtgggcggtgagcggacccccgggtgttgaccaggtgtttggtggtagagcagggaaggggggaacggacgtcgaccctagggatccctcacccgctcacgctccttggcgttggccacacgccgccgctccagcaccaactggaggttttcagtggacg

SEQ ID NO: 65 - DNA, 4 bp, Homo sapiens
cgcg

SEQ ID NO: 66 - DNA, 4 bp, Homo sapiens
cgcg

SEQ ID NO: 67 - DNA, 113 bp, Homo sapiens
cggccgtgggcggctgcggcgcggccgcggcgaggggcgagcggggctggtctcgccgctcgggcgagagcatccctttgggggccaaccctgcggctccgccttcacccgcg

SEQ ID NO: 68 - DNA, 208 bp, Homo sapiens
cggcggatggagacgggagggaggctgcgaggtcgctcgaggagagactaaggctctagaaacggagaagcgggcgctctgcgggaggcggcggcgctgccgctggccgtcaagggcgggaagtgttctgggactctcattaggggccgcgagcctcgagcgtcaaattcccgcggcgtccgcctagcgcgctgctgtggcgggcgcg

SEQ ID NO: 69 - DNA, 96 bp, Homo sapiens
cggcccgcccgcccctcagcagccctggggtgcccggggcggccctgcaagcgggagagagcggcgaggcggcggcgccgagtgcggggggatgcg

SEQ ID NO: 70 - DNA, 236 bp, Homo sapiens
cggtgagtacccgccgtggggaagggtcctggggacccactggaggccgcggcccgcagcagccaggggccgagccacggccacggacgccctggtgtcccggtccgtgccgggcctccaggcggaggaggcgtccgctgggctcagatccccgactccagccccggttccccggcgcctgggctgcgcggagtccctgtcccgcgtcccggacccctacgcgcagcctccacgcg

SEQ ID NO: 71 - DNA, 211 bp, Homo sapiens
cgcccccagccgtgtcctggctgcgcagctggaaaggttgagcagctcactgctgtccctctgttcggccttggacacatcgcctgaactcctgggcgcctctgctgttaagtgggggacagcactatttactggggaggaaaactccaggaatgtggaccctggggccacgcaggggttgggaagtgaagggcagggaacgcgggcggcg

SEQ ID NO: 72 - DNA, 193 bp, Homo sapiens
cgcgcgccgaagctgtgacggtttactaagcagagacttgcgaggcacacagagagggaatgaggcggaaccgttcgggggctcgttgacactgcagagcctcccgcagcatcgctgccttaaatcccgcctttccaggcgtgcgcgcacagcgagccagaggaggctccgtcccgacctggggtcccccgcg

SEQ ID NO: 73 - DNA, 4 bp, Homo sapiens
cgcg

SEQ ID NO: 74 - DNA, 199 bp, Homo sapiens
cgagcaggaggatctaacgaatccagcttgtggacatgccctaatttccatttccgcctcctccaggtctgttcaggtgaggatgatgggagggaaaagcggtgtacagccgtaacattggcaccctgcaagagccgccggggcactgacacagagggacaccgcattggagatgcggtgtctacggagatttattgcg

SEQ ID NO: 75 - DNA, 87 bp, Homo sapiens
cggctagcagaggcggcgcctggtcttggatgctgcagcggagacgccaaggagactgaatgcagggagcgaggcgtagcggccgcg

SEQ ID NO: 76 - DNA, 68 bp, Homo sapiens
cgcgcgagagtgcccagctgggaaatgcagctccgaattaacatcgtatgtttcataatcagtttacg

SEQ ID NO: 77 - DNA, 61 bp, Homo sapiens
cgcccctggcattcagggaatggtttgcaaatctcaatgcaccacagactagttttcaccg

SEQ ID NO: 78 - DNA, 40 bp, Homo sapiens
cgggtgctttgccgctgccgcttctgctgccgccgatccg

SEQ ID NO: 79 - DNA, 647 bp, Homo sapiens
cgagcggcgaggcgagggcgagcgcgccgaggaagggcgggagaggcgcggagcttggccgcgccgcgctgcgccgagcgccgggctctccccgcgagctccccgggcccgcgcgcgcgccccccactgcccccgccccccgcgcggcgcgtgccccccaccccccgccgcgcgccctcgcacccgcccggctccacgcggcgcgcgcctgccctggcggcagcggcggcggcggcggcgcgtcctcccccgaacgccgtctccagggctgctggctgcgctctccattgttccgcggctgctgcccggggtgggcggcgaggcgggggggaggtgtcggcttggccgccggggagggcttaccgctcgggcggaccctcactgcgagagcgatgcgggcccaggcgcggcgcgcgggggctgcagggcgcctagcactgggggttgccggcgcgcgggggcctcctcctggctcccaggcactcgctgctgctgggcgcccctcgcatcctcggttactatggatatctcgctcctccgccgccccctccgcgcactccgggaggccgccggggcggtagcagcggcgcggctccgcgggtgcccaggtgaccggctcggcagcggcagagcagtggcagcagccg

SEQ ID NO: 80 - DNA, 327 bp, Homo sapiens
cgcggaggagggtcgggctgactgccgccgctgagctgtccccggacgggagcgcctgtccacggcactcaccccctccagcggtggaaatgtggagaagtaagtgggaggcggtgtcgggaactgactcctcttaaaacggtcggcgccgctgctctgaaatgggcggctaagtgcttgtgggactaagggcggcctcagagatgcccggaaaatcgctgccacggccagagtgcggcgcagacgcggcagagttggaggtgtccgcggtgcaggctgctgcccacgccgctcaggccaggtgctgagggctcagcccgcgcctcg

SEQ ID NO: 81 - DNA, 2 bp, Homo sapiens
cg

SEQ ID NO: 82 - DNA, 324 bp, Homo sapiens
cgcagctgctgcagccgctgcggctgccgccatctggcaggaggcatagggcatgggtgagggaggctgcggtagcggccacgagttgttgaggaagccagactgcaggtacttggggggcgccaggtagccgtagccgtcggccccggcgcccgccacgccgcacccgcctgcggcgcctccggccccgaagagccccttgccgggctggaagtgcgcgggcggcggccggaagggcctcttcatgcggcggcggcgccggtagttgcccttctcgaacatgtcttcgcaggccgggtccagcgtccagtagttgcccttgcg

SEQ ID NO: 83 - DNA, 77 bp, Homo sapiens
cggcgcagcggcgggaacccgaggccgagcgccgcggcggcagcgctagaagcgcacccatcgggcacggcgaggcg

SEQ ID NO: 84 - DNA, 158 bp, Homo sapiens
cgccctggattcccgaagtcagttccctgcgcagcggaccagagaggtccacccgcggacgtcaactcaacccctgggcggggtccgggggctgagcagaaggcgaggtctggggagtacggacaactttgagggctgtctgtgccggggtgggagcg

SEQ ID NO: 85 - DNA, 79 bp, Homo sapiens
cgctcctaaaaattaaataaatcaataagagaatcaattaataggcagcgctgcgaccgccaggagcgcggagcgcgcg

SEQ ID NO: 86 - DNA, 137 bp, Homo sapiens
cgtctcctctgacccccaaggtcagaaagatttattacttccttcgagagggcgcagccacagacccactagagagggcgggcagggtgtcggaagccagagaacggcgctccgcgtcctcccaccgctccagggcg

SEQ ID NO: 87 - DNA, 112 bp, Homo sapiens
cgcgggctatgcactgctgctggtgctcactatgctcaacctcctggactacaagtggcacaaggagccgctgcagcagtgcaaccccgatgggccgctgggtgccgcagcg

SEQ ID NO: 88 - DNA, 2 bp, Homo sapiens
cg

SEQ ID NO: 89 - DNA, 2 bp, Homo sapiens
cg

SEQ ID NO: 90 - DNA, 282 bp, Homo sapiens
cgtgggcagggcgccgcagcctgcgcagccccgaggaccccgcgtcgctctcccgagccagggttctcaggagcgggccgcgcaggagacgttagagggggttgttagcggctgttgggagaacgggtcacggaaacagtcccttccaaagccggggccatcgtggggtgggcgagtccgccctcccaggccgggggcgcggaccagaggggacgtgtgcagacggccgcggtcagccccacctcgcccgggcggagacgcacagctggagctggagggccg

SEQ ID NO: 91 - DNA, 81 bp, Homo sapiens
cggctgccaactcgcccaacttgctgcgcgggtggccgctcagagccgcgggcttgcggggcgccccccgccgccgcgccg

SEQ ID NO: 92 - DNA, 53 bp, Homo sapiens
cggccgtggagaccctaaccgagctcacgctggcgcaaaaggcaaaagccgcg

SEQ ID NO: 93 - DNA, 40 bp, Homo sapiens
cgcgccgagggggcgccagcggggacgtgagctggcgccg

SEQ ID NO: 94 - DNA, 206 bp, Homo sapiens
cggcagcctgagcgccccggatggcccgcggcggggcggcctgcaagagcgacgcgcggctgctgctggggcgggacgcgctgcggccggcgcccgccctgctggcccccgccgtgctgctgggcgccgcgctcggcctcggcctcggcctttggcttggctgccgcgcgggccgccagcgcacgcgacaccaggtgggtcggccg

SEQ ID NO: 95 - DNA, 38 bp, Homo sapiens
cgagggcacggcggccgccgccccgcgcagcagcagcg

SEQ ID NO: 96 - DNA, 5 bp, Homo sapiens
cggcg

SEQ ID NO: 97 - DNA, 25 bp, Homo sapiens
cgagcgaatgcaacgcgtacacacg

SEQ ID NO: 98 - DNA, 79 bp, Homo sapiens
cgcctctctctttttttaaaaaaaaaatttaaacaattcccaaataatatttaataggaaagaagaaggaaaaggagcg

SEQ ID NO: 99 - DNA, 33 bp, Homo sapiens
cgagggcaacggccgaggcgccacgcggggccg

SEQ ID NO: 100 - DNA, 132 bp, Homo sapiens
cgcaggccaggcggtcgtgggccgagctggccatgaccacctccccgcgggcgtcctgcttgggcgagtgctctccgtagcgcccgcactccgtcttctccgtgtgcagctccgcgccgccgccgcccgccg

SEQ ID NO: 101 - DNA, 32 bp, Homo sapiens
cgccctcggggcagaggagggggtgccaggcg

SEQ ID NO: 102 - DNA, 2 bp, Homo sapiens
cg

SEQ ID NO: 103 - DNA, 2 bp, Homo sapiens
cg

SEQ ID NO: 104 - DNA, 20 bp, Homo sapiens
cggcgccgctggcatactcg

SEQ ID NO: 105 - DNA, 85 bp, Homo sapiens
cggcgggcgcaggggcagggcatgactgacgcgccctctgcctgcgcttatgtgagagaaagcggccgagggagggagcgtgccg

SEQ ID NO: 106 - DNA, 230 bp, Homo sapiens
cgcaggggccgagaaagtggcggagaggcggtggccgaggcccaggggcgagcgcgggctgagctggtccctgctgcgttcacgagcgacacccaccccttcgctgcggacgccccgcgggcgccaggctgggggccctgcgaccgacccctcccgcccccgaggtaccgccgggcccgcctggcaggcagcgcgtcccgcgagctggagggccgagtttcgcggggccg

SEQ ID NO: 107 - DNA, 84 bp, Homo sapiens
cgcaagagctggtcaaaatgccctcaggtgcgtgggggcttcggggccttagttggagcccgacaccctgagactggcggcccg

SEQ ID NO: 108 - DNA, 42 bp, Homo sapiens
cgcgcgagcttttccgtttggctgagtcaaaaagggatcgcg

SEQ ID NO: 109 - DNA, 45 bp, Homo sapiens
cggacgactctttctaccctttcgaggacgaggaggagcacggcg

SEQ ID NO: 110 - DNA, 26 bp, Homo sapiens
cgcgggacaagggatgctggcgggcg

SEQ ID NO: 111 - DNA, 50 bp, Homo sapiens
cgaggctcctcccgcggcgcgcggcagcctcagcctccacctaaacctcg

SEQ ID NO: 112 - DNA, 56 bp, Homo sapiens
cgctggcccacccgcgtgcacgcccaccccccacgcgcgtccctggctcagaagcg

SEQ ID NO: 113 - DNA, 44 bp, Homo sapiens
cgagcgtgtgcgcgcgcgaggggagcgcgtgcgcggtgaggacg

SEQ ID NO: 114 - DNA, 2 bp, Homo sapiens
cg

SEQ ID NO: 115 - DNA, 9 bp, Homo sapiens
cggaaggcg

SEQ ID NO: 116 - DNA, 58 bp, Homo sapiens
cgcccgcctacccgccaggcaggcggtggtgtcgatccacttgagcagctgccccgcg

SEQ ID NO: 117 - DNA, 151 bp, Homo sapiens
cgcactggcttcccccgctcccgcccgcacgaaagccctgcccgacgtctgcagtcagcatcgcccgcactgcctagggagggtttgcgccgagacccagtggccgagtgagccacagagtcgctggtcctggggacgctgtcttctaccg

SEQ ID NO: 118 - DNA, 17 bp, Homo sapiens
cggtcctggggagtccg

SEQ ID NO: 119 - DNA, 70 bp, Homo sapiens
cgcagaggggccagcaattccatgggtggtggggccctccatccctggacgcagcggggagcagcgggcg

SEQ ID NO: 120 - DNA, 59 bp, Homo sapiens
cggcgcccagcgcccaagcgctaacccgctgaaagtttctcagcgaaatctcagggacg

SEQ ID NO: 121 - DNA, 25 bp, Homo sapiens
cggctcggatagaggttacccagcg

SEQ ID NO: 122 - DNA, 57 bp, Homo sapiens
cgtcttccgctacctgacaccagccaggcagcccccagggccagagcgtcagcgccg

SEQ ID NO: 123 - DNA, 111 bp, Homo sapiens
cgttcagggttggggctcggtgggaacctccccgtgcccgaagggacgaccccgtcagagagtcccccgacccttgcacctaccgtccttggcaggacgtggagctgctcg

SEQ ID NO: 124 - DNA, 211 bp, Homo sapiens
cgctactgtcgtcgttggcgctttgcttctggaacctcccagcaagatggcactcactgtctgttcccttccgattagcacccccagccgcgctccctcctccccgggatacgtattagtcacatactgtggggagaagatgggctatgtaaatgtaagtcaacgcgctttcccagccacctttgcataatgcaacaggaacagcgacccg

SEQ ID NO: 125 - DNA, 75 bp, Homo sapiens
cgctcctactactctttcaaacactgcagcaagttgcagcaaggcgggcaaataccgacagcgcgcgtgggggcg

SEQ ID NO: 126 - DNA, 2 bp, Homo sapiens
cg

SEQ ID NO: 127 - DNA, 66 bp, Homo sapiens
cggccacctgtcctccgccctcggggcgccgcccagcttcgcgccaggcgccttctccagcgcccg

SEQ ID NO: 128 - DNA, 2 bp, Homo sapiens
cg

SEQ ID NO: 129 - DNA, 163 bp, Homo sapiens
cgcgcgctcctcggcgggtcggcgggtccggaagctccgctgcccgggccgggtccccaagcccgcagccgctttgactaaaataggcatcgcgacggcggcggcaggcggcggcagccagggctggggccgcaccgcgcacgcgcatgcgcccgccgccccg

SEQ ID NO: 130 - DNA, 99 bp, Homo sapiens
cgcttctgccctggagcgcggtcgggagtaaaatcgcaggagtgggagggtagcgagccagctggattccgagccgcggagcgcgctggctttgctccg

SEQ ID NO: 131 - DNA, 96 bp, Homo sapiens
cgcgcctccgcaggcggcactgcccgcggcgcggcgtgtgcaccgagcgagtgaaggtatgtgtggcgggcgcggctggagctgccgccgccgccg

SEQ ID NO: 132 - DNA, 4 bp, Homo sapiens
cgcg

SEQ ID NO: 133 - DNA, 16 bp, Homo sapiens
cggcgagattggcacg

SEQ ID NO: 134 - DNA, 2 bp, Homo sapiens
cg

SEQ ID NO: 135 - DNA, 141 bp, Homo sapiens
cgcggctgatggctgacgcgctgcgcggctgcgtgcctgccttccacggcgtggtggagcgcgacggcgaaagctacctgcagctgcaggacctgctcgatggcttcgacggaccttgtgtgctcgactgcaaaatgggcg

SEQ ID NO: 136 - DNA, 2 bp, Homo sapiens
cg

SEQ ID NO: 137 - DNA, 37 bp, Homo sapiens
cgttcccaaccaaccgcacaaaacccgcaacacctcg

SEQ ID NO: 138 - DNA, 52 bp, Homo sapiens
cgggtcggggcacttggcgccctgtgtgggtggcgggagcggggacgcctcg

SEQ ID NO: 139 - DNA, 2 bp, Homo sapiens
cg

SEQ ID NO: 140 - DNA, 7 bp, Homo sapiens
cggagcg

SEQ ID NO: 141 - DNA, 2 bp, Homo sapiens
cg

SEQ ID NO: 142 - DNA, 4 bp, Homo sapiens
cgcg

SEQ ID NO: 143 - DNA, 17 bp, Homo sapiens
cgagttggggcgggacg

SEQ ID NO: 144 - DNA, 136 bp, Homo sapiens
cgcgagtcccctgacgcggggaccagttatgaatcgggggtgtgtgtttgcctccagagacctggcaaggtgcggagccctccagaagtgcggtcaagcggcagcggagacggcgagccaggaacctccccccgcg

SEQ ID NO: 145 - DNA, 31 bp, Homo sapiens
cgcgcccagcgccccgctcactccctggccg

SEQ ID NO: 146 - DNA, 25 bp, Homo sapiens
cgtgcaccctgaggtctggttggcg

SEQ ID NO: 147 - DNA, 12 bp, Homo sapiens
cgttgacgagcg

SEQ ID NO: 148 - DNA, 6 bp, Homo sapiens
cgtacg

SEQ ID NO: 149 - DNA, 199 bp, Homo sapiens
cgcgcccgcggccgcggccgctgcatggcgctgagatggcgggggcgccgcgcggcggaggcggcggcggaggcggcgcgggcgagcccgggggcgccgagcgggcggccgggacaagccgccggcgcgggctccgggcgtgcgacgaggagttcgcttgcccagagctggaggcgctgttccgcggctacacgctgcg

SEQ ID NO: 150 - DNA, 91 bp, Homo sapiens
cggccccgggtgcagggtggcgggcccggcggcgcgcgtccccctccccctcctggcggcccgcacgtgtcgcccgcgccgcgcccccacg

SEQ ID NO: 151 - DNA, 108 bp, Homo sapiens
cgcgtctccactgttccatctcctccgttcctggagttcctcggtgactctactatagcttctgttatcctgtgacctgcaggtactgggagatccatagggaggacg

SEQ ID NO: 152 - DNA, 13 bp, Homo sapiens
cgcaccgatttcg

SEQ ID NO: 153 - DNA, 176 bp, Homo sapiens
cggcccgctgggcaaggcgtccgagaaagcgcctggcgggaggaggtgcgcggctttctgctccaggcggcccgggtgcccgctttatgcggggcgagcgtccggccgacccccgccggggcggagcctgaggggtggctgattcatgcacggggactgtcaccccgccgcccccg

SEQ ID NO: 154 - DNA, 2 bp, Homo sapiens
cg

SEQ ID NO: 155 - DNA, 157 bp, Homo sapiens
cgagaagttccgcgggagacggcggctcccaaagttactttgggccgcgggagcgcgggaccggggctgcgggcgccgagagcgcgtcgtctgccgcctccgtgcgccgccgccgcctctgcgcgacgcccctcggccaggcctgggaaagcgcccg

SEQ ID NO: 156 - DNA, 66 bp, Homo sapiens
cgcgaaccgctaggggccctcgcgctcccttcccacccaggccccctgtccctcccgccgcggccg

SEQ ID NO: 157 - DNA, 498 bp, Homo sapiens
cgccgccgcgccgaccggccgcgcccccgggaccccctgggccggccgcgcccccggccccctctcccgccgcgcctgtgcgcacgcgcagacgccgcaagctctacgagctgcacgcggccggcgccccgccccccccgccgcccggccacgcccccgcgcccgagtcgccgcggcccggaagcggaagcggaagcggccccggcctcgcccctgcgcgctcgcccggccccgcggccgacggccccatcgacctgagcaagaagccgcggcgcccgctccccggagccccggcaccggcgctggccgactaccacgagtgcacggcctgccgcgtgagcttccacagcctcgaggcctacctggcgcacaagaagtactcgtgccccgctgcgccaccgcccggcgcgctcggcctgcccgccgccgcctgcccctactgccccccgaacggcccggtgcgcggggacctgctggagcatttccgcctggcgcacg

SEQ ID NO: 158 - DNA, 27 bp, Homo sapiens
cgcgggtccgaacgcccttcgcgctcg

SEQ ID NO: 159 - DNA, 2 bp, Homo sapiens
cg

SEQ ID NO: 160 - DNA, 2 bp, Homo sapiens
cg

SEQ ID NO: 161 - DNA, 16 bp, Homo sapiens
cgtcgcctgcctcgcg

SEQ ID NO: 162 - DNA, 53 bp, Homo sapiens
cgcggagggcgccgaatcagagcctgcggggcttgacagcttctcttgcggcg

SEQ ID NO: 163 - DNA, 4 bp, Homo sapiens
cgcg

SEQ ID NO: 164 - DNA, 2 bp, Homo sapiens
cg

SEQ ID NO: 165 - DNA, 2 bp, Homo sapiens
cg

SEQ ID NO: 166 - DNA, 2 bp, Homo sapiens
cg

SEQ ID NO: 167 - DNA, 14 bp, Homo sapiens
cgtgtccacctacg

SEQ ID NO: 168 - DNA, 186 bp, Homo sapiens
cggcgggaaggcctgggtgttcacagatagagctggagttccccggtgggtggcacagacaattagctggggctgcctcacatgtaatctaattacaggggaaacaggctcaaacaccgggtgataagcagcgcaactgtttcgggtgactctgtaatttttcctccattaattttctccataacg

SEQ ID NO: 169 - DNA, 79 bp, Homo sapiens
cggggtacgctcgccctcggcggggcccctcgctccgctgtgggagtggcagtgggtgtcggggtggagaaagtacgcg

SEQ ID NO: 170 - DNA, 49 bp, Homo sapiens
cgccgcgtccgcgccgcgctccctgcaggcaacgggagacgcccccgcg

SEQ ID NO: 171 - DNA, 17 bp, Homo sapiens
cggatgaaccgttcgcg

SEQ ID NO: 172 - DNA, 2 bp, Homo sapiens
cg

SEQ ID NO: 173 - DNA, 9 bp, Homo sapiens
cgggccacg

SEQ ID NO: 174 - DNA, 2 bp, Homo sapiens
cg

SEQ ID NO: 175 - DNA, 165 bp, Homo sapiens
cgggaacgctgcagtttggttgagcgtgacttttaggctctgtgaggaaaagtcgagcgcgccacatcgaggcgctagccgtttattctaccacaaggtaaaagattcatgctgtcctagttaccctaaagctgggagatacactgcacttcctaccagaccccg

SEQ ID NO: 176 - DNA, 14 bp, Homo sapiens
cgcgcgggtcagcg

SEQ ID NO: 177 - DNA, 2 bp, Homo sapiens
cg

SEQ ID NO: 178 - DNA, 2 bp, Homo sapiens
cg

SEQ ID NO: 179 - DNA, 97 bp, Homo sapiens
cgtgtgcccagggccagcagcacgcacaagtgccagcgcacggccgccgcgcccatgctcaatgcgggccccgctgggcgtgcgggcgtgcggggcg

SEQ ID NO: 180 - DNA, 2 bp, Homo sapiens
cg

SEQ ID NO: 181 - DNA, 98 bp, Homo sapiens
cgcggatcgcgcgctcccgccgctctgcccctaaacttctgccgtagctccctttcaagccagcgaatttattccttaaaaccagaaactgaacctcg

SEQ ID NO: 182 - DNA, 69 bp, Homo sapiens
cggaggggcggaggaggtgctggcggcggcactgagcggcggcggcgcagggcgcgcgggccttccgcg

SEQ ID NO: 183 - DNA, 2 bp, Homo sapiens
cg

SEQ ID NO: 184 - DNA, 2 bp, Homo sapiens
cg

SEQ ID NO: 185 - DNA, 2 bp, Homo sapiens
cg

SEQ ID NO: 186 - DNA, 2 bp, Homo sapiens
cg

SEQ ID NO: 187 - DNA, 103 bp, Homo sapiens
cggccccaggacggcagggaccgcgatggagcggcttcgggggcggccgggggacggcgcggtggcggtcggccagcccgctcctccgggggcggcgggcgcg

SEQ ID NO: 188 - DNA, 2 bp, Homo sapiens
cg

SEQ ID NO: 189 - DNA, 21 bp, Homo sapiens
cggctctcggcggcggcggcg

SEQ ID NO: 190 - DNA, 148 bp, Homo sapiens
cggcgcctcaaaggggaggaccctgcggcgcgggtaagaggcggcgggagcgcgcggcccgggagtgtggctgcagtgcgccgggacaccagggctccgcgctccgcactcaagaggctcccgcgtcccaacccctcgcgcccgcgcg

SEQ ID NO: 191 - DNA, 2 bp, Homo sapiens
cg

SEQ ID NO: 192 - DNA, 2 bp, Homo sapiens
cg

SEQ ID NO: 193 - DNA, 26 bp, Homo sapiens
cgccgagaggcagcgcgtgatggccg

SEQ ID NO: 194 - DNA, 119 bp, Homo sapiens
cgcacgcccaagtgcgcgcgctgccgcaaccatggcgtcctgtcctggctcaagggccacaagcgttactgccgcttcaaggactgcacctgcgagaagtgcatcctcatcatcgagcg

SEQ ID NO: 195 - DNA, 66 bp, Homo sapiens
cggcccgacctttcccgcccagcctgggtcagaggaagccgaaagcggcctcagcaaggtgaggcg

SEQ ID NO: 196 - DNA, 60 bp, Homo sapiens
cgagcgaagtcgtcgtgtctgggcagaaggcgctccaggaggcgcgaggccccagccgcg

SEQ ID NO: 197 - DNA, 2 bp, Homo sapiens
cg

SEQ ID NO: 198 - DNA, 124 bp, Homo sapiens
cgctcggagcgggacctgcttgctccagtgcacgccgcggagcgaaccatcgggctggcgggggtggaggggtgcaggcgtgggggctgcgggccgctcgggccttgggcttctcctgccgccg

SEQ ID NO: 199 - DNA, 2 bp, Homo sapiens
cg

SEQ ID NO: 200 - DNA, 156 bp, Homo sapiens
cggggcaccgcggcgctcgccgccgcctccccgcaggtgatcatcctcctgcaggtgtcctcgggtctcaggtggctgcgtgtctgcgccatggttgacattctgggcgagcggcacctggtgacctgtaagggcgcgacggtggaggccgaggcg

SEQ ID NO: 201 - DNA, 2 bp, Homo sapiens
cg

SEQ ID NO: 202 - DNA, 91 bp, Homo sapiens
cgcgcgccgccgaaaccttgcctccgccgccgctcaccgacaggctgtggagaaggtcatcgaccgatgtcaccgagtcattcctgaagcg

SEQ ID NO: 203 - DNA, 2 bp, Homo sapiens
cg

SEQ ID NO: 204 - DNA, 2 bp, Homo sapiens
cg

SEQ ID NO: 205 - DNA, 89 bp, Homo sapiens
cgttactcgcgtgccagcagttgggcgctccgacctctcagaccgcgtgagcccagcaaagcggttaggcgcgcgcctgcagctcggcg

SEQ ID NO: 206 - DNA, 13 bp, Homo sapiens
cgtctttaatccg

SEQ ID NO: 207 - DNA, 2 bp, Homo sapiens
cg

SEQ ID NO: 208 - DNA, 47 bp, Homo sapiens
cgagcgccagaccccagcaacaaaaggccaggcgaggccacatcgcg

SEQ ID NO: 209 - DNA, 2 bp, Homo sapiens
cg

SEQ ID NO: 210 - DNA, 2 bp, Homo sapiens
cg

SEQ ID NO: 211 - DNA, 159 bp, Homo sapiens
cgatgcccgcggcgtgaaagcgcccgcggcgggcgccgacctctgtcctagtctcctgctccccccgccccgcttgtcccgtgcccttgtgaccctggctttggcgccgtcgcccaggcgccccgcaatgtagctgcccctgcgcctcggcgggaggcg

SEQ ID NO: 212 - DNA, 2 bp, Homo sapiens
cg

SEQ ID NO: 213 - DNA, 2 bp, Homo sapiens
cg

SEQ ID NO: 214 - DNA, 2 bp, Homo sapiens
cg

SEQ ID NO: 215 - DNA, 78 bp, Homo sapiens
cgggcgccgaggcttgggctttagccgtggcgctcgcctcggcgcagtggggagccgcgggcgtcggagaagcggccg

SEQ ID NO: 216 - DNA, 2 bp, Homo sapiens
cg

SEQ ID NO: 217 - DNA, 48 bp, Homo sapiens
cgcggaggagtttcgcacccgaccgtgcacagcgaccgagttggcgcg

SEQ ID NO: 218 - DNA, 2 bp, Homo sapiens
cg

SEQ ID NO: 219 - DNA, 2 bp, Homo sapiens
cg

SEQ ID NO: 220 - DNA, 2 bp, Homo sapiens
cg

SEQ ID NO: 221 - DNA, 157 bp, Homo sapiens
cgcttctatagttttgctttgacagctaaggaaaaaatctgccaaaaaccagaggcgctgctgagtgttggcgtgggaatgctagtttagtcagagccttgctctgggccatttaaataaaaacagacatgttggtggcaaatgccagttgaacacg

SEQ ID NO: 222 - DNA, 2 bp, Homo sapiens
cg

SEQ ID NO: 223 - DNA, 82 bp, Homo sapiens
cgcgcgccagtttcccgccccgtggaagcgcccctctcccgacttcggctgatccccgctcgccgccctccccgcgggtgcg

SEQ ID NO: 224 - DNA, 23 bp, Homo sapiens
cgcctggccgcctcacctggccg

SEQ ID NO: 225 - DNA, 38 bp, Homo sapiens
cgagttcccgcgcgtctacgagcagctttgcgagttcg

SEQ ID NO: 226 - DNA, 2 bp, Homo sapiens
gg

SEQ ID NO: 227 - DNA, 165 bp, Homo sapiens
cgtgccctcctccagcgagcgcagcgagttgttcctgaagtccaggtagaccaggtcgccgtagaagatgaagaagtcctcggggatccgctggatgcggttgccggccaccagcagcttgcgcacgtccagggggaaagggtctggcacgctgggcagcccgcg

SEQ ID NO: 228 - DNA, 2 bp, Homo sapiens
cg

SEQ ID NO: 229 - DNA, 2 bp, Homo sapiens
cg

SEQ ID NO: 230 - DNA, 2 bp, Homo sapiens
cg

SEQ ID NO: 231 - DNA, 23 bp, Homo sapiens
cggtgtccgggggccgcctgtcg

SEQ ID NO: 232 - DNA, 2 bp, Homo sapiens
cg

SEQ ID NO: 233 - DNA, 66 bp, Homo sapiens
cggccgtggcgggctccctggggcggcagctctaggcgcgggcgcgcagcagccccgaaggcgccg

SEQ ID NO: 234 - DNA, 43 bp, Homo sapiens
cgaacaaaaagagtccaggccgcgcgggcgggctgcgcgcccg

SEQ ID NO: 235 - DNA, 2 bp, Homo sapiens
cg

SEQ ID NO: 236 - DNA, 62 bp, Homo sapiens
cgcccagatgcggcggcggcgacggctccagctgcgcctcgtggccatcctcgtgcagcgcg

SEQ ID NO: 237 - DNA, 2 bp, Homo sapiens
cg

SEQ ID NO: 238 - DNA, 138 bp, Homo sapiens
cgaaagattcgaaactccaaaagctccactgcgtgcctctgggaggggagggggcgcgccaggaaaggagtggaaaaaagtgggcgaggaggagcgttgaaaatttcctgacaagtagtttccgtgcgcccgagagcg

SEQ ID NO: 239 - DNA, 2 bp, Homo sapiens
cg

SEQ ID NO: 240 - DNA, 2 bp, Homo sapiens
cg

SEQ ID NO: 241 - DNA, 2 bp, Homo sapiens
cg

SEQ ID NO: 242 - DNA, 2 bp, Homo sapiens
cg

SEQ ID NO: 243 - DNA, 187 bp, Homo sapiens
cggcagaagtgggaggtacacgaggagttactggaaacggcgcttctgtggaggagccgggggggatggggagtagagggagggggccctgttgcctcagcgccccgaggtcgtggagcggcagcagctgcagccggagcagcaccagcaacagcaacagcgagcgggacggagttaggaccgctcg

SEQ ID NO: 244 - DNA, 2 bp, Homo sapiens
cg

SEQ ID NO: 245 - DNA, 2 bp, Homo sapiens
cg

SEQ ID NO: 246 - DNA, 110 bp, Homo sapiens
cgcggcgtgcagctcggcggatgctgccaggtcaggcgactccgccgcccctggagcgcgagcgcgcttcagcttgtagcgatgattctggaaccagatcttgacctgcg

SEQ ID NO: 247 - DNA, 4 bp, Homo sapiens
cgcg

SEQ ID NO: 248 - DNA, 189 bp, Homo sapiens
cgggaggctctgcccgctcggtggctgccgcggcctcctccgcgctgctctccacgcctggcttattatgcacgaggcaggcaatttgccttcctccccggggacccatctcggagacaagaaggtagtttgttctctgtaatggcttctgctggagtgcggcggggcccaggcgcgagcgggggcacg

SEQ ID NO: 249 - DNA, 42 bp, Homo sapiens
cgctgaaggtgggtggaacgagggcgcttgagtgcactcgcg

SEQ ID NO: 250 - DNA, 33 bp, Homo sapiens
cgcgcgggggcttcaggcactttgcgctccacg

SEQ ID NO: 251 - DNA, 15 bp, Homo sapiens
cgcgccagccgaacg

SEQ ID NO: 252 - DNA, 51 bp, Homo sapiens
cgctgggacagagctgcctgctggagctgccgcagatcgccgtggtgggcg

SEQ ID NO: 253 - DNA, 2 bp, Homo sapiens
cg

SEQ ID NO: 254 - DNA, 268 bp, Homo sapiens
cggagcgcgcagcccgtctctgaataagaagtgagtacaatggcgtgtttgtaaaaaaaagcttcaagtccgtctttttcaaaaaacattttgaatgctgcatgcctcatgcttcccagcgcctcgcgggagagacccggctatagagcaggaggtgagaccccccctccggtacccccacccctctggccgcacgctctcctgccccagccttttctgggaggactgcaaatgccccctctcagcaagcggccgtttcccatcttcg

SEQ ID NO: 255 - DNA, 2 bp, Homo sapiens
cg

SEQ ID NO: 256 - DNA, 33 bp, Homo sapiens
cggagcccccaggagcagtcagaccgatcaccg

SEQ ID NO: 257 - DNA, 23 bp, Homo sapiens
cgcccactagcccgagactttcg

SEQ ID NO: 258 - DNA, 40 bp, Homo sapiens
cgccccgacccgacgcctccccgcccgaccaggtgcctcg

SEQ ID NO: 259 - DNA, 10 bp, Homo sapiens
cgcggctccg

SEQ ID NO: 260 - DNA, 181 bp, Homo sapiens
cggctgctgaccgcccctcccgcgctcgccagggcccctgccccgcgtcagccaccgcgcgccttccccctgcccatgccgcagcccccgtggcttttgttctggactcgggatgccaggttgagacacgtcctgcaaacctctggcagaaatgggcgcaagggggtggatttcgttttcg

SEQ ID NO: 261 - DNA, 195 bp, Homo sapiens
cgacctaggacgtcggcgcctgccaggatcccctcgcctgccccccgcgccccgcgcgcgctcatgccaccaccacggggagggtgcatgcggcaggtgcctggccgaggcccccgggagcgagtcgcccttacgtgctccagcttgtctttcctccgaagccagacgctggcgctgtagtcctgctgcttgacg

SEQ ID NO: 262 - DNA, 2 bp, Homo sapiens
cg

SEQ ID NO: 263 - DNA, 358 bp, Homo sapiens
cggcgtccgagtgaccctgtctagcctcgttctgcgctcctgcaaaccacgttgctgcgctaactacaaacctggccaacatgtctttgtaaccctatcatttaaaaacgcttccaggcacctggccgctgccagatcaggttcgcgggcccggaggaggtcctcccacctgcccccgccagccccggggaccgtgcgcggcctccgtgtggcccccgcccacgaggtccctcgggcaggaaccgccgcgcgacctctgttcagcggccgcgtcctggccacgggcgacccctgtcgggaaccctgttcccggctaagctgcgttcccgcattccggtggctctcacccgagctcgcg

SEQ ID NO: 264 - DNA, 13 bp, Homo sapiens
cgcagttgtggcg

SEQ ID NO: 265 - DNA, 2 bp, Homo sapiens
cg

SEQ ID NO: 266 - DNA, 2 bp, Homo sapiens
cg

SEQ ID NO: 267 - DNA, 95 bp, Homo sapiens
cgcgcggggtcacctgaaggttggggcgcggaagctcaactccgtgctgattgggctccaagttttctgcgccctcgcctcgtcccgagtgcccg

SEQ ID NO: 268 - DNA, 45 bp, Homo sapiens
cggcagcaggttggagcgcaccgtgcgcgtcctgccctctcggcg

SEQ ID NO: 269 - DNA, 104 bp, Homo sapiens
cggctgagtcggagcccacgcggcgcgcgcctcccgcgaggaacttttcggcttgtaggctgcttgtcactctcgctttccgacgcgcctccccctggctcgcg

SEQ ID NO: 270 - DNA, 87 bp, Homo sapiens
cgctttcgcccccgctgacactttgcaaagccgcggcggcagcggcggggaccacgctgcggtgcaccaccttccgccaccctcccg

SEQ ID NO: 271 - DNA, 62 bp, Homo sapiens
cgacagtttgcgagcctcggctgcaagtggcctctcctccccgcggttgttgttcagtgtcg

SEQ ID NO: 272 - DNA, 2 bp, Homo sapiens
cg

SEQ ID NO: 273 - DNA, 2 bp, Homo sapiens
cg

SEQ ID NO: 274 - DNA, 2 bp, Homo sapiens
cg

SEQ ID NO: 275 - DNA, 2 bp, Homo sapiens
cg

SEQ ID NO: 276 - DNA, 2 bp, Homo sapiens
cg

SEQ ID NO: 277 - DNA, 2 bp, Homo sapiens
cg

SEQ ID NO: 278 - DNA, 2 bp, Homo sapiens
cg

SEQ ID NO: 279 - DNA, 2 bp, Homo sapiens
cg

SEQ ID NO: 280 - DNA, 145 bp, Homo sapiens
cgccggtttgctggcgacctggcgcatctgcccgcgcgccctggtctcagctgtcgcaggttcctcctgcacccacttccagtcttcaaagccagtgcagtcagcaccgtccacctggagccccaatcctctcctgcgattcccg

SEQ ID NO: 281 - DNA, 2 bp, Homo sapiens
cg

SEQ ID NO: 282 - DNA, 19 bp, Homo sapiens
cgcccaccgccaggagccg

SEQ ID NO: 283 - DNA, 35 bp, Homo sapiens
cggcggcggcggcggccccattagcggagcctccg

SEQ ID NO: 284 - DNA, 2 bp, Homo sapiens
cg

SEQ ID NO: 285 - DNA, 2 bp, Homo sapiens
cg

SEQ ID NO: 286 - DNA, 36 bp, Homo sapiens
cgagctggcgctggtccgctggctgcaggagagccg

SEQ ID NO: 287 - DNA, 2 bp, Homo sapiens
cg

SEQ ID NO: 288 - DNA, 42 bp, Homo sapiens
cggctgagccttcgcctgcctaatcccatttgccattgtacg

SEQ ID NO: 289 - DNA, 2 bp, Homo sapiens
cg

SEQ ID NO: 290 - DNA, 2 bp, Homo sapiens
cg

SEQ ID NO: 291 - DNA, 18 bp, Homo sapiens
cgcgcagcgcccgcgccg

SEQ ID NO: 292 - DNA, 2 bp, Homo sapiens
cg

SEQ ID NO: 293 - DNA, 2 bp, Homo sapiens
cg

SEQ ID NO: 294 - DNA, 2 bp, Homo sapiens
cg

SEQ ID NO: 295 - DNA, 118 bp, Homo sapiens
cgtgccagaccccggctccgcgacccaggtgagtgccgccaccgccgcctggagggacctaagggccctgggctgggacttggggccgcaccggggcctgaggcagaacagcgacgcg

SEQ ID NO: 296 - DNA, 22 bp, Homo sapiens
cgaaccgcgggcggcgcggacg

SEQ ID NO: 297 - DNA, 2 bp, Homo sapiens
cg

SEQ ID NO: 298 - DNA, 2 bp, Homo sapiens
cg

SEQ ID NO: 299 - DNA, 2 bp, Homo sapiens
cg

SEQ ID NO: 300 - DNA, 2 bp, Homo sapiens
cg

SEQ ID NO: 301 - DNA, 31 bp, Homo sapiens
cgacaagagctcggtgctgagatgtgttacg

SEQ ID NO: 302 - DNA, 2 bp, Homo sapiens
cg

SEQ ID NO: 303 - DNA, 2 bp, Homo sapiens
cg

SEQ ID NO: 304 - DNA, 2 bp, Homo sapiens
cg

SEQ ID NO: 305 - DNA, 2 bp, Homo sapiens
cg

SEQ ID NO: 306 - DNA, 2 bp, Homo sapiens
cg

SEQ ID NO: 307 - DNA, 2 bp, Homo sapiens
cg

SEQ ID NO: 308 - DNA, 2 bp, Homo sapiens
cg

SEQ ID NO: 309 - DNA, 2 bp, Homo sapiens
cg

SEQ ID NO: 310 - DNA, 2 bp, Homo sapiens
cg

SEQ ID NO: 311 - DNA, 69 bp, Homo sapiens
cgctaggggcggccagcggccgtttggctggcgtgtcggcggcgctcggggagggcgggccggggggcg

SEQ ID NO: 312 - DNA, 415 bp, Homo sapiens
cgcctcttctcttggcccgactggctctggtttccttcacgttcccagcctccaaattggcgtccgccccatggctcgtgtaggacgctaaaagcacggtaaatcccagggcgatctccagcagacgccctcgacgcatgatgccgagccgccaccggctcccgccgcctcttgccgcgcccggggctcggtctgcggccgccgctgcgccctgaagcgcaccgcgccgccggggtcccgctatcccgccgcccgtcccccgggccgggctcctcccgccttctccaggcgctgctcccacttcaggcggcccctgccagctgcaacacagagacaaatccccgaggcggggagactttcagggcatcgggatgctgaagcctcgcggtccccattcccaagcccaacccgtgcg

SEQ ID NO: 313 - DNA, 2 bp, Homo sapiens
cg

SEQ ID NO: 314 - DNA, 2 bp, Homo sapiens
cg

SEQ ID NO: 315 - DNA, 2 bp, Homo sapiens
cg

SEQ ID NO: 316 - DNA, 2 bp, Homo sapiens
cg

SEQ ID NO: 317 - DNA, 2 bp, Homo sapiens
cg

SEQ ID NO: 318 - DNA, 62 bp, Homo sapiens
cgcgcccgccgctagctcgcacagcgcctcgcacactcccgcacgcgcttgaaatgcgcacg

SEQ ID NO: 319 - DNA, 2 bp, Homo sapiens
cg

SEQ ID NO: 320 - DNA, 2 bp, Homo sapiens
cg

SEQ ID NO: 321 - DNA, 2 bp, Homo sapiens
cg

SEQ ID NO: 322 - DNA, 2 bp, Homo sapiens
cg

SEQ ID NO: 323 - DNA, 20 bp, Homo sapiens
cgcaaacgcaaaagcctccg

SEQ ID NO: 324 - DNA, 69 bp, Homo sapiens
cgccccctggggcccctggctgccgagtcccgctaaggcaaagacgccagcaagcgaggaagcgcagcg

SEQ ID NO: 325 - DNA, 2 bp, Homo sapiens
cg

SEQ ID NO: 326 - DNA, 318 bp, Homo sapiens
cgtcccgcggtagtgtcagttccctggggaccaggaagggcgactcttgcctgggagtcagtgcttgggccgtcgggtccgggtaagcgctgggggtttggctcgagaagatgcggataggtggcctagggcgccgcggatctccgccctctgcgggcaccgggagcccagggtcgaggcgcgccgccccgaggggccccttctcctaacaatgcgcccggaatggagtccgcgccctgacagcgcgggtcagcccgaaaccgcccagaatccgcttcgatgagtgggtgagccgctctgggagtctgccgcgtctcg

SEQ ID NO: 327 - DNA, 27 bp, Homo sapiens
cgtggtggctccccgagcggaggcgcg

SEQ ID NO: 328 - DNA, 2 bp, Homo sapiens
cg

SEQ ID NO: 329 - DNA, 13 bp, Homo sapiens
cgagctccccgcg

SEQ ID NO: 330 - DNA, 189 bp, Homo sapiens
cggtgacgatgtgcagagccttctggcacagactgttcactccgtcctccttgtggaaactcatcgtttggcttttctttcgttttctctttttttcccagttagccgtcttttcctcttcccgtacctctaacccctctggcgccctaagccatagtccgcccgcggtgactttggctggagattgcg

SEQ ID NO: 331 - DNA, 2 bp, Homo sapiens
cg

SEQ ID NO: 332 - DNA, 2 bp, Homo sapiens
cg

SEQ ID NO: 333 - DNA, 13 bp, Homo sapiens
cgggggctgagcg

SEQ ID NO: 334 - DNA, 51 bp, Homo sapiens
cggcgtgtgccgtgcgtggggtggggtgcgggctgggcggcctcgccttcg

SEQ ID NO: 335 - DNA, 289 bp, Homo sapiens
cgcccgcccgcaccccgcttccttcggcccttccttcaaatcccaaacgcaccgccgtgctccaaagaaggtgtccacgtcgcccccagaccccggagcgccccctctccacccccgggacttcccaggtcgctcactcctcccgccccccgcccagatctgagagggaccgaaaacacacccccgactcgggcagccagggccgaaactgtcaagaggagaaaaggtaaagcggaaggagggtggccataaacagatttttttgccccttcttaaaaggacactgccg

SEQ ID NO: 336 - DNA, 2 bp, Homo sapiens
cg

SEQ ID NO: 337 - DNA, 165 bp, Homo sapiens
cggacttgtccccgcagccgttgcggacctcccggtcgtcatggcgactgtgaaatgtggggtggggcgcatgcgttggaagccattcgcgcgggcagtccctgagtgtcccctcacgtgctccccagcgcgagcagcacccccgcctctgcgcttcccagagcg

SEQ ID NO: 338 - DNA, 21 bp, Homo sapiens
cgccgcccctgcaccacttcg

SEQ ID NO: 339 - DNA, 2 bp, Homo sapiens
cg

SEQ ID NO: 340 - DNA, 2 bp, Homo sapiens
cg

SEQ ID NO: 341 - DNA, 2 bp, Homo sapiens
cg

SEQ ID NO: 342 - DNA, 159 bp, Homo sapiens
cggctgcgctggccgcactgtccctctacaacatgagcagcgccggcggcgaccgcctgggccgcggcaagtcggcccgctgcggcctcaccttctccgtgggccgcgtgtatcgctggatggtggacagccgcgtggcgctgcgcatccacgagcacg

SEQ ID NO: 343 - DNA, 2 bp, Homo sapiens
cg

SEQ ID NO: 344 - DNA, 129 bp, Homo sapiens
cggggggcggaattcagagaggtaaagtgacccgcccccaaatcgcaataccaggaggacagcagggctagatggaatctttcggttcacagtccccgacctcgggcaagtgccccactcgggcgcacg

SEQ ID NO: 345 - DNA, 2 bp, Homo sapiens
cg

SEQ ID NO: 346 - DNA, 120 bp, Homo sapiens
cgctggagatggcgagctccgagactccctctatcttctgttttcagagcaactctatggtaccaaaaaaaaaaaaaaaaaaaaaaaaaaaaaaaaaaaaaaaaaaagaaggagaaggcg

SEQ ID NO: 347 - DNA, 2 bp, Homo sapiens
cg

SEQ ID NO: 348 - DNA, 171 bp, Homo sapiens
cgcggacgctgacgatctcctccacgtccgacaagtcctcgttctcgtcgtatcgctggcggtcaatcgggcgctgcgaggacccaaaccagagagcccgggacattattgtgggggctggaggtcgcctctcaacctgggcccagcactaacaggtgcagcagccgagcg

SEQ ID NO: 349 - DNA, 2 bp, Homo sapiens
cg

SEQ ID NO: 350 - DNA, 2 bp, Homo sapiens
cg

SEQ ID NO: 351 - DNA, 2 bp, Homo sapiens
cg

SEQ ID NO: 352 - DNA, 64 bp, Homo sapiens
cggcaggtgagcggcgcggctgcaggtgagcagcagcctcggctcgcgcgcccagctttccccg

SEQ ID NO: 353 - DNA, 2 bp, Homo sapiens
cg

SEQ ID NO: 354 - DNA, 2 bp, Homo sapiens
cg

SEQ ID NO: 355 - DNA, 2 bp, Homo sapiens
cg

SEQ ID NO: 356 - DNA, 2 bp, Homo sapiens
cg

SEQ ID NO: 357 - DNA, 16 bp, Homo sapiens
cgctccgcagggctcg

SEQ ID NO: 358 - DNA, 2 bp, Homo sapiens
cg

SEQ ID NO: 359 - DNA, 2 bp, Homo sapiens
cg

SEQ ID NO: 360 - DNA, 2 bp, Homo sapiens
cg

SEQ ID NO: 361 - DNA, 18 bp, Homo sapiens
cgcattccctcggccgcg

SEQ ID NO: 362 - DNA, 118 bp, Homo sapiens
cgggcggatgggggtcaccgaggcggctcgtctccaggcgcacacttcgcacatctctttgctaagtgaaggggccaaaatgcacagatgggggagtctacccaggaacagaggcgcg

SEQ ID NO: 363 - DNA, 2 bp, Homo sapiens
cg

SEQ ID NO: 364 - DNA, 2 bp, Homo sapiens
cg

SEQ ID NO: 365 - DNA, 2 bp, Homo sapiens
cg

SEQ ID NO: 366 - DNA, 2 bp, Homo sapiens
cg

SEQ ID NO: 367 - DNA, 2 bp, Homo sapiens
cg

SEQ ID NO: 368 - DNA, 22 bp, Homo sapiens
cgcgccgccccagaggagtccg

SEQ ID NO: 369 - DNA, 112 bp, Homo sapiens
cgggagcgcacgagtgtgtgtgtgtgtgtgtgtgttcgcggtgtgcccgcggctcggtgcacacgcgcgcgggttgtaaagtcaggagctgcgggagcgcctccctgcctcg

SEQ ID NO: 370 - DNA, 109 bp, Homo sapiens
cgctctgcctgggctgggcccacttacgttctgggtggggctcaggaactgcgtgcgggcgtagcgggtgagcatgctgatgatgaccacctggccccactcctccacg

SEQ ID NO: 371 - DNA, 2 bp, Homo sapiens
cg

SEQ ID NO: 372 - DNA, 2 bp, Homo sapiens
cg

SEQ ID NO: 373 - DNA, 2 bp, Homo sapiens
cg

SEQ ID NO: 374 - DNA, 431 bp, Homo sapiens
cgagggggctctgggaccgagcggcctcgcagcggcgacagaaatacatattttacgaaaaagaaaaaaaaaaaaacgagtcgcgcgaacccgtcaagtcagatgtgcgcggcttgaagcggaggaggctctgacgtcagccccacctcgcgcagcccggcctggccgcagactcgccggtcactcgccggcggctcaggccgggaggggccaggacagtcccggccgcgcggtggacggaggggccattcctccgggcgttagcaaataaattccatccgagtcaatatcgcccagcgaacggtgtttctctttagtcacccgagaacgagaggcacttttaattagaaattaattaatgagcagctgctccttcccgccccactgtaatcattcgtctcaattacaaatgagacctatgaaaggacacg

SEQ ID NO: 375 - DNA, 2 bp, Homo sapiens
cg

SEQ ID NO: 376 - DNA, 40 bp, Homo sapiens
cgccgcgccccgctgtagctccgctggagagatggggacg

SEQ ID NO: 377 - DNA, 2 bp, Homo sapiens
cg

SEQ ID NO: 378 - DNA, 22 bp, Homo sapiens
cgccagcaggttcagggccacg

SEQ ID NO: 379 - DNA, 2 bp, Homo sapiens
cg

SEQ ID NO: 380 - DNA, 47 bp, Homo sapiens
cgggcatcttgcattgcacgcagtacatgctgtggttctccagctcg

SEQ ID NO: 381 - DNA, 24 bp, Homo sapiens
cgccgttgggggacttctggcacg

SEQ ID NO: 382 - DNA, 2 bp, Homo sapiens
cg

SEQ ID NO: 383 - DNA, 45 bp, Homo sapiens
cgggactccaggcccacccagcaagctaattggctgaggccctcg

SEQ ID NO: 384 - DNA, 2 bp, Homo sapiens
cg

SEQ ID NO: 385 - DNA, 258 bp, Homo sapiens
cgaagcggcgggagtcggtgcagcctcaacttctactgcgtgtcccaggtcgccaaccagctttgctcgcgtgccgttggcccggaggctgccgcgccagtctctgcgtgcgcctgagcgcgctggagcatttgcgaggccagggctgccgacggcgagaggatactttgaggaacacggtgcttcagtcccgcccccgctctccgcccgagctggaggttggggcgcgctgagccgcagcgcctggacaagtgcgcg

SEQ ID NO: 386 - DNA, 45 bp, Homo sapiens
cgccctggcggctccgagggacctgggctcgggcttgcggtcgcg

SEQ ID NO: 387 - DNA, 7 bp, Homo sapiens
cgcggcg

SEQ ID NO: 388 - DNA, 4 bp, Homo sapiens
cgcg

SEQ ID NO: 389 - DNA, 67 bp, Homo sapiens
cggggcgccaacagctcaggacttgggttgcaggctggttcttgcaccaaccagcggggcggcctcg

SEQ ID NO: 390 - DNA, 43 bp, Homo sapiens
cggctgacccgcagcggcagcggcagcagcgaggactcgagcg

SEQ ID NO: 391 - DNA, 2 bp, Homo sapiens
cg

SEQ ID NO: 392 - DNA, 2 bp, Homo sapiens
cg

SEQ ID NO: 393 - DNA, 113 bp, Homo sapiens
cgtgtgtttagctgaattcagtatatttttctcgcacttctcgcttttttttttttctttctgaatctgctcttctgctttgcgggcccctaatctctcccgaatctcgggcg

SEQ ID NO: 394 - DNA, 4 bp, Homo sapiens
cgcg

SEQ ID NO: 395 - DNA, 2 bp, Homo sapiens
cg

SEQ ID NO: 396 - DNA, 84 bp, Homo sapiens
cgctgcgcgccgcctccgcggagccgagcggcggtggctgcggaagcgactggggctgcgcggacaccagcgccccagagcccg

SEQ ID NO: 397 - DNA, 2 bp, Homo sapiens
cg

SEQ ID NO: 398 - DNA, 48 bp, Homo sapiens
cgcgcttcatcttgtagcggtggttctggaaccagatcttgacctgcg

SEQ ID NO: 399 - DNA, 228 bp, Homo sapiens
cgggccgcgcgcttacctgcgtcctcgtcgtcgaaggagttcatgcacgggaagtagatggcgagcgcctcgaaggaggcggacagactgaggcggctctgcgagcgctccatgcccgcgccggcgccgggcgcctcggccgcggcggcggcggcggcggcgggcggcttgggcagcttggccgccccattcttgacgcggagtacggcgcgcggcgtggtggcggcg

SEQ ID NO: 400 - DNA, 47 bp, Homo sapiens
cgcaccttggccgtaacaagcgcgctccacgccgccacgcaccagcg

SEQ ID NO: 401 - DNA, 185 bp, Homo sapiens
cgcgcagggggcgggctctacctccccctcgcccccgcttcggttttaagccgcggaggcgcccggtgggacctcgctgctgtccaatcaggggggaccgggtgagctcctcttcctggagccgggctccaccagcgccgcaggctcacaggccgggggtgggggctctggaccgaggggcggcg

SEQ ID NO: 402 - DNA, 216 bp, Homo sapiens
cgggggcgctaatcccgggagcaggaggccgggctccagccgccgggccttgcgcgcctgcttcttgcggcgcggccggtacttgtagttggggtggtcgcgcaagtgctgcacgcgcagccgttcggcttcctccacgaagggccgcttctccgccgcgttcagctccttccacgctttgcctgcgggccgtgggcgccagtgagtggaacgccg

SEQ ID NO: 403 - DNA, 344 bp, Homo sapiens
cgtggtcccgtgtcccggggcgcgctccagctccggcaccactagctcctcgtcctcctcggaggggcgcccgagtgcgtccgacacggccagtagcgccgcggcgagcagcagcagcgtgggtactggcccaaagctccgagaccccggagcccgctccgcgttccccatgtcgctgcccagcttgcgccttccgaacccctcgggcacagctcgctgcattggagccccaggagacaccgctcgtagcagcgcacggagcgagggacctttagttcgggtcgggagagcaaagcctcgttggcctgctctggattgttaaaattaacaatttctattattcg

SEQ ID NO: 404 - DNA, 28 bp, Homo sapiens
cgttctgtttggcagccaggccgagacg

SEQ ID NO: 405 - DNA, 124 bp, Homo sapiens
cgtggggcgctggacttaccgagaggttagcgccgccgtcgggggagggcgtgtcccgcacgtgtgtgtccgcgcgtgtccgcgcccgcgtgtgccagcgcgcgtgccttggccgtgcgcgccg

SEQ ID NO: 406 - DNA, 80 bp, Homo sapiens
cgcccgccagggtcacgaagagcgcaacgaacgccagcagcacggcgctcacggtgagcgcccgcgccgcctgcacctcg

SEQ ID NO: 407 - DNA, 62 bp, Homo sapiens
cggacaggccccgcagtgagcaggtaagggtcgccccgccgcggctgcccctccacgcctcg

SEQ ID NO: 408 - DNA, 165 bp, Homo sapiens
cgaccgtatgcgccgatttgtcgctgggcgtccgtttcctcttgctggggctgggcgcggcctcggagcctggcggcggtggtgagggcgcacggccagctgcagcggcgctgtgcttgccgtggatccaggacaccttaggcttggtggcggggtcaggtggcg

SEQ ID NO: 409 - DNA, 43 bp, Homo sapiens
cgtccctgtgcttctggtggttccggcgcttcctcggagcgcg

SEQ ID NO: 410 - DNA, 86 bp, Homo sapiens
cgccgccgccttcgccgggagccaagcccgccgggccggcccggtcccaggtgggcagctcggcttgcagctggttggaggtggcg

SEQ ID NO: 411 - DNA, 23 bp, Homo sapiens
cgagcccgtgggataagggggcg

SEQ ID NO: 412 - DNA, 2 bp, Homo sapiens
cg

SEQ ID NO: 413 - DNA, 99 bp, Homo sapiens
cgcggccatgcaattggtggatttttttaaaccgttttggaggggggagcgcggcgttgggggcgggagagcgctcctggctgtgagctgctcctgccg

SEQ ID NO: 414 - DNA, 73 bp, Homo sapiens
cgtggaactcgtgagccccacgcaacgcctccctgccgcccagggtgggctcctagaagcacagaaatggtcg

SEQ ID NO: 415 - DNA, 2 bp, Homo sapiens
cg

SEQ ID NO: 416 - DNA, 52 bp, Homo sapiens
cggggcgggcagggaccgagtcaggagagagcgggcgggggtcctgggagcg

SEQ ID NO: 417 - DNA, 50 bp, Homo sapiens
cgcgagcaggagggcgcactccatggtcaggtgcggacgcggcggctgcg

SEQ ID NO: 418 - DNA, 50 bp, Homo sapiens
cgggtcggggcatcacaggcgcgggaatccacgtgtggactctgcgttcg

SEQ ID NO: 419 - DNA, 2 bp, Homo sapiens
cg

SEQ ID NO: 420 - DNA, 2 bp, Homo sapiens
cg

SEQ ID NO: 421 - DNA, 52 bp, Homo sapiens
cggggtagcgcaggagcaggcaggggctcgcggctcgcgtgggccccaggcg

SEQ ID NO: 422 - DNA, 2 bp, Homo sapiens
cg

SEQ ID NO: 423 - DNA, 2 bp, Homo sapiens
cg

SEQ ID NO: 424 - DNA, 2 bp, Homo sapiens
cg

SEQ ID NO: 425 - DNA, 138 bp, Homo sapiens
cgagtggcagcagcaggagcggggtgacgaacaagatcacgaaggacttgaacttggagacatagctcagcgccgaggccatcgcgcgggagggagactggcgggcgagacgagtgaggggcagctagaggcgccgcg

SEQ ID NO: 426 - DNA, 2 bp, Homo sapiens
cg

SEQ ID NO: 427 - DNA, 2 bp, Homo sapiens
cg

SEQ ID NO: 428 - DNA, 2 bp, Homo sapiens
cg

SEQ ID NO: 429 - DNA, 1017 bp, Homo sapiens
cgctcacctgagtcctaaaagctgttgaatccacatggtcacgtttcggggagcggggcctcagacctggctcgcccaggccatctgcgcggcgcccgcgcccgctcgcttccgtcccgcggcgccggtctccggctctcggtccgccgcctcccgccgcccgccggccgcggggcgcacagcgagtcagagcgcggccgcgcggggctccatgccggccggcgcgccgccgccgttggggcgcatggctcaggctgggcggcccgcgggggcgcacatcctccggccggggcgcggggctcgcggccccctccgccggcggcacagcgaaggcggcagcgaggcggggcgtgttccggcgctgtcgcggcgcagcaaagggctggggagccgcggcttcgccctccggggcggcgaggagggaggccggcggcgctgccgctcacggtgcgtgtctcccggcgcgcggctcttgcctccagccggagctccgcgccgatggggcggcgctgcttagggtttggggtgacgcgacgcggacggacgcgagtcccctccgcgctgccgggtcggggggctctgccagaggctccgccgccgatcggcgccactcaagttgcccgggggctccgtctgagcgctcgctctgcagacggccgcggcccggagactggcaggaggcgggcacgagaggcgcgcggggcgagggcgccgtggagcgcggggcgtggggacgcgcggcggcggcgccgcgcggaggaggcgcgcggggatcccggggccccgccgcccgcgcccaccgcgcccgccgcagagccgcccgcgctgctcagccgcctccctcctcgcgtctgcctctccgcgcgctcgcccccgcctcccggagccggtcccaactccgcccgcccggcccggctcacgtcacccgccttccccgcccctcgaacgggagctcgagcccctggcctggccccggctcctgctcgccgccccaccttgcgggggccggggtcgccg

SEQ ID NO: 430 - DNA, 166 bp, Homo sapiens
cgcgcgctgagggtgcggtgagctgagtgcggggccaagcatgttctggcgtcgacttcgcccaggggcccaggacctggcgcccaaggggctccctggcgacggagacttccgacgcagcagcgacccgcggctgcccaagctgaccccgcccgcgctccgagcg

SEQ ID NO: 431 - DNA, 2 bp, Homo sapiens
cg

SEQ ID NO: 432 - DNA, 2 bp, Homo sapiens
cg

SEQ ID NO: 433 - DNA, 2 bp, Homo sapiens
cg

SEQ ID NO: 434 - DNA, 2 bp, Homo sapiens
cg

SEQ ID NO: 435 - DNA, 2 bp, Homo sapiens
cg

SEQ ID NO: 436 - DNA, 2 bp, Homo sapiens
cg

SEQ ID NO: 437 - DNA, 14 bp, Homo sapiens
cgcgctgagacgcg

SEQ ID NO: 438 - DNA, 2 bp, Homo sapiens
cg

SEQ ID NO: 439 - DNA, 2 bp, Homo sapiens
cg

SEQ ID NO: 440 - DNA, 2 bp, Homo sapiens
cg

SEQ ID NO: 441 - DNA, 125 bp, Homo sapiens
cgtcccgcgccctcgccccgccatgctcctgctgctggggctgtgcctggggctgtccctgtgtgtggggtcgcaggaagaggcgcagagctggggccactcttcggagcaggtaagtggagccg

SEQ ID NO: 442 - DNA, 2 bp, Homo sapiens
cg

SEQ ID NO: 443 - DNA, 131 bp, Homo sapiens
cgtgcgcagcccagcccctcccggacgtcctcgcccccgcccgggcacatcgtgctccgcaccgaggcagagaggggcacgcggatcccagcccctgcgagcccctctgcccgccgccacttcacaccccg

SEQ ID NO: 444 - DNA, 94 bp, Homo sapiens
cgggccgcgtgggtttgggcgcgccgtggtgggcaagcggggccagcggagcgggaacccgcacaccctccgagcggagccgaggacaggcccg

SEQ ID NO: 445 - DNA, 2 bp, Homo sapiens
cg

SEQ ID NO: 446 - DNA, 2 bp, Homo sapiens
cg

SEQ ID NO: 447 - DNA, 27 bp, Homo sapiens
cgcgcaagtattcccctccccatcgcg

SEQ ID NO: 448 - DNA, 164 bp, Homo sapiens
cgcgattctcctcgggaggtgtctgcgaaggcggctctgccgcggtgggggtggggaggctagggcttcggaccgctggagttggggtcgcagccagttcctggcgagtgtttcctggctgctgccgcaggggcttgctttttcggatttcccctctaatctcg

SEQ ID NO: 449 - DNA, 2 bp, Homo sapiens
cg

SEQ ID NO: 450 - DNA, 2 bp, Homo sapiens
cg

SEQ ID NO: 451 - DNA, 68 bp, Homo sapiens
cgcatctgaaaattccgccgcagccacctccctcccatgggaaagccccgacctcggcgggcccagcg

SEQ ID NO: 452 - DNA, 508 bp, Homo sapiens
cgcaacttgggcgcgccagtacaaactcggccttcggcttttctgaagccagtcaagttcgcacagggcccccagcgcctggaaatctgagaggcgtggaagggtggggagtcccgcgaagtctccagtccctgggtgtcctccggctccgcgggggagcgggcctggagctaaaccggccggccgtaggctggagtagcgggcgccggagcgcgcggtggggatgtccgaaaaggagttagaggctcagtcggagagtccgagaacacgagggatgcctaccttgtaacatggcctcaagtttcttcctgtccacgcggaagcgctcctcgctccactccgggctgtgcagggtcgccccggcgaccaagtcgtcctcggagccgggcactggggagtcggtgctgcgctcgctgttggagccggggtccgactgcgccgccaggtagccgggctctccctgggcggccatggtgggcgcgcagcgctcgggctcccgctgccgccg

SEQ ID NO: 453 - DNA, 2 bp, Homo sapiens
cg

SEQ ID NO: 454 - DNA, 2 bp, Homo sapiens
cg

SEQ ID NO: 455 - DNA, 2 bp, Homo sapiens
cg

SEQ ID NO: 456 - DNA, 2 bp, Homo sapiens
cg

SEQ ID NO: 457 - DNA, 4 bp, Homo sapiens
cgcg

SEQ ID NO: 458 - DNA, 2 bp, Homo sapiens
cg

SEQ ID NO: 459 - DNA, 2 bp, Homo sapiens
cg

SEQ ID NO: 460 - DNA, 9 bp, Homo sapiens
cgctgcacg

SEQ ID NO: 461 - DNA, 2 bp, Homo sapiens
cg

SEQ ID NO: 462 - DNA, 2 bp, Homo sapiens
cg

SEQ ID NO: 463 - DNA, 396 bp, Homo sapiens
cgggcggcggcggctcgctgtatatatctcggcgcaccccgccaggtcgcgcacagcgccccgagcccaggcgcctccccgcccccctcccgcgctccgcggcggcggcggcggcggcagcagtagcagcaatatggctgttgatgggtgtttggggtggcgctggcggcgggaggagctcccccgagcccctgcgccggctgcccgttgctagctatggcaaatggtggcggcggcggcggcggcagcagcggcggcggcggcggcggcggaggcagcagtcttagaatgagtagcaatatccacgcgaaccatctcagcctagacgcgtcctcctcctcctcctcctcctcttcctcttcttcttcttcctcctcctcttcctcctcgtcctcg

SEQ ID NO: 464 - DNA, 2 bp, Homo sapiens
cg

SEQ ID NO: 465 - DNA, 70 bp, Homo sapiens
cgtgatttttccacttagagattatttagggagatgtcctggatgggacaagtagacaaatggcggcccg

SEQ ID NO: 466 - DNA, 2 bp, Homo sapiens
cg

SEQ ID NO: 467 - DNA, 68 bp, Homo sapiens
cgggagcccggccgcgccctccagcctcggcacccgcgctcagcgcgccgcgccccgcgtcccccgcg

SEQ ID NO: 468 - DNA, 88 bp, Homo sapiens
cgccccgcgcaccgcccccgtcccagccttcagtggcgcggcgccccctcgcgacatccgcgggtccccaggagcgagccgaccctcg

SEQ ID NO: 469 - DNA, 2 bp, Homo sapiens
cg

SEQ ID NO: 470 - DNA, 2 bp, Homo sapiens
cg

SEQ ID NO: 471 - DNA, 87 bp, Homo sapiens
cgggggcctcccaggccgcggcgcctcccgctttcccccactccccgacccttcttcgcccccaaaatgaggaaacggagcaactcg

SEQ ID NO: 472 - DNA, 45 bp, Homo sapiens
cgtggcaaacccgggctccgacgacagaggcagcgcagaagctcg

SEQ ID NO: 473 - DNA, 2 bp, Homo sapiens
cg

SEQ ID NO: 474 - DNA, 173 bp, Homo sapiens
cgggccgtggctgacatcgcggagaagttaggactttcacagtctctgccagacttgaaagcaagctggaaatcgatagctgtttcagctgtttcagattctaatctggtttgggtttttccccctttcatttgaaaatagactcagggcaatgcttaagagaattccaaccg

SEQ ID NO: 475 - DNA, 2 bp, Homo sapiens
cg

SEQ ID NO: 476 - DNA, 48 bp, Homo sapiens
cggggcctttgtctctggctgcagttggagctctgcgtctcgtcttcg

SEQ ID NO: 477 - DNA, 2 bp, Homo sapiens
cg

SEQ ID NO: 478 - DNA, 2 bp, Homo sapiens
cg

SEQ ID NO: 479 - DNA, 36 bp, Homo sapiens
cggggcagagggggcgggaagctggcgccacggtcg

SEQ ID NO: 480 - DNA, 2 bp, Homo sapiens
cg

SEQ ID NO: 481 - DNA, 2 bp, Homo sapiens
cg

SEQ ID NO: 482 - DNA, 2 bp, Homo sapiens
cg

SEQ ID NO: 483 - DNA, 2 bp, Homo sapiens
cg

SEQ ID NO: 484 - DNA, 2 bp, Homo sapiens
cg

SEQ ID NO: 485 - DNA, 97 bp, Homo sapiens
cgacccgggagggaaaacccctgcctcttcccggggcttgctctgcccgtcctttaaactcgccctacaccctccccgactcccgtccttgcaagcg

SEQ ID NO: 486 - DNA, 2 bp, Homo sapiens
cg

SEQ ID NO: 487 - DNA, 2 bp, Homo sapiens
cg

SEQ ID NO: 488 - DNA, 67 bp, Homo sapiens
cgatgcctgtgcttgtggttccctgaggcagtgggagtggcgtgtgaaggactgtgagagtctggcg

SEQ ID NO: 489 - DNA, 2 bp, Homo sapiens
cg

SEQ ID NO: 490 - DNA, 29 bp, Homo sapiens
cgggtgactgctgaccctctgccctgtcg

SEQ ID NO: 491 - DNA, 49 bp, Homo sapiens
cgaggccccgcgcatcctcgtccgcgcttcagccacttaggctcggccg

SEQ ID NO: 492 - DNA, 188 bp, Homo sapiens
cgtccactgaaaacctccagttggtgctggagcggcggcgtgtggccaacgccaaggagcgtgagcgggtgagggatccctagggtcgacgtccgttccccccttccctgctctaccaccaaacacctggtcaacacccgggggtccgctcaccgcccacccccgctcgaggcgacttcgagctcccg

SEQ ID NO: 493 - DNA, 4 bp, Homo sapiens
cgcg

SEQ ID NO: 494 - DNA, 4 bp, Homo sapiens
cgcg

SEQ ID NO: 495 - DNA, 113 bp, Homo sapiens
cgcgggtgaaggcggagccgcagggttggcccccaaagggatgctctcgcccgagcggcgagaccagccccgctcgcccctcgccgcggccgcgccgcagccgcccacggccg

SEQ ID NO: 496 - DNA, 208 bp, Homo sapiens
cgcgcccgccacagcagcgcgctaggcggacgccgcgggaatttgacgctcgaggctcgcggcccctaatgagagtcccagaacacttcccgcccttgacggccagcggcagcgccgccgcctcccgcagagcgcccgcttctccgtttctagagccttagtctctcctcgagcgacctcgcagcctccctcccgtctccatccgccg

SEQ ID NO: 497 - DNA, 96 bp, Homo sapiens
cgcatccccccgcactcggcgccgccgcctcgccgctctctcccgcttgcagggccgccccgggcaccccagggctgctgaggggcgggcgggccg

SEQ ID NO: 498 - DNA, 236 bp, Homo sapiens
cgcgtggaggctgcgcgtaggggtccgggacgcgggacagggactccgcgcagcccaggcgccggggaaccggggctggagtcggggatctgagcccagcggacgcctcctccgcctggaggcccggcacggaccgggacaccagggcgtccgtggccgtggctcggcccctggctgctgcgggccgcggcctccagtgggtccccaggacccttccccacggcgggtactcaccg

SEQ ID NO: 499 - DNA, 211 bp, Homo sapiens
cgccgcccgcgttccctgcccttcacttcccaacccctgcgtggccccagggtccacattcctggagttttcctccccagtaaatagtgctgtcccccacttaacagcagaggcgcccaggagttcaggcgatgtgtccaaggccgaacagagggacagcagtgagctgctcaacctttccagctgcgcagccaggacacggctgggggcg

SEQ ID NO: 500 - DNA, 193 bp, Homo sapiens
cgcgggggaccccaggtcgggacggagcctcctctggctcgctgtgcgcgcacgcctggaaaggcgggatttaaggcagcgatgctgcgggaggctctgcagtgtcaacgagcccccgaacggttccgcctcattccctctctgtgtgcctcgcaagtctctgcttagtaaaccgtcacagcttcggcgcgcg

SEQ ID NO: 501 - DNA, 4 bp, Homo sapiens
cgcg

SEQ ID NO: 502 - DNA, 199 bp, Homo sapiens
cgcaataaatctccgtagacaccgcatctccaatgcggtgtccctctgtgtcagtgccccggcggctcttgcagggtgccaatgttacggctgtacaccgcttttccctcccatcatcctcacctgaacagacctggaggaggcggaaatggaaattagggcatgtccacaagctggattcgttagatcctcctgctcg

SEQ ID NO: 503 - DNA, 87 bp, Homo sapiens
cgcggccgctacgcctcgctccctgcattcagtctccttggcgtctccgctgcagcatccaagaccaggcgccgcctctgctagccg

SEQ ID NO: 504 - DNA, 68 bp, Homo sapiens
cgtaaactgattatgaaacatacgatgttaattcggagctgcatttcccagctgggcactctcgcgcg

SEQ ID NO: 505 - DNA, 61 bp, Homo sapiens
cggtgaaaactagtctgtggtgcattgagatttgcaaaccattccctgaatgccaggggcg

SEQ ID NO: 506 - DNA, 40 bp, Homo sapiens
cggatcggcggcagcagaagcggcagcggcaaagcacccg

SEQ ID NO: 507 - DNA, 647 bp, Homo sapiens
cggctgctgccactgctctgccgctgccgagccggtcacctgggcacccgcggagccgcgccgctgctaccgccccggcggcctcccggagtgcgcggagggggcggcggaggagcgagatatccatagtaaccgaggatgcgaggggcgcccagcagcagcgagtgcctgggagccaggaggaggcccccgcgcgccggcaacccccagtgctaggcgccctgcagcccccgcgcgccgcgcctgggcccgcatcgctctcgcagtgagggtccgcccgagcggtaagccctccccggcggccaagccgacacctcccccccgcctcgccgcccaccccgggcagcagccgcggaacaatggagagcgcagccagcagccctggagacggcgttcgggggaggacgcgccgccgccgccgccgctgccgccagggcaggcgcgcgccgcgtggagccgggcgggtgcgagggcgcgcggcggggggtggggggcacgcgccgcgcggggggcgggggcagtggggggcgcgcgcgcgggcccggggagctcgcggggagagcccggcgctcggcgcagcgcggcgcggccaagctccgcgcctctcccgcccttcctcggcgcgctcgccctcgcctcgccgctcg

SEQ ID NO: 508 - DNA, 327 bp, Homo sapiens
cgaggcgcgggctgagccctcagcacctggcctgagcggcgtgggcagcagcctgcaccgcggacacctccaactctgccgcgtctgcgccgcactctggccgtggcagcgattttccgggcatctctgaggccgcccttagtcccacaagcacttagccgcccatttcagagcagcggcgccgaccgttttaagaggagtcagttcccgacaccgcctcccacttacttctccacatttccaccgctggagggggtgagtgccgtggacaggcgctcccgtccggggacagctcagcggcggcagtcagcccgaccctcctccgcg

SEQ ID NO: 509 - DNA, 2 bp, Homo sapiens
cg

SEQ ID NO: 510 - DNA, 324 bp, Homo sapiens
cgcaagggcaactactggacgctggacccggcctgcgaagacatgttcgagaagggcaactaccggcgccgccgccgcatgaagaggcccttccggccgccgcccgcgcacttccagcccggcaaggggctcttcggggccggaggcgccgcaggcgggtgcggcgtggcgggcgccggggccgacggctacggctacctggcgccccccaagtacctgcagtctggcttcctcaacaactcgtggccgctaccgcagcctccctcacccatgccctatgcctcctgccagatggcggcagccgcagcggctgcagcagctgcg

SEQ ID NO: 511 - DNA, 77 bp, Homo sapiens
cgcctcgccgtgcccgatgggtgcgcttctagcgctgccgccgcggcgctcggcctcgggttcccgccgctgcgccg

SEQ ID NO: 512 - DNA, 158 bp, Homo sapiens
cgctcccaccccggcacagacagccctcaaagttgtccgtactccccagacctcgccttctgctcagcccccggaccccgcccaggggttgagttgacgtccgcgggtggacctctctggtccgctgcgcagggaactgacttcgggaatccagggcg

SEQ ID NO: 513 - DNA, 79 bp, Homo sapiens
cgcgcgctccgcgctcctggcggtcgcagcgctgcctattaattgattctcttattgatttatttaatttttaggagcg

SEQ ID NO: 514 - DNA, 137 bp, Homo sapiens
cgccctggagcggtgggaggacgcggagcgccgttctctggcttccgacaccctgcccgccctctctagtgggtctgtggctgcgccctctcgaaggaagtaataaatctttctgaccttgggggtcagaggagacg

SEQ ID NO: 515 - DNA, 112 bp, Homo sapiens
cgctgcggcacccagcggcccatcggggttgcactgctgcagcggctccttgtgccacttgtagtccaggaggttgagcatagtgagcaccagcagcagtgcatagcccgcg

SEQ ID NO: 516 - DNA, 2 bp, Homo sapiens
cg

SEQ ID NO: 517 - DNA, 2 bp, Homo sapiens
cg

SEQ ID NO: 518 - DNA, 282 bp, Homo sapiens
cggccctccagctccagctgtgcgtctccgcccgggcgaggtggggctgaccgcggccgtctgcacacgtcccctctggtccgcgcccccggcctgggagggcggactcgcccaccccacgatggccccggctttggaagggactgtttccgtgacccgttctcccaacagccgctaacaaccccctctaacgtctcctgcgcggcccgctcctgagaaccctggctcgggagagcgacgcggggtcctcggggctgcgcaggctgcggcgccctgcccacg

SEQ ID NO: 519 - DNA, 81 bp, Homo sapiens
cggcgcggcggcggggggcgccccgcaagcccgcggctctgagcggccacccgcgcagcaagttgggcgagttggcagccg

SEQ ID NO: 520 - DNA, 53 bp, Homo sapiens
cgcggcttttgccttttgcgccagcgtgagctcggttagggtctccacggccg

SEQ ID NO: 521 - DNA, 40 bp, Homo sapiens
cggcgccagctcacgtccccgctggcgccccctcggcgcg

SEQ ID NO: 522 - DNA, 206 bp, Homo sapiens
cggccgacccacctggtgtcgcgtgcgctggcggcccgcgcggcagccaagccaaaggccgaggccgaggccgagcgcggcgcccagcagcacggcgggggccagcagggcgggcgccggccgcagcgcgtcccgccccagcagcagccgcgcgtcgctcttgcaggccgccccgccgcgggccatccggggcgctcaggctgccg

SEQ ID NO: 523 - DNA, 38 bp, Homo sapiens
cgctgctgctgcgcggggcggcggccgccgtgccctcg

SEQ ID NO: 524 - DNA, 5 bp, Homo sapiens
cgccg

SEQ ID NO: 525 - DNA, 25 bp, Homo sapiens
cgtgtgtacgcgttgcattcgctcg

SEQ ID NO: 526 - DNA, 79 bp, Homo sapiens
cgctccttttccttcttctttcctattaaatattatttgggaattgtttaaattttttttttaaaaaaagagagaggcg

SEQ ID NO: 527 - DNA, 33 bp, Homo sapiens
cggccccgcgtggcgcctcggccgttgccctcg

SEQ ID NO: 528 - DNA, 132 bp, Homo sapiens
cggcgggcggcggcggcgcggagctgcacacggagaagacggagtgcgggcgctacggagagcactcgcccaagcaggacgcccgcggggaggtggtcatggccagctcggcccacgaccgcctggcctgcg

SEQ ID NO: 529 - DNA, 32 bp, Homo sapiens
cgcctggcaccccctcctctgccccgagggcg

SEQ ID NO: 530 - DNA, 2 bp, Homo sapiens
cg

SEQ ID NO: 531 - DNA, 2 bp, Homo sapiens
cg

SEQ ID NO: 532 - DNA, 20 bp, Homo sapiens
cgagtatgccagcggcgccg

SEQ ID NO: 533 - DNA, 85 bp, Homo sapiens
cggcacgctccctccctcggccgctttctctcacataagcgcaggcagagggcgcgtcagtcatgccctgcccctgcgcccgccg

SEQ ID NO: 534 - DNA, 230 bp, Homo sapiens
cggccccgcgaaactcggccctccagctcgcgggacgcgctgcctgccaggcgggcccggcggtacctcgggggcgggaggggtcggtcgcagggcccccagcctggcgcccgcggggcgtccgcagcgaaggggtgggtgtcgctcgtgaacgcagcagggaccagctcagcccgcgctcgcccctgggcctcggccaccgcctctccgccactttctcggcccctgcg

SEQ ID NO: 535 - DNA, 84 bp, Homo sapiens
cgggccgccagtctcagggtgtcgggctccaactaaggccccgaagcccccacgcacctgagggcattttgaccagctcttgcg

SEQ ID NO: 536 - DNA, 42 bp, Homo sapiens
cgcgatccctttttgactcagccaaacggaaaagctcgcgcg

SEQ ID NO: 537 - DNA, 45 bp, Homo sapiens
cgccgtgctcctcctcgtcctcgaaagggtagaaagagtcgtccg

SEQ ID NO: 538 - DNA, 26 bp, Homo sapiens
cgcccgccagcatcccttgtcccgcg

SEQ ID NO: 539 - DNA, 50 bp, Homo sapiens
cgaggtttaggtggaggctgaggctgccgcgcgccgcgggaggagcctcg

SEQ ID NO: 540 - DNA, 56 bp, Homo sapiens
cgcttctgagccagggacgcgcgtggggggtgggcgtgcacgcgggtgggccagcg

SEQ ID NO: 541 - DNA, 44 bp, Homo sapiens
cgtcctcaccgcgcacgcgctcccctcgcgcgcgcacacgctcg

SEQ ID NO: 542 - DNA, 2 bp, Homo sapiens
cg

SEQ ID NO: 543 - DNA, 9 bp, Homo sapiens
cgccttccg

SEQ ID NO: 544 - DNA, 58 bp, Homo sapiens
cgcggggcagctgctcaagtggatcgacaccaccgcctgcctggcgggtaggcgggcg

SEQ ID NO: 545 - DNA, 151 bp, Homo sapiens
cggtagaagacagcgtccccaggaccagcgactctgtggctcactcggccactgggtctcggcgcaaaccctccctaggcagtgcgggcgatgctgactgcagacgtcgggcagggctttcgtgcgggcgggagcgggggaagccagtgcg

SEQ ID NO: 546 - DNA, 17 bp, Homo sapiens
cggactccccaggaccg

SEQ ID NO: 547 - DNA, 70 bp, Homo sapiens
cgcccgctgctccccgctgcgtccagggatggagggccccaccacccatggaattgctggcccctctgcg

SEQ ID NO: 548 - DNA, 59 bp, Homo sapiens
cgtccctgagatttcgctgagaaactttcagcgggttagcgcttgggcgctgggcgccg

SEQ ID NO: 549 - DNA, 25 bp, Homo sapiens
cgctgggtaacctctatccgagccg

SEQ ID NO: 550 - DNA, 57 bp, Homo sapiens
cggcgctgacgctctggccctgggggctgcctggctggtgtcaggtagcggaagacg

SEQ ID NO: 551 - DNA, 111 bp, Homo sapiens
cgagcagctccacgtcctgccaaggacggtaggtgcaagggtcgggggactctctgacggggtcgtcccttcgggcacggggaggttcccaccgagccccaaccctgaacg

SEQ ID NO: 552 - DNA, 211 bp, Homo sapiens
cgggtcgctgttcctgttgcattatgcaaaggtggctgggaaagcgcgttgacttacatttacatagcccatcttctccccacagtatgtgactaatacgtatcccggggaggagggagcgcggctgggggtgctaatcggaagggaacagacagtgagtgccatcttgctgggaggttccagaagcaaagcgccaacgacgacagtagcg

SEQ ID NO: 553 - DNA, 75 bp, Homo sapiens
cgcccccacgcgcgctgtcggtatttgcccgccttgctgcaacttgctgcagtgtttgaaagagtagtaggagcg

SEQ ID NO: 554 - DNA, 2 bp, Homo sapiens
cg

SEQ ID NO: 555 - DNA, 66 bp, Homo sapiens
cgggcgctggagaaggcgcctggcgcgaagctgggcggcgccccgagggcggaggacaggtggccg

SEQ ID NO: 556 - DNA, 2 bp, Homo sapiens
cg

SEQ ID NO: 557 - DNA, 163 bp, Homo sapiens
cggggcggcgggcgcatgcgcgtgcgcggtgcggccccagccctggctgccgccgcctgccgccgccgtcgcgatgcctattttagtcaaagcggctgcgggcttggggacccggcccgggcagcggagcttccggacccgccgacccgccgaggagcgcgcg

SEQ ID NO: 558 - DNA, 99 bp, Homo sapiens
cggagcaaagccagcgcgctccgcggctcggaatccagctggctcgctaccctcccactcctgcgattttactcccgaccgcgctccagggcagaagcg

SEQ ID NO: 559 - DNA, 96 bp, Homo sapiens
cggcggcggcggcagctccagccgcgcccgccacacataccttcactcgctcggtgcacacgccgcgccgcgggcagtgccgcctgcggaggcgcg

SEQ ID NO: 560 - DNA, 4 bp, Homo sapiens
cgcg

SEQ ID NO: 561 - DNA, 16 bp, Homo sapiens
cgtgccaatctcgccg

SEQ ID NO: 562 - DNA, 2 bp, Homo sapiens
cg

SEQ ID NO: 563 - DNA, 141 bp, Homo sapiens
cgcccattttgcagtcgagcacacaaggtccgtcgaagccatcgagcaggtcctgcagctgcaggtagctttcgccgtcgcgctccaccacgccgtggaaggcaggcacgcagccgcgcagcgcgtcagccatcagccgcg

SEQ ID NO: 564 - DNA, 2 bp, Homo sapiens
cg

SEQ ID NO: 565 - DNA, 37 bp, Homo sapiens
cgaggtgttgcgggttttgtgcggttggttgggaacg

SEQ ID NO: 566 - DNA, 52 bp, Homo sapiens
cgaggcgtccccgctcccgccacccacacagggcgccaagtgccccgacccg

SEQ ID NO: 567 - DNA, 2 bp, Homo sapiens
cg

SEQ ID NO: 568 - DNA, 7 bp, Homo sapiens
cgctccg

SEQ ID NO: 569 - DNA, 2 bp, Homo sapiens
cg

SEQ ID NO: 570 - DNA, 4 bp, Homo sapiens
cgcg

SEQ ID NO: 571 - DNA, 17 bp, Homo sapiens
cgtcccgccccaactcg

SEQ ID NO: 572 - DNA, 136 bp, Homo sapiens
cgcggggggaggttcctggctcgccgtctccgctgccgcttgaccgcacttctggagggctccgcaccttgccaggtctctggaggcaaacacacacccccgattcataactggtccccgcgtcaggggactcgcg

SEQ ID NO: 573 - DNA, 31 bp, Homo sapiens
cggccagggagtgagcggggcgctgggcgcg

SEQ ID NO: 574 - DNA, 25 bp, Homo sapiens
cgccaaccagacctcagggtgcacg

SEQ ID NO: 575 - DNA, 12 bp, Homo sapiens
cgctcgtcaacg

SEQ ID NO: 576 - DNA, 6 bp, Homo sapiens
cgtacg

SEQ ID NO: 577 - DNA, 199 bp, Homo sapiens
cgcagcgtgtagccgcggaacagcgcctccagctctgggcaagcgaactcctcgtcgcacgcccggagcccgcgccggcggcttgtcccggccgcccgctcggcgcccccgggctcgcccgcgccgcctccgccgccgcctccgccgcgcggcgcccccgccatctcagcgccatgcagcggccgcggccgcgggcgcg

SEQ ID NO: 578 - DNA, 91 bp, Homo sapiens
cgtgggggcgcggcgcgggcgacacgtgcgggccgccaggagggggagggggacgcgcgccgccgggcccgccaccctgcacccggggccg

SEQ ID NO: 579 - DNA, 108 bp, Homo sapiens
cgtcctccctatggatctcccagtacctgcaggtcacaggataacagaagctatagtagagtcaccgaggaactccaggaacggaggagatggaacagtggagacgcg

SEQ ID NO: 580 - DNA, 13 bp, Homo sapiens
cgaaatcggtgcg

SEQ ID NO: 581 - DNA, 176 bp, Homo sapiens
cgggggcggcggggtgacagtccccgtgcatgaatcagccacccctcaggctccgccccggcgggggtcggccggacgctcgccccgcataaagcgggcacccgggccgcctggagcagaaagccgcgcacctcctcccgccaggcgctttctcggacgccttgcccagcgggccg

SEQ ID NO: 582 - DNA, 2 bp, Homo sapiens
cg

SEQ ID NO: 583 - DNA, 157 bp, Homo sapiens
cgggcgctttcccaggcctggccgaggggcgtcgcgcagaggcggcggcggcgcacggaggcggcagacgacgcgctctcggcgcccgcagccccggtcccgcgctcccgcggcccaaagtaactttgggagccgccgtctcccgcggaacttctcg

SEQ ID NO: 584 - DNA, 66 bp, Homo sapiens
cggccgcggcgggagggacagggggcctgggtgggaagggagcgcgagggcccctagcggttcgcg

SEQ ID NO: 585 - DNA, 498 bp, Homo sapiens
cgtgcgccaggcggaaatgctccagcaggtccccgcgcaccgggccgttcggggggcagtaggggcaggcggcggcgggcaggccgagcgcgccgggcggtggcgcagcggggcacgagtacttcttgtgcgccaggtaggcctcgaggctgtggaagctcacgcggcaggccgtgcactcgtggtagtcggccagcgccggtgccggggctccggggagcgggcgccgcggcttcttgctcaggtcgatggggccgtcggccgcggggccgggcgagcgcgcaggggcgaggccggggccgcttccgcttccgcttccgggccgcggcgactcgggcgcgggggcgtggccgggcggcggggggggcggggcgccggccgcgtgcagctcgtagagcttgcggcgtctgcgcgtgcgcacaggcgcggcgggagagggggccgggggcgcggccggcccagggggtcccgggggcgcggccggtcggcgcggcggcg

SEQ ID NO: 586 - DNA, 27 bp, Homo sapiens
cgagcgcgaagggcgttcggacccgcg

SEQ ID NO: 587 - DNA, 2 bp, Homo sapiens
cg

SEQ ID NO: 588 - DNA, 2 bp, Homo sapiens
cg

SEQ ID NO: 589 - DNA, 16 bp, Homo sapiens
cgcgaggcaggcgacg

SEQ ID NO: 590 - DNA, 53 bp, Homo sapiens
cgccgcaagagaagctgtcaagccccgcaggctctgattcggcgccctccgcg

SEQ ID NO: 591 - DNA, 4 bp, Homo sapiens
cgcg

SEQ ID NO: 592 - DNA, 2 bp, Homo sapiens
cg

SEQ ID NO: 593 - DNA, 2 bp, Homo sapiens
cg

SEQ ID NO: 594 - DNA, 2 bp, Homo sapiens
cg

SEQ ID NO: 595 - DNA, 14 bp, Homo sapiens
cgtaggtggacacg

SEQ ID NO: 596 - DNA, 186 bp, Homo sapiens
cgttatggagaaaattaatggaggaaaaattacagagtcacccgaaacagttgcgctgcttatcacccggtgtttgagcctgtttcccctgtaattagattacatgtgaggcagccccagctaattgtctgtgccacccaccggggaactccagctctatctgtgaacacccaggccttcccgccg

SEQ ID NO: 597 - DNA, 79 bp, Homo sapiens
cgcgtactttctccaccccgacacccactgccactcccacagcggagcgaggggccccgccgagggcgagcgtaccccg

SEQ ID NO: 598 - DNA, 49 bp, Homo sapiens
cgcgggggcgtctcccgttgcctgcagggagcgcggcgcggacgcggcg

SEQ ID NO: 599 - DNA, 17 bp, Homo sapiens
cgcgaacggttcatccg

SEQ ID NO: 600 - DNA, 2 bp, Homo sapiens
cg

SEQ ID NO: 601 - DNA, 9 bp, Homo sapiens
cgtggcccg

SEQ ID NO: 602 - DNA, 2 bp, Homo sapiens
cg

SEQ ID NO: 603 - DNA, 165 bp, Homo sapiens
cggggtctggtaggaagtgcagtgtatctcccagctttagggtaactaggacagcatgaatcttttaccttgtggtagaataaacggctagcgcctcgatgtggcgcgctcgacttttcctcacagagcctaaaagtcacgctcaaccaaactgcagcgttcccg

SEQ ID NO: 604 - DNA, 14 bp, Homo sapiens
cgctgacccgcgcg

SEQ ID NO: 605 - DNA, 2 bp, Homo sapiens
cg

SEQ ID NO: 606 - DNA, 2 bp, Homo sapiens
cg

SEQ ID NO: 607 - DNA, 97 bp, Homo sapiens
cgccccgcacgcccgcacgcccagcggggcccgcattgagcatgggcgcggcggccgtgcgctggcacttgtgcgtgctgctggccctgggcacacg

SEQ ID NO: 608 - DNA, 2 bp, Homo sapiens
cg

SEQ ID NO: 609 - DNA, 98 bp, Homo sapiens
cgaggttcagtttctggttttaaggaataaattcgctggcttgaaagggagctacggcagaagtttaggggcagagcggcgggagcgcgcgatccgcg

SEQ ID NO: 610 - DNA, 69 bp, Homo sapiens
cgcggaaggcccgcgcgccctgcgccgccgccgctcagtgccgccgccagcacctcctccgcccctccg

SEQ ID NO: 611 - DNA, 2 bp, Homo sapiens
cg

SEQ ID NO: 612 - DNA, 2 bp, Homo sapiens
cg

SEQ ID NO: 613 - DNA, 2 bp, Homo sapiens
cg

SEQ ID NO: 614 - DNA, 2 bp, Homo sapiens
cg

SEQ ID NO: 615 - DNA, 103 bp, Homo sapiens
cgcgcccgccgcccccggaggagcgggctggccgaccgccaccgcgccgtcccccggccgcccccgaagccgctccatcgcggtccctgccgtcctggggccg

SEQ ID NO: 616 - DNA, 2 bp, Homo sapiens
cg

SEQ ID NO: 617 - DNA, 21 bp, Homo sapiens
cgccgccgccgccgagagccg

SEQ ID NO: 618 - DNA, 148 bp, Homo sapiens
cgcgcgggcgcgaggggttgggacgcgggagcctcttgagtgcggagcgcggagccctggtgtcccggcgcactgcagccacactcccgggccgcgcgctcccgccgcctcttacccgcgccgcagggtcctcccctttgaggcgccg

SEQ ID NO: 619 - DNA, 2 bp, Homo sapiens
cg

SEQ ID NO: 620 - DNA, 2 bp, Homo sapiens
cg

SEQ ID NO: 621 - DNA, 26 bp, Homo sapiens
cggccatcacgcgctgcctctcggcg

SEQ ID NO: 622 - DNA, 119 bp, Homo sapiens
cgctcgatgatgaggatgcacttctcgcaggtgcagtccttgaagcggcagtaacgcttgtggcccttgagccaggacaggacgccatggttgcggcagcgcgcgcacttgggcgtgcg

SEQ ID NO: 623 - DNA, 66 bp, Homo sapiens
cgcctcaccttgctgaggccgctttcggcttcctctgacccaggctgggcgggaaaggtcgggccg

SEQ ID NO: 624 - DNA, 60 bp, Homo sapiens
cgcggctggggcctcgcgcctcctggagcgccttctgcccagacacgacgacttcgctcg

SEQ ID NO: 625 - DNA, 2 bp, Homo sapiens
cg

SEQ ID NO: 626 - DNA, 124 bp, Homo sapiens
cggcggcaggagaagcccaaggcccgagcggcccgcagcccccacgcctgcacccctccacccccgccagcccgatggttcgctccgcggcgtgcactggagcaagcaggtcccgctccgagcg

SEQ ID NO: 627 - DNA, 2 bp, Homo sapiens
cg

SEQ ID NO: 628 - DNA, 156 bp, Homo sapiens
cgcctcggcctccaccgtcgcgcccttacaggtcaccaggtgccgctcgcccagaatgtcaaccatggcgcagacacgcagccacctgagacccgaggacacctgcaggaggatgatcacctgcggggaggcggcggcgagcgccgcggtgccccg

SEQ ID NO: 629 - DNA, 2 bp, Homo sapiens
cg

SEQ ID NO: 630 - DNA, 91 bp, Homo sapiens
cgcttcaggaatgactcggtgacatcggtcgatgaccttctccacagcctgtcggtgagcggcggcggaggcaaggtttcggcggcgcgcg

SEQ ID NO: 631 - DNA, 2 bp, Homo sapiens
cg

SEQ ID NO: 632 - DNA, 2 bp, Homo sapiens
cg

SEQ ID NO: 633 - DNA, 89 bp, Homo sapiens
cgccgagctgcaggcgcgcgcctaaccgctttgctgggctcacgcggtctgagaggtcggagcgcccaactgctggcacgcgagtaacg

SEQ ID NO: 634 - DNA, 13 bp, Homo sapiens
cggattaaagacg

SEQ ID NO: 635 - DNA, 2 bp, Homo sapiens
cg

SEQ ID NO: 636 - DNA, 47 bp, Homo sapiens
cgcgatgtggcctcgcctggccttttgttgctggggtctggcgctcg

SEQ ID NO: 637 - DNA, 2 bp, Homo sapiens
cg

SEQ ID NO: 638 - DNA, 2 bp, Homo sapiens
cg

SEQ ID NO: 639 - DNA, 159 bp, Homo sapiens
cgcctcccgccgaggcgcaggggcagctacattgcggggcgcctgggcgacggcgccaaagccagggtcacaagggcacgggacaagcggggcggggggagcaggagactaggacagaggtcggcgcccgccgcgggcgctttcacgccgcgggcatcg

SEQ ID NO: 640 - DNA, 2 bp, Homo sapiens
cg

SEQ ID NO: 641 - DNA, 2 bp, Homo sapiens
cg

SEQ ID NO: 642 - DNA, 2 bp, Homo sapiens
cg

SEQ ID NO: 643 - DNA, 78 bp, Homo sapiens
cggccgcttctccgacgcccgcggctccccactgcgccgaggcgagcgccacggctaaagcccaagcctcggcgcccg

SEQ ID NO: 644 - DNA, 2 bp, Homo sapiens
cg

SEQ ID NO: 645 - DNA, 48 bp, Homo sapiens
cgcgccaactcggtcgctgtgcacggtcgggtgcgaaactcctccgcg

SEQ ID NO: 646 - DNA, 2 bp, Homo sapiens
cg

SEQ ID NO: 647 - DNA, 2 bp, Homo sapiens
cg

SEQ ID NO: 648 - DNA, 2 bp, Homo sapiens
cg

SEQ ID NO: 649 - DNA, 157 bp, Homo sapiens
cgtgttcaactggcatttgccaccaacatgtctgtttttatttaaatggcccagagcaaggctctgactaaactagcattcccacgccaacactcagcagcgcctctggtttttggcagattttttccttagctgtcaaagcaaaactatagaagcg

SEQ ID NO: 650 - DNA, 2 bp, Homo sapiens
cg

SEQ ID NO: 651 - DNA, 82 bp, Homo sapiens
cgcacccgcggggagggcggcgagcggggatcagccgaagtcgggagaggggcgcttccacggggcgggaaactggcgcgcg

SEQ ID NO: 652 - DNA, 23 bp, Homo sapiens
cggccaggtgaggcggccaggcg

SEQ ID NO: 653 - DNA, 38 bp, Homo sapiens
cgaactcgcaaagctgctcgtagacgcgcgggaactcg

SEQ ID NO: 654 - DNA, 2 bp, Homo sapiens
cc

SEQ ID NO: 655 - DNA, 165 bp, Homo sapiens
cgcgggctgcccagcgtgccagaccctttccccctggacgtgcgcaagctgctggtggccggcaaccgcatccagcggatccccgaggacttcttcatcttctacggcgacctggtctacctggacttcaggaacaactcgctgcgctcgctggaggagggcacg

SEQ ID NO: 656 - DNA, 2 bp, Homo sapiens
cg

SEQ ID NO: 657 - DNA, 2 bp, Homo sapiens
cg

SEQ ID NO: 658 - DNA, 2 bp, Homo sapiens
cg

SEQ ID NO: 659 - DNA, 23 bp, Homo sapiens
cgacaggcggcccccggacaccg

SEQ ID NO: 660 - DNA, 2 bp, Homo sapiens
cg

SEQ ID NO: 661 - DNA, 66 bp, Homo sapiens
cggcgccttcggggctgctgcgcgcccgcgcctagagctgccgccccagggagcccgccacggccg

SEQ ID NO: 662 - DNA, 43 bp, Homo sapiens
cgggcgcgcagcccgcccgcgcggcctggactctttttgttcg

SEQ ID NO: 663 - DNA, 2 bp, Homo sapiens
cg

SEQ ID NO: 664 - DNA, 62 bp, Homo sapiens
cgcgctgcacgaggatggccacgaggcgcagctggagccgtcgccgccgccgcatctgggcg

SEQ ID NO: 665 - DNA, 2 bp, Homo sapiens
cg

SEQ ID NO: 666 - DNA, 138 bp, Homo sapiens
cgctctcgggcgcacggaaactacttgtcaggaaattttcaacgctcctcctcgcccacttttttccactcctttcctggcgcgccccctcccctcccagaggcacgcagtggagcttttggagtttcgaatctttcg

SEQ ID NO: 667 - DNA, 2 bp, Homo sapiens
cg

SEQ ID NO: 668 - DNA, 2 bp, Homo sapiens
cg

SEQ ID NO: 669 - DNA, 2 bp, Homo sapiens
cg

SEQ ID NO: 670 - DNA, 2 bp, Homo sapiens
cg

SEQ ID NO: 671 - DNA, 187 bp, Homo sapiens
cgagcggtcctaactccgtcccgctcgctgttgctgttgctggtgctgctccggctgcagctgctgccgctccacgacctcggggcgctgaggcaacagggccccctccctctactccccatcccccccggctcctccacagaagcgccgtttccagtaactcctcgtgtacctcccacttctgccg

SEQ ID NO: 672 - DNA, 2 bp, Homo sapiens
cg

SEQ ID NO: 673 - DNA, 2 bp, Homo sapiens
cg

SEQ ID NO: 674 - DNA, 110 bp, Homo sapiens
cgcaggtcaagatctggttccagaatcatcgctacaagctgaagcgcgctcgcgctccaggggcggcggagtcgcctgacctggcagcatccgccgagctgcacgccgcg

SEQ ID NO: 675 - DNA, 4 bp, Homo sapiens
cgcg

SEQ ID NO: 676 - DNA, 189 bp, Homo sapiens
cgtgcccccgctcgcgcctgggccccgccgcactccagcagaagccattacagagaacaaactaccttcttgtctccgagatgggtccccggggaggaaggcaaattgcctgcctcgtgcataataagccaggcgtggagagcagcgcggaggaggccgcggcagccaccgagcgggcagagcctcccg

SEQ ID NO: 677 - DNA, 42 bp, Homo sapiens
cgcgagtgcactcaagcgccctcgttccacccaccttcagcg

SEQ ID NO: 678 - DNA, 33 bp, Homo sapiens
cgtggagcgcaaagtgcctgaagcccccgcgcg

SEQ ID NO: 679 - DNA, 15 bp, Homo sapiens
cgttcggctggcgcg

SEQ ID NO: 680 - DNA, 51 bp, Homo sapiens
cgcccaccacggcgatctgcggcagctccagcaggcagctctgtcccagcg

SEQ ID NO: 681 - DNA, 2 bp, Homo sapiens
cg

SEQ ID NO: 682 - DNA, 268 bp, Homo sapiens
cgaagatgggaaacggccgcttgctgagagggggcatttgcagtcctcccagaaaaggctggggcaggagagcgtgcggccagaggggtgggggtaccggagggggggtctcacctcctgctctatagccgggtctctcccgcgaggcgctgggaagcatgaggcatgcagcattcaaaatgttttttgaaaaagacggacttgaagcttttttttacaaacacgccattgtactcacttcttattcagagacgggctgcgcgctccg

SEQ ID NO: 683 - DNA, 2 bp, Homo sapiens
cg

SEQ ID NO: 684 - DNA, 33 bp, Homo sapiens
cggtgatcggtctgactgctcctgggggctccg

SEQ ID NO: 685 - DNA, 23 bp, Homo sapiens
cgaaagtctcgggctagtgggcg

SEQ ID NO: 686 - DNA, 40 bp, Homo sapiens
cgaggcacctggtcgggcggggaggcgtcgggtcggggcg

SEQ ID NO: 687 - DNA, 10 bp, Homo sapiens
cggagccgcg

SEQ ID NO: 688 - DNA, 181 bp, Homo sapiens
cgaaaacgaaatccacccccttgcgcccatttctgccagaggtttgcaggacgtgtctcaacctggcatcccgagtccagaacaaaagccacgggggctgcggcatgggcagggggaaggcgcgcggtggctgacgcggggcaggggccctggcgagcgcgggaggggcggtcagcagccg

SEQ ID NO: 689 - DNA, 195 bp, Homo sapiens
cgtcaagcagcaggactacagcgccagcgtctggcttcggaggaaagacaagctggagcacgtaagggcgactcgctcccgggggcctcggccaggcacctgccgcatgcaccctccccgtggtggtggcatgagcgcgcgcggggcgcggggggcaggcgaggggatcctggcaggcgccgacgtcctaggtcg

SEQ ID NO: 690 - DNA, 2 bp, Homo sapiens
cg

SEQ ID NO: 691 - DNA, 358 bp, Homo sapiens
cgcgagctcgggtgagagccaccggaatgcgggaacgcagcttagccgggaacagggttcccgacaggggtcgcccgtggccaggacgcggccgctgaacagaggtcgcgcggcggttcctgcccgagggacctcgtgggcgggggccacacggaggccgcgcacggtccccggggctggcgggggcaggtgggaggacctcctccgggcccgcgaacctgatctggcagcggccaggtgcctggaagcgtttttaaatgatagggttacaaagacatgttggccaggtttgtagttagcgcagcaacgtggtttgcaggagcgcagaacgaggctagacagggtcactcggacgccg

SEQ ID NO: 692 - DNA, 13 bp, Homo sapiens
cgccacaactgcg

SEQ ID NO: 693 - DNA, 2 bp, Homo sapiens
cg

SEQ ID NO: 694 - DNA, 2 bp, Homo sapiens
cg

SEQ ID NO: 695 - DNA, 95 bp, Homo sapiens
cgggcactcgggacgaggcgagggcgcagaaaacttggagcccaatcagcacggagttgagcttccgcgccccaaccttcaggtgaccccgcgcg

SEQ ID NO: 696 - DNA, 45 bp, Homo sapiens
cgccgagagggcaggacgcgcacggtgcgctccaacctgctgccg

SEQ ID NO: 697 - DNA, 104 bp, Homo sapiens
cgcgagccagggggaggcgcgtcggaaagcgagagtgacaagcagcctacaagccgaaaagttcctcgcgggaggcgcgcgccgcgtgggctccgactcagccg

SEQ ID NO: 698 - DNA, 87 bp, Homo sapiens
cgggagggtggcggaaggtggtgcaccgcagcgtggtccccgccgctgccgccgcggctttgcaaagtgtcagcgggggcgaaagcg

SEQ ID NO: 699 - DNA, 62 bp, Homo sapiens
cgacactgaacaacaaccgcggggaggagaggccacttgcagccgaggctcgcaaactgtcg

SEQ ID NO: 700 - DNA, 2 bp, Homo sapiens
cg

SEQ ID NO: 701 - DNA, 2 bp, Homo sapiens
cg

SEQ ID NO: 702 - DNA, 2 bp, Homo sapiens
cg

SEQ ID NO: 703 - DNA, 2 bp, Homo sapiens
cg

SEQ ID NO: 704 - DNA, 2 bp, Homo sapiens
cg

SEQ ID NO: 705 - DNA, 2 bp, Homo sapiens
cg

SEQ ID NO: 706 - DNA, 2 bp, Homo sapiens
cg

SEQ ID NO: 707 - DNA, 2 bp, Homo sapiens
cg

SEQ ID NO: 708 - DNA, 145 bp, Homo sapiens
cgggaatcgcaggagaggattggggctccaggtggacggtgctgactgcactggctttgaagactggaagtgggtgcaggaggaacctgcgacagctgagaccagggcgcgcgggcagatgcgccaggtcgccagcaaaccggcg

SEQ ID NO: 709 - DNA, 2 bp, Homo sapiens
cg

SEQ ID NO: 710 - DNA, 19 bp, Homo sapiens
cggctcctggcggtgggcg

SEQ ID NO: 711 - DNA, 35 bp, Homo sapiens
cggaggctccgctaatggggccgccgccgccgccg

SEQ ID NO: 712 - DNA, 2 bp, Homo sapiens
cg

SEQ ID NO: 713 - DNA, 2 bp, Homo sapiens
cg

SEQ ID NO: 714 - DNA, 36 bp, Homo sapiens
cggctctcctgcagccagcggaccagcgccagctcg

SEQ ID NO: 715 - DNA, 2 bp, Homo sapiens
cg

SEQ ID NO: 716 - DNA, 42 bp, Homo sapiens
cgtacaatggcaaatgggattaggcaggcgaaggctcagccg

SEQ ID NO: 717 - DNA, 2 bp, Homo sapiens
cg

SEQ ID NO: 718 - DNA, 2 bp, Homo sapiens
cg

SEQ ID NO: 719 - DNA, 18 bp, Homo sapiens
cggcgcgggcgctgcgcg

SEQ ID NO: 720 - DNA, 2 bp, Homo sapiens
cg

SEQ ID NO: 721 - DNA, 2 bp, Homo sapiens
cg

SEQ ID NO: 722 - DNA, 2 bp, Homo sapiens
cg

SEQ ID NO: 723 - DNA, 118 bp, Homo sapiens
cgcgtcgctgttctgcctcaggccccggtgcggccccaagtcccagcccagggcccttaggtccctccaggcggcggtggcggcactcacctgggtcgcggagccggggtctggcacg

SEQ ID NO: 724 - DNA, 22 bp, Homo sapiens
cgtccgcgccgcccgcggttcg

SEQ ID NO: 725 - DNA, 2 bp, Homo sapiens
cg

SEQ ID NO: 726 - DNA, 2 bp, Homo sapiens
cg

SEQ ID NO: 727 - DNA, 2 bp, Homo sapiens
cg

SEQ ID NO: 728 - DNA, 2 bp, Homo sapiens
cg

SEQ ID NO: 729 - DNA, 31 bp, Homo sapiens
cgtaacacatctcagcaccgagctcttgtcg

SEQ ID NO: 730 - DNA, 2 bp, Homo sapiens
cg

SEQ ID NO: 731 - DNA, 2 bp, Homo sapiens
cg

SEQ ID NO: 732 - DNA, 2 bp, Homo sapiens
cg

SEQ ID NO: 733 - DNA, 2 bp, Homo sapiens
cg

SEQ ID NO: 734 - DNA, 2 bp, Homo sapiens
cg

SEQ ID NO: 735 - DNA, 2 bp, Homo sapiens
cg

SEQ ID NO: 736 - DNA, 2 bp, Homo sapiens
cg

SEQ ID NO: 737 - DNA, 2 bp, Homo sapiens
cg

SEQ ID NO: 738 - DNA, 2 bp, Homo sapiens
cg

SEQ ID NO: 739 - DNA, 69 bp, Homo sapiens
cgccccccggcccgccctccccgagcgccgccgacacgccagccaaacggccgctggccgcccctagcg

SEQ ID NO: 740 - DNA, 415 bp, Homo sapiens
cgcacgggttgggcttgggaatggggaccgcgaggcttcagcatcccgatgccctgaaagtctccccgcctcggggatttgtctctgtgttgcagctggcaggggccgcctgaagtgggagcagcgcctggagaaggcgggaggagcccggcccgggggacgggcggcgggatagcgggaccccggcggcgcggtgcgcttcagggcgcagcggcggccgcagaccgagccccgggcgcggcaagaggcggcgggagccggtggcggctcggcatcatgcgtcgagggcgtctgctggagatcgccctgggatttaccgtgcttttagcgtcctacacgagccatggggcggacgccaatttggaggctgggaacgtgaaggaaaccagagccagtcgggccaagagaagaggcg

SEQ ID NO: 741 - DNA, 2 bp, Homo sapiens
cg

SEQ ID NO: 742 - DNA, 2 bp, Homo sapiens
cg

SEQ ID NO: 743 - DNA, 2 bp, Homo sapiens
cg

SEQ ID NO: 744 - DNA, 2 bp, Homo sapiens
cg

SEQ ID NO: 745 - DNA, 2 bp, Homo sapiens
cg

SEQ ID NO: 746 - DNA, 62 bp, Homo sapiens
cgtgcgcatttcaagcgcgtgcgggagtgtgcgaggcgctgtgcgagctagcggcgggcgcg

SEQ ID NO: 747 - DNA, 2 bp, Homo sapiens
cg

SEQ ID NO: 748 - DNA, 2 bp, Homo sapiens
cg

SEQ ID NO: 749 - DNA, 2 bp, Homo sapiens
cg

SEQ ID NO: 750 - DNA, 2 bp, Homo sapiens
cg

SEQ ID NO: 751 - DNA, 20 bp, Homo sapiens
cggaggcttttgcgtttgcg

SEQ ID NO: 752 - DNA, 69 bp, Homo sapiens
cgctgcgcttcctcgcttgctggcgtctttgccttagcgggactcggcagccaggggccccagggggcg

SEQ ID NO: 753 - DNA, 2 bp, Homo sapiens
cg

SEQ ID NO: 754 - DNA, 318 bp, Homo sapiens
cgagacgcggcagactcccagagcggctcacccactcatcgaagcggattctgggcggtttcgggctgacccgcgctgtcagggcgcggactccattccgggcgcattgttaggagaaggggcccctcggggcggcgcgcctcgaccctgggctcccggtgcccgcagagggcggagatccgcggcgccctaggccacctatccgcatcttctcgagccaaacccccagcgcttacccggacccgacggcccaagcactgactcccaggcaagagtcgcccttcctggtccccagggaactgacactaccgcgggacg

SEQ ID NO: 755 - DNA, 27 bp, Homo sapiens
cgcgcctccgctcggggagccaccacg

SEQ ID NO: 756 - DNA, 2 bp, Homo sapiens
cg

SEQ ID NO: 757 - DNA, 13 bp, Homo sapiens
cgcggggagctcg

SEQ ID NO: 758 - DNA, 189 bp, Homo sapiens
cgcaatctccagccaaagtcaccgcgggcggactatggcttagggcgccagaggggttagaggtacgggaagaggaaaagacggctaactgggaaaaaaagagaaaacgaaagaaaagccaaacgatgagtttccacaaggaggacggagtgaacagtctgtgccagaaggctctgcacatcgtcaccg

SEQ ID NO: 759 - DNA, 2 bp, Homo sapiens
cg

SEQ ID NO: 760 - DNA, 2 bp, Homo sapiens
cg

SEQ ID NO: 761 - DNA, 13 bp, Homo sapiens
cgctcagcccccg

SEQ ID NO: 762 - DNA, 51 bp, Homo sapiens
cgaaggcgaggccgcccagcccgcaccccaccccacgcacggcacacgccg

SEQ ID NO: 763 - DNA, 289 bp, Homo sapiens
cggcagtgtccttttaagaaggggcaaaaaaatctgtttatggccaccctccttccgctttaccttttctcctcttgacagtttcggccctggctgcccgagtcgggggtgtgttttcggtccctctcagatctgggcggggggcgggaggagtgagcgacctgggaagtcccgggggtggagagggggcgctccggggtctgggggcgacgtggacaccttctttggagcacggcggtgcgtttgggatttgaaggaagggccgaaggaagcggggtgcgggcgggcg

SEQ ID NO: 764 - DNA, 2 bp, Homo sapiens
cg

SEQ ID NO: 765 - DNA, 165 bp, Homo sapiens
cgctctgggaagcgcagaggcgggggtgctgctcgcgctggggagcacgtgaggggacactcagggactgcccgcgcgaatggcttccaacgcatgcgccccaccccacatttcacagtcgccatgacgaccgggaggtccgcaacggctgcggggacaagtccg

SEQ ID NO: 766 - DNA, 21 bp, Homo sapiens
cgaagtggtgcaggggcggcg

SEQ ID NO: 767 - DNA, 2 bp, Homo sapiens
cg

SEQ ID NO: 768 - DNA, 2 bp, Homo sapiens
cg

SEQ ID NO: 769 - DNA, 2 bp, Homo sapiens
cg

SEQ ID NO: 770 - DNA, 159 bp, Homo sapiens
cgtgctcgtggatgcgcagcgccacgcggctgtccaccatccagcgatacacgcggcccacggagaaggtgaggccgcagcgggccgacttgccgcggcccaggcggtcgccgccggcgctgctcatgttgtagagggacagtgcggccagcgcagccg

SEQ ID NO: 771 - DNA, 2 bp, Homo sapiens
cg

SEQ ID NO: 772 - DNA, 129 bp, Homo sapiens
cgtgcgcccgagtggggcacttgcccgaggtcggggactgtgaaccgaaagattccatctagccctgctgtcctcctggtattgcgatttgggggcgggtcactttacctctctgaattccgccccccg

SEQ ID NO: 773 - DNA, 2 bp, Homo sapiens
cg

SEQ ID NO: 774 - DNA, 120 bp, Homo sapiens
cgccttctccttctttttttttttttttttttttttttttttttttttttttttttggtaccatagagttgctctgaaaacagaagatagagggagtctcggagctcgccatctccagcg

SEQ ID NO: 775 - DNA, 2 bp, Homo sapiens
cg

SEQ ID NO: 776 - DNA, 171 bp, Homo sapiens
cgctcggctgctgcacctgttagtgctgggcccaggttgagaggcgacctccagcccccacaataatgtcccgggctctctggtttgggtcctcgcagcgcccgattgaccgccagcgatacgacgagaacgaggacttgtcggacgtggaggagatcgtcagcgtccgcg

SEQ ID NO: 777 - DNA, 2 bp, Homo sapiens
cg

SEQ ID NO: 778 - DNA, 2 bp, Homo sapiens
cg

SEQ ID NO: 779 - DNA, 2 bp, Homo sapiens
cg

SEQ ID NO: 780 - DNA, 64 bp, Homo sapiens
cggggaaagctgggcgcgcgagccgaggctgctgctcacctgcagccgcgccgctcacctgccg

SEQ ID NO: 781 - DNA, 2 bp, Homo sapiens
cg

SEQ ID NO: 782 - DNA, 2 bp, Homo sapiens
cg

SEQ ID NO: 783 - DNA, 2 bp, Homo sapiens
cg

SEQ ID NO: 784 - DNA, 2 bp, Homo sapiens
cg

SEQ ID NO: 785 - DNA, 16 bp, Homo sapiens
cgagccctgcggagcg

SEQ ID NO: 786 - DNA, 2 bp, Homo sapiens
cg

SEQ ID NO: 787 - DNA, 2 bp, Homo sapiens
cg

SEQ ID NO: 788 - DNA, 2 bp, Homo sapiens
cg

SEQ ID NO: 789 - DNA, 18 bp, Homo sapiens
cgcggccgagggaatgcg

SEQ ID NO: 790 - DNA, 118 bp, Homo sapiens
cgcgcctctgttcctgggtagactcccccatctgtgcattttggccccttcacttagcaaagagatgtgcgaagtgtgcgcctggagacgagccgcctcggtgacccccatccgcccg

SEQ ID NO: 791 - DNA, 2 bp, Homo sapiens
cg

SEQ ID NO: 792 - DNA, 2 bp, Homo sapiens
cg

SEQ ID NO: 793 - DNA, 2 bp, Homo sapiens
cg

SEQ ID NO: 794 - DNA, 2 bp, Homo sapiens
cg

SEQ ID NO: 795 - DNA, 2 bp, Homo sapiens
cg

SEQ ID NO: 796 - DNA, 22 bp, Homo sapiens
cggactcctctggggcggcgcg

SEQ ID NO: 797 - DNA, 112 bp, Homo sapiens
cgaggcagggaggcgctcccgcagctcctgactttacaacccgcgcgcgtgtgcaccgagccgcgggcacaccgcgaacacacacacacacacacacactcgtgcgctcccg

SEQ ID NO: 798 - DNA, 109 bp, Homo sapiens
cgtggaggagtggggccaggtggtcatcatcagcatgctcacccgctacgcccgcacgcagttcctgagccccacccagaacgtaagtgggcccagcccaggcagagcg

SEQ ID NO: 799 - DNA, 2 bp, Homo sapiens
cg

SEQ ID NO: 800 - DNA, 2 bp, Homo sapiens
cg

SEQ ID NO: 801 - DNA, 2 bp, Homo sapiens
cg

SEQ ID NO: 802 - DNA, 431 bp, Homo sapiens
cgtgtcctttcataggtctcatttgtaattgagacgaatgattacagtggggcgggaaggagcagctgctcattaattaatttctaattaaaagtgcctctcgttctcgggtgactaaagagaaacaccgttcgctgggcgatattgactcggatggaatttatttgctaacgcccggaggaatggcccctccgtccaccgcgcggccgggactgtcctggcccctcccggcctgagccgccggcgagtgaccggcgagtctgcggccaggccgggctgcgcgaggtggggctgacgtcagagcctcctccgcttcaagccgcgcacatctgacttgacgggttcgcgcgactcgtttttttttttttctttttcgtaaaatatgtatttctgtcgccgctgcgaggccgctcggtcccagagccccctcg

SEQ ID NO: 803 - DNA, 2 bp, Homo sapiens
cg

SEQ ID NO: 804 - DNA, 40 bp, Homo sapiens
cgtccccatctctccagcggagctacagcggggcgcggcg

SEQ ID NO: 805 - DNA, 2 bp, Homo sapiens
cg

SEQ ID NO: 806 - DNA, 22 bp, Homo sapiens
cgtggccctgaacctgctggcg

SEQ ID NO: 807 - DNA, 2 bp, Homo sapiens
cg

SEQ ID NO: 808 - DNA, 47 bp, Homo sapiens
cgagctggagaaccacagcatgtactgcgtgcaatgcaagatgcccg

SEQ ID NO: 809 - DNA, 24 bp, Homo sapiens
cgtgccagaagtcccccaacggcg

SEQ ID NO: 810 - DNA, 2 bp, Homo sapiens
cg

SEQ ID NO: 811 - DNA, 45 bp, Homo sapiens
cgagggcctcagccaattagcttgctgggtgggcctggagtcccg

SEQ ID NO: 812 - DNA, 2 bp, Homo sapiens
cg

SEQ ID NO: 813 - DNA, 258 bp, Homo sapiens
cgcgcacttgtccaggcgctgcggctcagcgcgccccaacctccagctcgggcggagagcgggggcgggactgaagcaccgtgttcctcaaagtatcctctcgccgtcggcagccctggcctcgcaaatgctccagcgcgctcaggcgcacgcagagactggcgcggcagcctccgggccaacggcacgcgagcaaagctggttggcgacctgggacacgcagtagaagttgaggctgcaccgactcccgccgcttcg

SEQ ID NO: 814 - DNA, 45 bp, Homo sapiens
cgcgaccgcaagcccgagcccaggtccctcggagccgccagggcg

SEQ ID NO: 815 - DNA, 7 bp, Homo sapiens
cgccgcg

SEQ ID NO: 816 - DNA, 4 bp, Homo sapiens
cgcg

SEQ ID NO: 817 - DNA, 67 bp, Homo sapiens
cgaggccgccccgctggttggtgcaagaaccagcctgcaacccaagtcctgagctgttggcgccccg

SEQ ID NO: 818 - DNA, 43 bp, Homo sapiens
cgctcgagtcctcgctgctgccgctgccgctgcgggtcagccg

SEQ ID NO: 819 - DNA, 2 bp, Homo sapiens
cg

SEQ ID NO: 820 - DNA, 2 bp, Homo sapiens
cg

SEQ ID NO: 821 - DNA, 113 bp, Homo sapiens
cgcccgagattcgggagagattaggggcccgcaaagcagaagagcagattcagaaagaaaaaaaaaaaagcgagaagtgcgagaaaaatatactgaattcagctaaacacacg

SEQ ID NO: 822 - DNA, 4 bp, Homo sapiens
cgcg

SEQ ID NO: 823 - DNA, 2 bp, Homo sapiens
cg

SEQ ID NO: 824 - DNA, 84 bp, Homo sapiens
cgggctctggggcgctggtgtccgcgcagccccagtcgcttccgcagccaccgccgctcggctccgcggaggcggcgcgcagcg

SEQ ID NO: 825 - DNA, 2 bp, Homo sapiens
cg

SEQ ID NO: 826 - DNA, 48 bp, Homo sapiens
cgcaggtcaagatctggttccagaaccaccgctacaagatgaagcgcg

SEQ ID NO: 827 - DNA, 228 bp, Homo sapiens
cgccgccaccacgccgcgcgccgtactccgcgtcaagaatggggcggccaagctgcccaagccgcccgccgccgccgccgccgccgcggccgaggcgcccggcgccggcgcgggcatggagcgctcgcagagccgcctcagtctgtccgcctccttcgaggcgctcgccatctacttcccgtgcatgaactccttcgacgacgaggacgcaggtaagcgcgcggcccg

SEQ ID NO: 828 - DNA, 47 bp, Homo sapiens
cgctggtgcgtggcggcgtggagcgcgcttgttacggccaaggtgcg

SEQ ID NO: 829 - DNA, 185 bp, Homo sapiens
cgccgcccctcggtccagagcccccacccccggcctgtgagcctgcggcgctggtggagcccggctccaggaagaggagctcacccggtcccccctgattggacagcagcgaggtcccaccgggcgcctccgcggcttaaaaccgaagcgggggcgagggggaggtagagcccgccccctgcgcg

SEQ ID NO: 830 - DNA, 216 bp, Homo sapiens
cggcgttccactcactggcgcccacggcccgcaggcaaagcgtggaaggagctgaacgcggcggagaagcggcccttcgtggaggaagccgaacggctgcgcgtgcagcacttgcgcgaccaccccaactacaagtaccggccgcgccgcaagaagcaggcgcgcaaggcccggcggctggagcccggcctcctgctcccgggattagcgcccccg

SEQ ID NO: 831 - DNA, 344 bp, Homo sapiens
cgaataatagaaattgttaattttaacaatccagagcaggccaacgaggctttgctctcccgacccgaactaaaggtccctcgctccgtgcgctgctacgagcggtgtctcctggggctccaatgcagcgagctgtgcccgaggggttcggaaggcgcaagctgggcagcgacatggggaacgcggagcgggctccggggtctcggagctttgggccagtacccacgctgctgctgctcgccgcggcgctactggccgtgtcggacgcactcgggcgcccctccgaggaggacgaggagctagtggtgccggagctggagcgcgccccgggacacgggaccacg

SEQ ID NO: 832 - DNA, 28 bp, Homo sapiens
cgtctcggcctggctgccaaacagaacg

SEQ ID NO: 833 - DNA, 124 bp, Homo sapiens
cggcgcgcacggccaaggcacgcgcgctggcacacgcgggcgcggacacgcgcggacacacacgtgcgggacacgccctcccccgacggcggcgctaacctctcggtaagtccagcgccccacg

SEQ ID NO: 834 - DNA, 80 bp, Homo sapiens
cgaggtgcaggcggcgcgggcgctcaccgtgagcgccgtgctgctggcgttcgttgcgctcttcgtgaccctggcgggcg

SEQ ID NO: 835 - DNA, 62 bp, Homo sapiens
cgaggcgtggaggggcagccgcggcggggcgacccttacctgctcactgcggggcctgtccg

SEQ ID NO: 836 - DNA, 165 bp, Homo sapiens
cgccacctgaccccgccaccaagcctaaggtgtcctggatccacggcaagcacagcgccgctgcagctggccgtgcgccctcaccaccgccgccaggctccgaggccgcgcccagccccagcaagaggaaacggacgcccagcgacaaatcggcgcatacggtcg

SEQ ID NO: 837 - DNA, 43 bp, Homo sapiens
cgcgctccgaggaagcgccggaaccaccagaagcacagggacg

SEQ ID NO: 838 - DNA, 86 bp, Homo sapiens
cgccacctccaaccagctgcaagccgagctgcccacctgggaccgggccggcccggcgggcttggctcccggcgaaggcggcggcg

SEQ ID NO: 839 - DNA, 23 bp, Homo sapiens
cgcccccttatcccacgggctcg

SEQ ID NO: 840 - DNA, 2 bp, Homo sapiens
cg

SEQ ID NO: 841 - DNA, 99 bp, Homo sapiens
cggcaggagcagctcacagccaggagcgctctcccgcccccaacgccgcgctcccccctccaaaacggtttaaaaaaatccaccaattgcatggccgcg

SEQ ID NO: 842 - DNA, 73 bp, Homo sapiens
cgaccatttctgtgcttctaggagcccaccctgggcggcagggaggcgttgcgtggggctcacgagttccacg

SEQ ID NO: 843 - DNA, 2 bp, Homo sapiens
cg

SEQ ID NO: 844 - DNA, 52 bp, Homo sapiens
cgctcccaggacccccgcccgctctctcctgactcggtccctgcccgccccg

SEQ ID NO: 845 - DNA, 50 bp, Homo sapiens
cgcagccgccgcgtccgcacctgaccatggagtgcgccctcctgctcgcg

SEQ ID NO: 846 - DNA, 50 bp, Homo sapiens
cgaacgcagagtccacacgtggattcccgcgcctgtgatgccccgacccg

SEQ ID NO: 847 - DNA, 2 bp, Homo sapiens
cg

SEQ ID NO: 848 - DNA, 2 bp, Homo sapiens
cg

SEQ ID NO: 849 - DNA, 52 bp, Homo sapiens
cgcctggggcccacgcgagccgcgagcccctgcctgctcctgcgctaccccg

SEQ ID NO: 850 - DNA, 2 bp, Homo sapiens
cg

SEQ ID NO: 851 - DNA, 2 bp, Homo sapiens
cg

SEQ ID NO: 852 - DNA, 2 bp, Homo sapiens
cg

SEQ ID NO: 853 - DNA, 138 bp, Homo sapiens
cgcggcgcctctagctgcccctcactcgtctcgcccgccagtctccctcccgcgcgatggcctcggcgctgagctatgtctccaagttcaagtccttcgtgatcttgttcgtcaccccgctcctgctgctgccactcg

SEQ ID NO: 854 - DNA, 2 bp, Homo sapiens
cg

SEQ ID NO: 855 - DNA, 2 bp, Homo sapiens
cg

SEQ ID NO: 856 - DNA, 2 bp, Homo sapiens
cg

SEQ ID NO: 857 - DNA, 1017 bp, Artificial Sequence
  Description of Artificial Sequence: Synthetic polynucleotide
yggygatttyggttttygtaaggtggggyggygagtaggagtyggggttaggttaggggttygagttttygttygaggggyggggaaggygggtgaygtgagtygggtygggygggyggagttgggatyggtttygggaggygggggygagygygyggagaggtagaygygaggagggaggyggttgagtagygygggyggttttgyggygggygyggtgggygygggyggyggggtttygggattttygygygtttttttygygyggygtygtygtygygygtttttaygtttygygttttayggygttttygtttygygygtttttygtgttygttttttgttagttttygggtygyggtygtttgtagagygagygtttagayggagttttygggtaatttgagtggygtygatyggyggyggagtttttggtagagtttttygattyggtagygyggaggggattygygttygttygygtygygttattttaaattttaagtagygtygttttatyggygyggagtttyggttggaggtaagagtygygygtygggagataygtatygtgagyggtagygtygtyggttttttttttygtygtttyggagggygaagtygyggttttttagttttttgttgygtygygatagygtyggaataygtttygtttygttgtygttttygttgtgtygtyggyggagggggtygygagtttygygtttyggtyggaggatgtgygttttygygggtygtttagtttgagttatgygttttaayggyggyggygygtyggtyggtatggagtttygygyggtygygttttgattygttgtgygtttygyggtyggygggyggygggaggyggyggatygagagtyggagatyggygtygygggayggaagygagygggygygggygtygygtagatggtttgggygagttaggtttgaggtttygtttttygaaaygtgattatgtggatttaatagtttttaggatttaggtgagyg

SEQ ID NO: 858 - DNA, 166 bp, Artificial Sequence
  Description of Artificial Sequence: Synthetic polynucleotide
ygttyggagygygggyggggttagtttgggtagtygygggtygttgttgygtyggaagttttygtygttagggagttttttgggygttaggttttgggtttttgggygaagtygaygttagaatatgtttggtttygtatttagtttatygtatttttagygygyg

SEQ ID NO: 859 - DNA, 2 bp, Artificial Sequence
  Description of Artificial Sequence: Synthetic oligonucleotide
yg

SEQ ID NO: 860 - DNA, 2 bp, Artificial Sequence
  Description of Artificial Sequence: Synthetic oligonucleotide
yg

SEQ ID NO: 861 - DNA, 2 bp, Artificial Sequence
  Description of Artificial Sequence: Synthetic oligonucleotide
yg

SEQ ID NO: 862 - DNA, 2 bp, Artificial Sequence
  Description of Artificial Sequence: Synthetic oligonucleotide
yg

SEQ ID NO: 863 - DNA, 2 bp, Artificial Sequence
  Description of Artificial Sequence: Synthetic oligonucleotide
yg

SEQ ID NO: 864 - DNA, 2 bp, Artificial Sequence
  Description of Artificial Sequence: Synthetic oligonucleotide
yg

SEQ ID NO: 865 - DNA, 14 bp, Artificial Sequence
  Description of Artificial Sequence: Synthetic oligonucleotide
ygygttttagygyg

SEQ ID NO: 866 - DNA, 2 bp, Artificial Sequence
  Description of Artificial Sequence: Synthetic oligonucleotide
yg

SEQ ID NO: 867 - DNA, 2 bp, Artificial Sequence
  Description of Artificial Sequence: Synthetic oligonucleotide
yg

SEQ ID NO: 868 - DNA, 2 bp, Artificial Sequence
  Description of Artificial Sequence: Synthetic oligonucleotide
yg

SEQ ID NO: 869 - DNA, 125 bp, Artificial Sequence
  Description of Artificial Sequence: Synthetic polynucleotide
yggttttatttatttgtttygaagagtggttttagttttgygtttttttttgygattttatatatagggatagttttaggtatagttttagtagtaggagtatggyggggygagggygygggayg

SEQ ID NO: 870 - DNA, 2 bp, Artificial Sequence
  Description of Artificial Sequence: Synthetic oligonucleotide
yg

SEQ ID NO: 871 - DNA, 131 bp, Artificial Sequence
  Description of Artificial Sequence: Synthetic polynucleotide
yggggtgtgaagtggyggygggtagaggggttygtaggggttgggattygygtgtttttttttgtttyggtgyggagtaygatgtgttygggygggggygaggaygttygggaggggttgggttgygtayg

SEQ ID NO: 872 - DNA, 94 bp, Artificial Sequence
  Description of Artificial Sequence: Synthetic oligonucleotide
ygggtttgttttyggtttygttyggagggtgtgygggttttygtttygttggtttygtttgtttattayggygygtttaaatttaygyggttyg

SEQ ID NO: 873 - DNA, 2 bp, Artificial Sequence
  Description of Artificial Sequence: Synthetic oligonucleotide
yg

SEQ ID NO: 874 - DNA, 2 bp, Artificial Sequence
  Description of Artificial Sequence: Synthetic oligonucleotide
yg

SEQ ID NO: 875 - DNA, 27 bp, Artificial Sequence
  Description of Artificial Sequence: Synthetic oligonucleotide
ygygatggggaggggaatatttgygyg

SEQ ID NO: 876 - DNA, 164 bp, Artificial Sequence
  Description of Artificial Sequence: Synthetic polynucleotide
ygagattagaggggaaattygaaaaagtaagtttttgyggtagtagttaggaaatattygttaggaattggttgygattttaattttagyggttygaagttttagtttttttatttttatygyggtagagtygttttygtagatatttttygaggagaatygyg

SEQ ID NO: 877 - DNA, 2 bp, Artificial Sequence
  Description of Artificial Sequence: Synthetic oligonucleotide
yg

SEQ ID NO: 878 - DNA, 2 bp, Artificial Sequence
  Description of Artificial Sequence: Synthetic oligonucleotide
yg

SEQ ID NO: 879 - DNA, 68 bp, Artificial Sequence
  Description of Artificial Sequence: Synthetic oligonucleotide
ygttgggttygtygaggtyggggtttttttatgggagggaggtggttgyggyggaatttttagatgyg

SEQ ID NO: 880 - DNA, 508 bp, Artificial Sequence
  Description of Artificial Sequence: Synthetic polynucleotide
yggyggtagygggagttygagygttgygygtttattatggtygtttagggagagttyggttatttggyggygtagtyggatttyggttttaatagygagygtagtatygattttttagtgttyggtttygaggaygatttggtygtyggggygattttgtatagttyggagtggagygaggagygttttygygtggataggaagaaatttgaggttatgttataaggtaggtatttttygtgttttyggatttttygattgagtttttaattttttttyggatatttttatygygygtttyggygttygttattttagtttayggtyggtyggtttagttttaggttygttttttygyggagtyggaggatatttagggattggagatttygygggattttttatttttttaygttttttagatttttaggygttgggggttttgtgygaatttgattggttttagaaaagtygaaggtygagtttgtattggygygtttaagttgyg

SEQ ID NO: 881 - DNA, 2 bp, Artificial Sequence
  Description of Artificial Sequence: Synthetic oligonucleotide
yg

SEQ ID NO: 882 - DNA, 2 bp, Artificial Sequence
  Description of Artificial Sequence: Synthetic oligonucleotide
yg

SEQ ID NO: 883 - DNA, 2 bp, Artificial Sequence
  Description of Artificial Sequence: Synthetic oligonucleotide
yg

SEQ ID NO: 884 - DNA, 2 bp, Artificial Sequence
  Description of Artificial Sequence: Synthetic oligonucleotide
yg

SEQ ID NO: 885 - DNA, 4 bp, Artificial Sequence
  Description of Artificial Sequence: Synthetic oligonucleotide
ygyg

SEQ ID NO: 886 - DNA, 2 bp, Artificial Sequence
  Description of Artificial Sequence: Synthetic oligonucleotide
yg

SEQ ID NO: 887 - DNA, 2 bp, Artificial Sequence
  Description of Artificial Sequence: Synthetic oligonucleotide
yg

SEQ ID NO: 888 - DNA, 9 bp, Artificial Sequence
  Description of Artificial Sequence: Synthetic oligonucleotide
ygtgtagyg

SEQ ID NO: 889 - DNA, 2 bp, Artificial Sequence
  Description of Artificial Sequence: Synthetic oligonucleotide
yg

SEQ ID NO: 890 - DNA, 2 bp, Artificial Sequence
  Description of Artificial Sequence: Synthetic oligonucleotide
yg

SEQ ID NO: 891 - DNA, 396 bp, Artificial Sequence
  Description of Artificial Sequence: Synthetic polynucleotide
tgaggaygaggaggaagaggaggaggaagaagaagaagaggaagaggaggaggaggaggaggaggaygygtttaggttgagatggttygygtggatattgttatttattttaagattgttgttttygtygtygtygtygtygtygttgttgtygtygtygtygtygttattatttgttatagttagtaaygggtagtyggygtaggggttygggggagtttttttygtygttagygttattttaaatatttattaatagttatattgttgttattgttgtygtygtygtygtygtygtggagygygggaggggggyggggaggygtttgggttyggggygttgtgygygatttggyggggtgygtygagatatatatagygagtygtygtygttyg

SEQ ID NO: 892 - DNA, 2 bp, Artificial Sequence
  Description of Artificial Sequence: Synthetic oligonucleotide
yg

SEQ ID NO: 893 - DNA, 70 bp, Artificial Sequence
  Description of Artificial Sequence: Synthetic oligonucleotide
ygggtygttatttgtttatttgttttatttaggatatttttttaaataatttttaagtggaaaaattayg

SEQ ID NO: 894 - DNA, 2 bp, Artificial Sequence
  Description of Artificial Sequence: Synthetic oligonucleotide
yg

SEQ ID NO: 895 - DNA, 68 bp, Artificial Sequence
  Description of Artificial Sequence: Synthetic oligonucleotide
ygygggggaygyggggygyggygygttgagygygggtgtygaggttggagggygyggtygggttttyg

SEQ ID NO: 896 - DNA, 88 bp, Artificial Sequence
  Description of Artificial Sequence: Synthetic oligonucleotide
ygagggtyggttygtttttggggattygyggatgtygygagggggygtygygttattgaaggttgggaygggggyggtgygyggggyg

SEQ ID NO: 897 - DNA, 2 bp, Artificial Sequence
  Description of Artificial Sequence: Synthetic oligonucleotide
yg

SEQ ID NO: 898 - DNA, 2 bp, Artificial Sequence
  Description of Artificial Sequence: Synthetic oligonucleotide
yg

SEQ ID NO: 899 - DNA, 87 bp, Artificial Sequence
  Description of Artificial Sequence: Synthetic oligonucleotide
ygagttgtttygtttttttattttgggggygaagaagggtyggggagtgggggaaagygggaggygtygyggtttgggaggttttyg

SEQ ID NO: 900 - DNA, 45 bp, Artificial Sequence
  Description of Artificial Sequence: Synthetic oligonucleotide
ygagtttttgygttgtttttgtygtyggagttygggtttgttayg

SEQ ID NO: 901 - DNA, 2 bp, Artificial Sequence
  Description of Artificial Sequence: Synthetic oligonucleotide
yg

SEQ ID NO: 902 - DNA, 173 bp, Artificial Sequence
  Description of Artificial Sequence: Synthetic polynucleotide
yggttggaatttttttaagtattgttttgagtttatttttaaatgaaagggggaaaaatttaaattagattagaatttgaaatagttgaaatagttatygatttttagtttgtttttaagtttggtagagattgtgaaagttttaattttttygygatgttagttayggttyg

SEQ ID NO: 903 - DNA, 2 bp, Artificial Sequence
  Description of Artificial Sequence: Synthetic oligonucleotide
yg

SEQ ID NO: 904 - DNA, 48 bp, Artificial Sequence
  Description of Artificial Sequence: Synthetic oligonucleotide
ygaagaygagaygtagagttttaattgtagttagagataaaggtttyg

SEQ ID NO: 905 - DNA, 2 bp, Artificial Sequence
  Description of Artificial Sequence: Synthetic oligonucleotide
yg

SEQ ID NO: 906 - DNA, 2 bp, Artificial Sequence
  Description of Artificial Sequence: Synthetic oligonucleotide
yg

SEQ ID NO: 907 - DNA, 36 bp, Artificial Sequence
  Description of Artificial Sequence: Synthetic oligonucleotide
ygatygtggygttagtttttygttttttttgtttyg

SEQ ID NO: 908 - DNA, 2 bp, Artificial Sequence
  Description of Artificial Sequence: Synthetic oligonucleotide
yg

SEQ ID NO: 909 - DNA, 2 bp, Artificial Sequence
  Description of Artificial Sequence: Synthetic oligonucleotide
yg

SEQ ID NO: 910 - DNA, 2 bp, Artificial Sequence
  Description of Artificial Sequence: Synthetic oligonucleotide
yg

SEQ ID NO: 911 - DNA, 2 bp, Artificial Sequence
  Description of Artificial Sequence: Synthetic oligonucleotide
yg

SEQ ID NO: 912 - DNA, 2 bp, Artificial Sequence
  Description of Artificial Sequence: Synthetic oligonucleotide
yg

SEQ ID NO: 913 - DNA, 97 bp, Artificial Sequence
  Description of Artificial Sequence: Synthetic oligonucleotide
ygtttgtaaggaygggagtyggggagggtgtagggygagtttaaaggaygggtagagtaagtttygggaagaggtaggggttttttttttygggtyg

SEQ ID NO: 914 - DNA, 2 bp, Artificial Sequence
  Description of Artificial Sequence: Synthetic oligonucleotide
yg

SEQ ID NO: 915 - DNA, 2 bp, Artificial Sequence
  Description of Artificial Sequence: Synthetic oligonucleotide
yg

SEQ ID NO: 916 - DNA, 67 bp, Artificial Sequence
  Description of Artificial Sequence: Synthetic oligonucleotide
ygttagatttttatagttttttataygttatttttattgttttagggaattataagtataggtatyg

SEQ ID NO: 917 - DNA, 2 bp, Artificial Sequence
  Description of Artificial Sequence: Synthetic oligonucleotide
yg

SEQ ID NO: 918 - DNA, 29 bp, Artificial Sequence
  Description of Artificial Sequence: Synthetic oligonucleotide
ygatagggtagagggttagtagttattyg

SEQ ID NO: 919 - DNA, 49 bp, Artificial Sequence
  Description of Artificial Sequence: Synthetic oligonucleotide
yggtygagtttaagtggttgaagygyggaygaggatgygyggggtttyg

SEQ ID NO: 920 - DNA, 188 bp, Artificial Sequence
  Description of Artificial Sequence: Synthetic polynucleotide
ygggagttygaagtygtttygagygggggtgggyggtgagyggattttygggtgttgattaggtgtttggtggtagagtagggaaggggggaayggaygtygattttagggattttttattygtttaygttttttggygttggttataygtygtygttttagtattaattggaggtttttagtggayg

SEQ ID NO: 921 - DNA, 4 bp, Artificial Sequence
  Description of Artificial Sequence: Synthetic oligonucleotide
ygyg

SEQ ID NO: 922 - DNA, 4 bp, Artificial Sequence
  Description of Artificial Sequence: Synthetic oligonucleotide
ygyg

SEQ ID NO: 923 - DNA, 113 bp, Artificial Sequence
  Description of Artificial Sequence: Synthetic polynucleotide
yggtygtgggyggttgyggygyggtygyggygaggggygagyggggttggtttygtygttygggygagagtatttttttgggggttaattttgyggtttygtttttattygyg

SEQ ID NO: 924 - DNA, 208 bp, Artificial Sequence
  Description of Artificial Sequence: Synthetic polynucleotide
yggyggatggagaygggagggaggttgygaggtygttygaggagagattaaggttttagaaayggagaagygggygttttgygggaggyggyggygttgtygttggtygttaagggygggaagtgttttgggatttttattaggggtygygagtttygagygttaaattttygyggygttygtttagygygttgttgtggygggygyg

SEQ ID NO: 925 - DNA, 96 bp, Artificial Sequence
  Description of Artificial Sequence: Synthetic oligonucleotide
yggttygttygttttttagtagttttggggtgttyggggyggttttgtaagygggagagagyggygaggyggyggygtygagtgyggggggatgyg

SEQ ID NO: 926 - DNA, 236 bp, Artificial Sequence
  Description of Artificial Sequence: Synthetic polynucleotide
yggtgagtattygtygtggggaagggttttggggatttattggaggtygyggttygtagtagttaggggtygagttayggttayggaygttttggtgtttyggttygtgtygggtttttaggyggaggaggygttygttgggtttagattttygattttagtttyggtttttyggygtttgggttgygyggagtttttgtttygygtttyggatttttaygygtagtttttaygyg

SEQ ID NO: 927 - DNA, 211 bp, Artificial Sequence
  Description of Artificial Sequence: Synthetic polynucleotide
ygtttttagtygtgttttggttgygtagttggaaaggttgagtagtttattgttgtttttttgttyggttttggatatatygtttgaatttttgggygtttttgttgttaagtgggggatagtattatttattggggaggaaaattttaggaatgtggattttggggttaygtaggggttgggaagtgaagggtagggaaygygggyggyg

SEQ ID NO: 928 - DNA, 193 bp, Artificial Sequence
  Description of Artificial Sequence: Synthetic polynucleotide
ygygygtygaagttgtgayggtttattaagtagagatttgygaggtatatagagagggaatgaggyggaatygttygggggttygttgatattgtagagtttttygtagtatygttgttttaaatttygtttttttaggygtgygygtatagygagttagaggaggtttygtttygatttggggtttttygyg

SEQ ID NO: 929 - DNA, 4 bp, Artificial Sequence
  Description of Artificial Sequence: Synthetic oligonucleotide
ygyg

SEQ ID NO: 930 - DNA, 199 bp, Artificial Sequence
  Description of Artificial Sequence: Synthetic polynucleotide
ygagtaggaggatttaaygaatttagtttgtggatatgttttaatttttattttygttttttttaggtttgtttaggtgaggatgatgggagggaaaagyggtgtatagtygtaatattggtattttgtaagagtygtyggggtattgatatagagggatatygtattggagatgyggtgtttayggagatttattgyg

SEQ ID NO: 931 - DNA, 87 bp, Artificial Sequence
  Description of Artificial Sequence: Synthetic oligonucleotide
yggttagtagaggyggygtttggttttggatgttgtagyggagaygttaaggagattgaatgtagggagygaggygtagyggtygyg

SEQ ID NO: 932 - DNA, 68 bp, Artificial Sequence
  Description of Artificial Sequence: Synthetic oligonucleotide
ygygygagagtgtttagttgggaaatgtagtttygaattaatatygtatgttttataattagtttayg

SEQ ID NO: 933 - DNA, 61 bp, Artificial Sequence
  Description of Artificial Sequence: Synthetic oligonucleotide
ygtttttggtatttagggaatggtttgtaaattttaatgtattatagattagtttttatyg

SEQ ID NO: 934 - DNA, 40 bp, Artificial Sequence
  Description of Artificial Sequence: Synthetic oligonucleotide
ygggtgttttgtygttgtygtttttgttgtygtygattyg

SEQ ID NO: 935 - DNA, 647 bp, Artificial Sequence
  Description of Artificial Sequence: Synthetic polynucleotide
ygagyggygaggygagggygagygygtygaggaagggygggagaggygyggagtttggtygygtygygttgygtygagygtygggtttttttygygagtttttygggttygygygygygttttttattgttttygtttttygygyggygygtgttttttatttttygtygygygttttygtattygttyggttttaygyggygygygtttgttttggyggtagyggyggyggyggyggygygttttttttygaaygtygtttttagggttgttggttgygttttttattgtttygyggttgttgttyggggtgggyggygaggygggggggaggtgtyggtttggtygtyggggagggtttatygttygggyggatttttattgygagagygatgygggtttaggygyggygygygggggttgtagggygtttagtattgggggttgtyggygygygggggtttttttttggtttttaggtattygttgttgttgggygtttttygtattttyggttattatggatatttygttttttygtygtttttttygygtatttygggaggtygtyggggyggtagtagyggygyggtttygygggtgtttaggtgatyggttyggtagyggtagagtagtggtagtagtyg

SEQ ID NO: 936 - DNA, 327 bp, Artificial Sequence
  Description of Artificial Sequence: Synthetic polynucleotide
ygyggaggagggtygggttgattgtygtygttgagttgttttyggaygggagygtttgtttayggtatttattttttttagyggtggaaatgtggagaagtaagtgggaggyggtgtygggaattgattttttttaaaayggtyggygtygttgttttgaaatgggyggttaagtgtttgtgggattaagggyggttttagagatgttyggaaaatygttgttayggttagagtgyggygtagaygyggtagagttggaggtgttygyggtgtaggttgttgtttaygtygtttaggttaggtgttgagggtttagttygygtttyg

SEQ ID NO: 937 - DNA, 2 bp, Artificial Sequence
  Description of Artificial Sequence: Synthetic oligonucleotide
yg

SEQ ID NO: 938 - DNA, 324 bp, Artificial Sequence
  Description of Artificial Sequence: Synthetic polynucleotide
ygtagttgttgtagtygttgyggttgtygttatttggtaggaggtatagggtatgggtgagggaggttgyggtagyggttaygagttgttgaggaagttagattgtaggtatttggggggygttaggtagtygtagtygtyggtttyggygttygttaygtygtattygtttgyggygttttyggtttygaagagttttttgtygggttggaagtgygygggyggyggtyggaagggtttttttatgyggyggyggygtyggtagttgtttttttygaatatgttttygtaggtygggtttagygtttagtagttgtttttgyg

SEQ ID NO: 939 - DNA, 77 bp, Artificial Sequence
  Description of Artificial Sequence: Synthetic oligonucleotide
yggygtagyggygggaattygaggtygagygtygyggyggtagygttagaagygtatttatygggtayggygaggyg

SEQ ID NO: 940 - DNA, 158 bp, Artificial Sequence
  Description of Artificial Sequence: Synthetic polynucleotide
ygttttggattttygaagttagttttttgygtagyggattagagaggtttattygyggaygttaatttaatttttgggyggggttygggggttgagtagaaggygaggtttggggagtayggataattttgagggttgtttgtgtyggggtgggagyg

SEQ ID NO: 941 - DNA, 79 bp, Artificial Sequence
  Description of Artificial Sequence: Synthetic oligonucleotide
ygtttttaaaaattaaataaattaataagagaattaattaataggtagygttgygatygttaggagygyggagygygyg

SEQ ID NO: 942 - DNA, 137 bp, Artificial Sequence
  Description of Artificial Sequence: Synthetic polynucleotide
ygttttttttgatttttaaggttagaaagatttattatttttttygagagggygtagttatagatttattagagagggygggtagggtgtyggaagttagagaayggygtttygygtttttttatygttttagggyg

SEQ ID NO: 943 - DNA, 112 bp, Artificial Sequence
  Description of Artificial Sequence: Synthetic polynucleotide
ygygggttatgtattgttgttggtgtttattatgtttaattttttggattataagtggtataaggagtygttgtagtagtgtaatttygatgggtygttgggtgtygtagyg

SEQ ID NO: 944 - DNA, 2 bp, Artificial Sequence
  Description of Artificial Sequence: Synthetic oligonucleotide
yg

SEQ ID NO: 945 - DNA, 2 bp, Artificial Sequence
  Description of Artificial Sequence: Synthetic oligonucleotide
yg

SEQ ID NO: 946 - DNA, 282 bp, Artificial Sequence
  Description of Artificial Sequence: Synthetic polynucleotide
ygtgggtagggygtygtagtttgygtagtttygaggatttygygtygttttttygagttagggtttttaggagygggtygygtaggagaygttagagggggttgttagyggttgttgggagaaygggttayggaaatagttttttttaaagtyggggttatygtggggtgggygagttygtttttttaggtygggggygyggattagaggggaygtgtgtagayggtygyggttagttttatttygttygggyggagaygtatagttggagttggagggtyg

SEQ ID NO: 947 - DNA, 81 bp, Artificial Sequence
  Description of Artificial Sequence: Synthetic oligonucleotide
yggttgttaattygtttaatttgttgygygggtggtygtttagagtygygggtttgyggggygtttttygtygtygygtyg

SEQ ID NO: 948 - DNA, 53 bp, Artificial Sequence
  Description of Artificial Sequence: Synthetic oligonucleotide
yggtygtggagattttaatygagtttaygttggygtaaaaggtaaaagtygyg

SEQ ID NO: 949 - DNA, 40 bp, Artificial Sequence
  Description of Artificial Sequence: Synthetic oligonucleotide
ygygtygagggggygttagyggggaygtgagttggygtyg

SEQ ID NO: 950 - DNA, 206 bp, Artificial Sequence
  Description of Artificial Sequence: Synthetic polynucleotide
yggtagtttgagygtttyggatggttygyggyggggyggtttgtaagagygaygygyggttgttgttggggygggaygygttgyggtyggygttygttttgttggttttygtygtgttgttgggygtygygttyggtttyggtttyggtttttggtttggttgtygygygggtygttagygtaygygatattaggtgggtyggtyg

SEQ ID NO: 951 - DNA, 38 bp, Artificial Sequence
  Description of Artificial Sequence: Synthetic oligonucleotide
ygagggtayggyggtygtygtttygygtagtagtagyg

SEQ ID NO: 952 - DNA, 5 bp, Artificial Sequence
  Description of Artificial Sequence: Synthetic oligonucleotide
yggyg

SEQ ID NO: 953 - DNA, 25 bp, Artificial Sequence
  Description of Artificial Sequence: Synthetic oligonucleotide
ygagygaatgtaaygygtatatayg

SEQ ID NO: 954 - DNA, 79 bp, Artificial Sequence
  Description of Artificial Sequence: Synthetic oligonucleotide
ygtttttttttttttttaaaaaaaaaatttaaataatttttaaataatatttaataggaaagaagaaggaaaaggagyg

SEQ ID NO: 955 - DNA, 33 bp, Artificial Sequence
  Description of Artificial Sequence: Synthetic oligonucleotide
ygagggtaayggtygaggygttaygyggggtyg

SEQ ID NO: 956 - DNA, 132 bp, Artificial Sequence
  Description of Artificial Sequence: Synthetic polynucleotide
ygtaggttaggyggtygtgggtygagttggttatgattattttttygygggygttttgtttgggygagtgtttttygtagygttygtatttygtttttttygtgtgtagtttygygtygtygtygttygtyg

SEQ ID NO: 957 - DNA, 32 bp, Artificial Sequence
  Description of Artificial Sequence: Synthetic oligonucleotide
ygttttyggggtagaggagggggtgttaggyg

SEQ ID NO: 958 - DNA, 2 bp, Artificial Sequence
  Description of Artificial Sequence: Synthetic oligonucleotide
yg

SEQ ID NO: 959 - DNA, 2 bp, Artificial Sequence
  Description of Artificial Sequence: Synthetic oligonucleotide
yg

SEQ ID NO: 960 - DNA, 20 bp, Artificial Sequence
  Description of Artificial Sequence: Synthetic oligonucleotide
yggygtygttggtatattyg

SEQ ID NO: 961 - DNA, 85 bp, Artificial Sequence
  Description of Artificial Sequence: Synthetic oligonucleotide
yggygggygtaggggtagggtatgattgaygygttttttgtttgygtttatgtgagagaaagyggtygagggagggagygtgtyg

SEQ ID NO: 962 - DNA, 230 bp, Artificial Sequence
  Description of Artificial Sequence: Synthetic polynucleotide
ygtaggggtygagaaagtggyggagaggyggtggtygaggtttaggggygagygygggttgagttggtttttgttgygtttaygagygatatttattttttygttgyggaygtttygygggygttaggttgggggttttgygatygatttttttygttttygaggtatygtygggttygtttggtaggtagygygtttygygagttggagggtygagtttygyggggtyg

SEQ ID NO: 963 - DNA, 84 bp, Artificial Sequence
  Description of Artificial Sequence: Synthetic oligonucleotide
ygtaagagttggttaaaatgtttttaggtgygtgggggtttyggggttttagttggagttygatattttgagattggyggttyg

SEQ ID NO: 964 - DNA, 42 bp, Artificial Sequence
  Description of Artificial Sequence: Synthetic oligonucleotide
ygygygagttttttygtttggttgagttaaaaagggatygyg

SEQ ID NO: 965 - DNA, 45 bp, Artificial Sequence
  Description of Artificial Sequence: Synthetic oligonucleotide
yggaygattttttttattttttygaggaygaggaggagtayggyg

SEQ ID NO: 966 - DNA, 26 bp, Artificial Sequence
  Description of Artificial Sequence: Synthetic oligonucleotide
ygygggataagggatgttggygggyg

SEQ ID NO: 967 - DNA, 50 bp, Artificial Sequence
  Description of Artificial Sequence: Synthetic oligonucleotide
ygaggtttttttygyggygygyggtagttttagtttttatttaaatttyg

SEQ ID NO: 968 - DNA, 56 bp, Artificial Sequence
  Description of Artificial Sequence: Synthetic oligonucleotide
ygttggtttattygygtgtaygtttattttttaygygygtttttggtttagaagyg

SEQ ID NO: 969 - DNA, 44 bp, Artificial Sequence
  Description of Artificial Sequence: Synthetic oligonucleotide
ygagygtgtgygygygygaggggagygygtgygyggtgaggayg

SEQ ID NO: 970 - DNA, 2 bp, Artificial Sequence
  Description of Artificial Sequence: Synthetic oligonucleotide
yg

SEQ ID NO: 971 - DNA, 9 bp, Artificial Sequence
  Description of Artificial Sequence: Synthetic oligonucleotide
yggaaggyg

SEQ ID NO: 972 - DNA, 58 bp, Artificial Sequence
  Description of Artificial Sequence: Synthetic oligonucleotide
ygttygtttattygttaggtaggyggtggtgtygatttatttgagtagttgtttygyg

SEQ ID NO: 973 - DNA, 151 bp, Artificial Sequence
  Description of Artificial Sequence: Synthetic polynucleotide
ygtattggtttttttygttttygttygtaygaaagttttgttygaygtttgtagttagtatygttygtattgtttagggagggtttgygtygagatttagtggtygagtgagttatagagtygttggttttggggaygttgttttttatyg

SEQ ID NO: 974 - DNA, 17 bp, Artificial Sequence
  Description of Artificial Sequence: Synthetic oligonucleotide
yggttttggggagttyg

SEQ ID NO: 975 - DNA, 70 bp, Artificial Sequence
  Description of Artificial Sequence: Synthetic oligonucleotide
ygtagaggggttagtaattttatgggtggtggggttttttatttttggaygtagyggggagtagygggyg

SEQ ID NO: 976 - DNA, 59 bp, Artificial Sequence
  Description of Artificial Sequence: Synthetic oligonucleotide
yggygtttagygtttaagygttaattygttgaaagttttttagygaaattttagggayg

SEQ ID NO: 977 - DNA, 25 bp, Artificial Sequence
  Description of Artificial Sequence: Synthetic oligonucleotide
yggttyggatagaggttatttagyg

SEQ ID NO: 978 - DNA, 57 bp, Artificial Sequence
  Description of Artificial Sequence: Synthetic oligonucleotide
ygtttttygttatttgatattagttaggtagtttttagggttagagygttagygtyg

SEQ ID NO: 979 - DNA, 111 bp, Artificial Sequence
  Description of Artificial Sequence: Synthetic polynucleotide
ygtttagggttggggttyggtgggaattttttygtgttygaagggaygatttygttagagagtttttygatttttgtatttatygtttttggtaggaygtggagttgttyg

SEQ ID NO: 980 - DNA, 211 bp, Artificial Sequence
  Description of Artificial Sequence: Synthetic polynucleotide
ygttattgtygtygttggygttttgtttttggaattttttagtaagatggtatttattgtttgttttttttygattagtatttttagtygygttttttttttttygggataygtattagttatatattgtggggagaagatgggttatgtaaatgtaagttaaygygtttttttagttatttttgtataatgtaataggaatagygattyg

SEQ ID NO: 981 - DNA, 75 bp, Artificial Sequence
  Description of Artificial Sequence: Synthetic oligonucleotide
ygtttttattatttttttaaatattgtagtaagttgtagtaaggygggtaaatatygatagygygygtgggggyg

SEQ ID NO: 982 - DNA, 2 bp, Artificial Sequence
  Description of Artificial Sequence: Synthetic oligonucleotide
yg

SEQ ID NO: 983 - DNA, 66 bp, Artificial Sequence
  Description of Artificial Sequence: Synthetic oligonucleotide
yggttatttgtttttygttttyggggygtygtttagtttygygttaggygttttttttagygttyg

SEQ ID NO: 984 - DNA, 2 bp, Artificial Sequence
  Description of Artificial Sequence: Synthetic oligonucleotide
yg

SEQ ID NO: 985 - DNA, 163 bp, Artificial Sequence
  Description of Artificial Sequence: Synthetic polynucleotide
ygygygtttttyggygggtyggygggttyggaagtttygttgttygggtygggtttttaagttygtagtygttttgattaaaataggtatygygayggyggyggtaggyggyggtagttagggttggggtygtatygygtaygygtatgygttygtygtttyg

SEQ ID NO: 986 - DNA, 99 bp, Artificial Sequence
  Description of Artificial Sequence: Synthetic oligonucleotide
ygtttttgttttggagygyggtygggagtaaaatygtaggagtgggagggtagygagttagttggatttygagtygyggagygygttggttttgtttyg

SEQ ID NO: 987 - DNA, 96 bp, Artificial Sequence
  Description of Artificial Sequence: Synthetic oligonucleotide
ygygttttygtaggyggtattgttygyggygyggygtgtgtatygagygagtgaaggtatgtgtggygggygyggttggagttgtygtygtygtyg

SEQ ID NO: 988 - DNA, 4 bp, Artificial Sequence
  Description of Artificial Sequence: Synthetic oligonucleotide
ygyg

SEQ ID NO: 989 - DNA, 16 bp, Artificial Sequence
  Description of Artificial Sequence: Synthetic oligonucleotide
yggygagattggtayg

SEQ ID NO: 990 - DNA, 2 bp, Artificial Sequence
  Description of Artificial Sequence: Synthetic oligonucleotide
yg

SEQ ID NO: 991 - DNA, 141 bp, Artificial Sequence
  Description of Artificial Sequence: Synthetic polynucleotide
ygyggttgatggttgaygygttgygyggttgygtgtttgttttttayggygtggtggagygygayggygaaagttatttgtagttgtaggatttgttygatggtttygayggattttgtgtgttygattgtaaaatgggyg

SEQ ID NO: 992 - DNA, 2 bp, Artificial Sequence
  Description of Artificial Sequence: Synthetic oligonucleotide
yg

SEQ ID NO: 993 - DNA, 37 bp, Artificial Sequence
  Description of Artificial Sequence: Synthetic oligonucleotide
ygtttttaattaatygtataaaattygtaatatttyg

SEQ ID NO: 994 - DNA, 52 bp, Artificial Sequence
  Description of Artificial Sequence: Synthetic oligonucleotide
ygggtyggggtatttggygttttgtgtgggtggygggagyggggaygtttyg

SEQ ID NO: 995 - DNA, 2 bp, Artificial Sequence
  Description of Artificial Sequence: Synthetic oligonucleotide
yg

SEQ ID NO: 996 - DNA, 7 bp, Artificial Sequence
  Description of Artificial Sequence: Synthetic oligonucleotide
yggagyg

SEQ ID NO: 997 - DNA, 2 bp, Artificial Sequence
  Description of Artificial Sequence: Synthetic oligonucleotide
yg

SEQ ID NO: 998 - DNA, 4 bp, Artificial Sequence
  Description of Artificial Sequence: Synthetic oligonucleotide
ygyg

SEQ ID NO: 999 - DNA, 17 bp, Artificial Sequence
  Description of Artificial Sequence: Synthetic oligonucleotide
ygagttggggygggayg

SEQ ID NO: 1000 - DNA, 136 bp, Artificial Sequence
  Description of Artificial Sequence: Synthetic polynucleotide
ygygagttttttgaygyggggattagttatgaatygggggtgtgtgtttgtttttagagatttggtaaggtgyggagttttttagaagtgyggttaagyggtagyggagayggygagttaggaattttttttygyg

SEQ ID NO: 1001 - DNA, 31 bp, Artificial Sequence
  Description of Artificial Sequence: Synthetic oligonucleotide
ygygtttagygtttygtttattttttggtyg

SEQ ID NO: 1002 - DNA, 25 bp, Artificial Sequence
  Description of Artificial Sequence: Synthetic oligonucleotide
ygtgtattttgaggtttggttggyg

SEQ ID NO: 1003 - DNA, 12 bp, Artificial Sequence
  Description of Artificial Sequence: Synthetic oligonucleotide
ygttgaygagyg

SEQ ID NO: 1004 - DNA, 6 bp, Artificial Sequence
  Description of Artificial Sequence: Synthetic oligonucleotide
ygtayg

SEQ ID NO: 1005 - DNA, 199 bp, Artificial Sequence
  Description of Artificial Sequence: Synthetic polynucleotide
ygygttygyggtygyggtygttgtatggygttgagatggygggggygtygygyggyggaggyggyggyggaggyggygygggygagttygggggygtygagygggyggtygggataagtygtyggygygggtttygggygtgygaygaggagttygtttgtttagagttggaggygttgtttygyggttataygttgyg

SEQ ID NO: 1006 - DNA, 91 bp, Artificial Sequence
  Description of Artificial Sequence: Synthetic oligonucleotide
yggtttygggtgtagggtggygggttyggyggygygygttttttttttttttttggyggttygtaygtgtygttygygtygygtttttayg

SEQ ID NO: 1007 - DNA, 108 bp, Artificial Sequence
  Description of Artificial Sequence: Synthetic polynucleotide
ygygtttttattgttttatttttttygtttttggagtttttyggtgattttattatagtttttgttattttgtgatttgtaggtattgggagatttatagggaggayg

SEQ ID NO: 1008 - DNA, 13 bp, Artificial Sequence
  Description of Artificial Sequence: Synthetic oligonucleotide
ygtatygatttyg

SEQ ID NO: 1009 - DNA, 176 bp, Artificial Sequence
  Description of Artificial Sequence: Synthetic polynucleotide
yggttygttgggtaaggygttygagaaagygtttggygggaggaggtgygyggttttttgttttaggyggttygggtgttygttttatgyggggygagygttyggtygattttygtyggggyggagtttgaggggtggttgatttatgtayggggattgttatttygtygttttyg

SEQ ID NO: 1010 - DNA, 2 bp, Artificial Sequence
  Description of Artificial Sequence: Synthetic oligonucleotide
yg

SEQ ID NO: 1011 - DNA, 157 bp, Artificial Sequence
  Description of Artificial Sequence: Synthetic polynucleotide
ygagaagtttygygggagayggyggtttttaaagttattttgggtygygggagygygggatyggggttgygggygtygagagygygtygtttgtygttttygtgygtygtygtygtttttgygygaygtttttyggttaggtttgggaaagygttyg

SEQ ID NO: 1012 - DNA, 66 bp, Artificial Sequence
  Description of Artificial Sequence: Synthetic oligonucleotide
ygygaatygttaggggttttygygttttttttttatttaggttttttgtttttttygtygyggtyg

SEQ ID NO: 1013 - DNA, 498 bp, Artificial Sequence
  Description of Artificial Sequence: Synthetic polynucleotide
ygtygtygygtygatyggtygygttttygggattttttgggtyggtygygttttyggttttttttttygtygygtttgtgygtaygygtagaygtygtaagttttaygagttgtaygyggtyggygtttygtttttttygtygttyggttaygttttygygttygagtygtygyggttyggaagyggaagyggaagyggtttyggtttygtttttgygygttygttyggtttygyggtygayggttttatygatttgagtaagaagtygyggygttygtttttyggagtttyggtatyggygttggtygattattaygagtgtayggtttgtygygtgagtttttatagtttygaggtttatttggygtataagaagtattygtgtttygttgygttatygttyggygygttyggtttgttygtygtygtttgtttttattgtttttygaayggttyggtgygyggggatttgttggagtattttygtttggygtayg

SEQ ID NO: 1014 - DNA, 27 bp, Artificial Sequence
  Description of Artificial Sequence: Synthetic oligonucleotide
ygygggttygaaygtttttygygtttg

SEQ ID NO: 1015 - DNA, 2 bp, Artificial Sequence
  Description of Artificial Sequence: Synthetic oligonucleotide
yg

SEQ ID NO: 1016 - DNA, 2 bp, Artificial Sequence
  Description of Artificial Sequence: Synthetic oligonucleotide
yg

SEQ ID NO: 1017 - DNA, 16 bp, Artificial Sequence
  Description of Artificial Sequence: Synthetic oligonucleotide
ygtygtttgtttygyg

SEQ ID NO: 1018 - DNA, 53 bp, Artificial Sequence
  Description of Artificial Sequence: Synthetic oligonucleotide
ygyggagggygtygaattagagtttgyggggtttgatagttttttttgyggyg

SEQ ID NO: 1019 - DNA, 4 bp, Artificial Sequence
  Description of Artificial Sequence: Synthetic oligonucleotide
ygyg

SEQ ID NO: 1020 - DNA, 2 bp, Artificial Sequence
  Description of Artificial Sequence: Synthetic oligonucleotide
yg

SEQ ID NO: 1021 - DNA, 2 bp, Artificial Sequence
  Description of Artificial Sequence: Synthetic oligonucleotide
yg

SEQ ID NO: 1022 - DNA, 2 bp, Artificial Sequence
  Description of Artificial Sequence: Synthetic oligonucleotide
yg

SEQ ID NO: 1023 - DNA, 14 bp, Artificial Sequence
  Description of Artificial Sequence: Synthetic oligonucleotide
ygtgtttatttayg

SEQ ID NO: 1024 - DNA, 186 bp, Artificial Sequence
  Description of Artificial Sequence: Synthetic polynucleotide
yggygggaaggtttgggtgtttatagatagagttggagtttttyggtgggtggtatagataattagttggggttgttttatatgtaatttaattataggggaaataggtttaaatatygggtgataagtagygtaattgtttygggtgattttgtaattttttttttattaattttttttataayg

SEQ ID NO: 1025 - DNA, 79 bp, Artificial Sequence
  Description of Artificial Sequence: Synthetic oligonucleotide
yggggtaygttygttttyggyggggtttttygtttygttgtgggagtggtagtgggtgtyggggtggagaaagtaygyg

SEQ ID NO: 1026 - DNA, 49 bp, Artificial Sequence
  Description of Artificial Sequence: Synthetic oligonucleotide
ygtygygttygygtygygttttttgtaggtaaygggagaygttttygyg

SEQ ID NO: 1027 - DNA, 17 bp, Artificial Sequence
  Description of Artificial Sequence: Synthetic oligonucleotide
yggatgaatygttygyg

SEQ ID NO: 1028 - DNA, 2 bp, Artificial Sequence
  Description of Artificial Sequence: Synthetic oligonucleotide
yg

SEQ ID NO: 1029 - DNA, 9 bp, Artificial Sequence
  Description of Artificial Sequence: Synthetic oligonucleotide
ygggttayg

SEQ ID NO: 1030 - DNA, 2 bp, Artificial Sequence
  Description of Artificial Sequence: Synthetic oligonucleotide
yg

SEQ ID NO: 1031 - DNA, 165 bp, Artificial Sequence
  Description of Artificial Sequence: Synthetic polynucleotide
ygggaaygttgtagtttggttgagygtgatttttaggttttgtgaggaaaagtygagygygttatatygaggygttagtygtttattttattataaggtaaaagatttatgttgttttagttattttaaagttgggagatatattgtattttttattagatttyg

SEQ ID NO: 1032 - DNA, 14 bp, Artificial Sequence
  Description of Artificial Sequence: Synthetic oligonucleotide
ygygygggttagyg

SEQ ID NO: 1033 - DNA, 2 bp, Artificial Sequence
  Description of Artificial Sequence: Synthetic oligonucleotide
yg

SEQ ID NO: 1034 - DNA, 2 bp, Artificial Sequence
  Description of Artificial Sequence: Synthetic oligonucleotide
yg

SEQ ID NO: 1035 - DNA, 97 bp, Artificial Sequence
  Description of Artificial Sequence: Synthetic oligonucleotide
ygtgtgtttagggttagtagtaygtataagtgttagygtayggtygtygygtttatgtttaatgygggtttygttgggygtgygggygtgyggggyg

SEQ ID NO: 1036 - DNA, 2 bp, Artificial Sequence
  Description of Artificial Sequence: Synthetic oligonucleotide
yg

SEQ ID NO: 1037 - DNA, 98 bp, Artificial Sequence
  Description of Artificial Sequence: Synthetic oligonucleotide
ygyggatygygygttttygtygttttgtttttaaatttttgtygtagtttttttttaagttagygaatttattttttaaaattagaaattgaatttyg

SEQ ID NO: 1038 - DNA, 69 bp, Artificial Sequence
  Description of Artificial Sequence: Synthetic oligonucleotide
yggaggggyggaggaggtgttggyggyggtattgagyggyggyggygtagggygygygggtttttygyg

SEQ ID NO: 1039 - DNA, 2 bp, Artificial Sequence
  Description of Artificial Sequence: Synthetic oligonucleotide
yg

SEQ ID NO: 1040 - DNA, 2 bp, Artificial Sequence
  Description of Artificial Sequence: Synthetic oligonucleotide
yg

SEQ ID NO: 1041 - DNA, 2 bp, Artificial Sequence
  Description of Artificial Sequence: Synthetic oligonucleotide
yg

SEQ ID NO: 1042 - DNA, 2 bp, Artificial Sequence
  Description of Artificial Sequence: Synthetic oligonucleotide
yg

SEQ ID NO: 1043 - DNA, 103 bp, Artificial Sequence
  Description of Artificial Sequence: Synthetic polynucleotide
yggttttaggayggtagggatygygatggagyggtttygggggyggtygggggayggygyggtggyggtyggttagttygttttttygggggyggygggygyg

SEQ ID NO: 1044 - DNA, 2 bp, Artificial Sequence
  Description of Artificial Sequence: Synthetic oligonucleotide
yg

SEQ ID NO: 1045 - DNA, 21 bp, Artificial Sequence
  Description of Artificial Sequence: Synthetic oligonucleotide
yggtttttggyggyggyggyg

SEQ ID NO: 1046 - DNA, 148 bp, Artificial Sequence
  Description of Artificial Sequence: Synthetic polynucleotide
yggygttttaaaggggaggattttgyggygygggtaagaggyggygggagygygyggttygggagtgtggttgtagtgygtygggatattagggtttygygtttygtatttaagaggttttygygttttaatttttygygttygygyg

SEQ ID NO: 1047 - DNA, 2 bp, Artificial Sequence
  Description of Artificial Sequence: Synthetic oligonucleotide
yg

SEQ ID NO: 1048 - DNA, 2 bp, Artificial Sequence
  Description of Artificial Sequence: Synthetic oligonucleotide
yg

SEQ ID NO: 1049 - DNA, 26 bp, Artificial Sequence
  Description of Artificial Sequence: Synthetic oligonucleotide
ygtygagaggtagygygtgatggtyg

SEQ ID NO: 1050 - DNA, 119 bp, Artificial Sequence
  Description of Artificial Sequence: Synthetic polynucleotide
ygtaygtttaagtgygygygttgtygtaattatggygttttgttttggtttaagggttataagygttattgtygttttaaggattgtatttgygagaagtgtatttttattatygagyg

SEQ ID NO: 1051 - DNA, 66 bp, Artificial Sequence
  Description of Artificial Sequence: Synthetic oligonucleotide
yggttygatttttttygtttagtttgggttagaggaagtygaaagyggttttagtaaggtgaggyg

SEQ ID NO: 1052 - DNA, 60 bp, Artificial Sequence
  Description of Artificial Sequence: Synthetic oligonucleotide
ygagygaagtygtygtgtttgggtagaaggygttttaggaggygygaggttttagtygyg

SEQ ID NO: 1053 - DNA, 2 bp, Artificial Sequence
  Description of Artificial Sequence: Synthetic oligonucleotide
yg

SEQ ID NO: 1054 - DNA, 124 bp, Artificial Sequence
  Description of Artificial Sequence: Synthetic polynucleotide
ygttyggagygggatttgtttgttttagtgtaygtygyggagygaattatygggttggygggggtggaggggtgtaggygtgggggttgygggtygttygggttttgggttttttttgtygtyg

SEQ ID NO: 1055 - DNA, 2 bp, Artificial Sequence
  Description of Artificial Sequence: Synthetic oligonucleotide
yg

SEQ ID NO: 1056 - DNA, 156 bp, Artificial Sequence
  Description of Artificial Sequence: Synthetic polynucleotide
yggggtatygyggygttygtygtygttttttygtaggtgattatttttttgtaggtgttttygggttttaggtggttgygtgtttgygttatggttgatattttgggygagyggtatttggtgatttgtaagggygygayggtggaggtygaggyg

SEQ ID NO: 1057 - DNA, 2 bp, Artificial Sequence
  Description of Artificial Sequence: Synthetic oligonucleotide
yg

SEQ ID NO: 1058 - DNA, 91 bp, Artificial Sequence
  Description of Artificial Sequence: Synthetic oligonucleotide
ygygygtygtygaaattttgttttygtygtygtttatygataggttgtggagaaggttatygatygatgttatygagttatttttgaagyg

SEQ ID NO: 1059 - DNA, 2 bp, Artificial Sequence
  Description of Artificial Sequence: Synthetic oligonucleotide
yg

SEQ ID NO: 1060 - DNA, 2 bp, Artificial Sequence
  Description of Artificial Sequence: Synthetic oligonucleotide
yg

SEQ ID NO: 1061 - DNA, 89 bp, Artificial Sequence
  Description of Artificial Sequence: Synthetic oligonucleotide
ygttattygygtgttagtagttgggygtttygattttttagatygygtgagtttagtaaagyggttaggygygygtttgtagttyggyg

SEQ ID NO: 1062 - DNA, 13 bp, Artificial Sequence
  Description of Artificial Sequence: Synthetic oligonucleotide
ygtttttaattyg

SEQ ID NO: 1063 - DNA, 2 bp, Artificial Sequence
  Description of Artificial Sequence: Synthetic oligonucleotide
yg

SEQ ID NO: 1064 - DNA, 47 bp, Artificial Sequence
  Description of Artificial Sequence: Synthetic oligonucleotide
ygagygttagattttagtaataaaaggttaggygaggttatatygyg

SEQ ID NO: 1065 - DNA, 2 bp, Artificial Sequence
  Description of Artificial Sequence: Synthetic oligonucleotide
yg

SEQ ID NO: 1066 - DNA, 2 bp, Artificial Sequence
  Description of Artificial Sequence: Synthetic oligonucleotide
yg

SEQ ID NO: 1067 - DNA, 159 bp, Artificial Sequence
  Description of Artificial Sequence: Synthetic polynucleotide
ygatgttygyggygtgaaagygttygyggygggygtygatttttgttttagttttttgtttttttygtttygtttgtttygtgtttttgtgattttggttttggygtygtygtttaggygtttygtaatgtagttgtttttgygtttyggygggaggyg

SEQ ID NO: 1068 - DNA, 2 bp, Artificial Sequence
  Description of Artificial Sequence: Synthetic oligonucleotide
yg

SEQ ID NO: 1069 - DNA, 2 bp, Artificial Sequence
  Description of Artificial Sequence: Synthetic oligonucleotide
yg

SEQ ID NO: 1070 - DNA, 2 bp, Artificial Sequence
  Description of Artificial Sequence: Synthetic oligonucleotide
yg

SEQ ID NO: 1071 - DNA, 78 bp, Artificial Sequence
  Description of Artificial Sequence: Synthetic oligonucleotide
ygggygtygaggtttgggttttagtygtggygttygtttyggygtagtggggagtygygggygtyggagaagyggtyg

SEQ ID NO: 1072 - DNA, 2 bp, Artificial Sequence
  Description of Artificial Sequence: Synthetic oligonucleotide
yg

SEQ ID NO: 1073 - DNA, 48 bp, Artificial Sequence
  Description of Artificial Sequence: Synthetic oligonucleotide
ygyggaggagtttygtattygatygtgtatagygatygagttggygyg

SEQ ID NO: 1074 - DNA, 2 bp, Artificial Sequence
  Description of Artificial Sequence: Synthetic oligonucleotide
yg

SEQ ID NO: 1075 - DNA, 2 bp, Artificial Sequence
  Description of Artificial Sequence: Synthetic oligonucleotide
yg

SEQ ID NO: 1076 - DNA, 2 bp, Artificial Sequence
  Description of Artificial Sequence: Synthetic oligonucleotide
yg

SEQ ID NO: 1077 - DNA, 157 bp, Artificial Sequence
  Description of Artificial Sequence: Synthetic polynucleotide
ygtttttatagttttgttttgatagttaaggaaaaaatttgttaaaaattagaggygttgttgagtgttggygtgggaatgttagtttagttagagttttgttttgggttatttaaataaaaatagatatgttggtggtaaatgttagttgaatayg

SEQ ID NO: 1078 - DNA, 2 bp, Artificial Sequence
  Description of Artificial Sequence: Synthetic oligonucleotide
yg

SEQ ID NO: 1079 - DNA, 82 bp, Artificial Sequence
  Description of Artificial Sequence: Synthetic oligonucleotide
ygygygttagtttttygtttygtggaagygtttttttttygatttyggttgattttygttygtygtttttttygygggtgyg

SEQ ID NO: 1080 - DNA, 23 bp, Artificial Sequence
  Description of Artificial Sequence: Synthetic oligonucleotide
ygtttggtygttttatttggtyg

SEQ ID NO: 1081 - DNA, 38 bp, Artificial Sequence
  Description of Artificial Sequence: Synthetic oligonucleotide
ygagttttygygygtttaygagtagttttgygagttyg

SEQ ID NO: 1082 - DNA, 2 bp, Artificial Sequence
  Description of Artificial Sequence: Synthetic oligonucleotide
gg

SEQ ID NO: 1083 - DNA, 165 bp, Artificial Sequence
  Description of Artificial Sequence: Synthetic polynucleotide
ygtgtttttttttagygagygtagygagttgtttttgaagtttaggtagattaggtygtygtagaagatgaagaagttttyggggattygttggatgyggttgtyggttattagtagtttgygtaygtttagggggaaagggtttggtaygttgggtagttygyg

SEQ ID NO: 1084 - DNA, 2 bp, Artificial Sequence
  Description of Artificial Sequence: Synthetic oligonucleotide
yg

SEQ ID NO: 1085 - DNA, 2 bp, Artificial Sequence
  Description of Artificial Sequence: Synthetic oligonucleotide
yg

SEQ ID NO: 1086 - DNA, 2 bp, Artificial Sequence
  Description of Artificial Sequence: Synthetic oligonucleotide
yg

SEQ ID NO: 1087 - DNA, 23 bp, Artificial Sequence
  Description of Artificial Sequence: Synthetic oligonucleotide
yggtgttygggggtygtttgtyg

SEQ ID NO: 1088 - DNA, 2 bp, Artificial Sequence
  Description of Artificial Sequence: Synthetic oligonucleotide
yg

SEQ ID NO: 1089 - DNA, 66 bp, Artificial Sequence
  Description of Artificial Sequence: Synthetic oligonucleotide
yggtygtggygggttttttggggyggtagttttaggygygggygygtagtagtttygaaggygtyg

SEQ ID NO: 1090 - DNA, 43 bp, Artificial Sequence
  Description of Artificial Sequence: Synthetic oligonucleotide
ygaataaaaagagtttaggtygygygggygggttgygygttyg

SEQ ID NO: 1091 - DNA, 2 bp, Artificial Sequence
  Description of Artificial Sequence: Synthetic oligonucleotide
yg

SEQ ID NO: 1092 - DNA, 62 bp, Artificial Sequence
  Description of Artificial Sequence: Synthetic oligonucleotide
ygtttagatgyggyggyggygayggttttagttgygtttygtggttattttygtgtagygyg

SEQ ID NO: 1093 - DNA, 2 bp, Artificial Sequence
  Description of Artificial Sequence: Synthetic oligonucleotide
yg

SEQ ID NO: 1094 - DNA, 138 bp, Artificial Sequence
  Description of Artificial Sequence: Synthetic polynucleotide
ygaaagattygaaattttaaaagttttattgygtgtttttgggaggggagggggygygttaggaaaggagtggaaaaaagtgggygaggaggagygttgaaaattttttgataagtagttttygtgygttygagagyg

SEQ ID NO: 1095 - DNA, 2 bp, Artificial Sequence
  Description of Artificial Sequence: Synthetic oligonucleotide
yg

SEQ ID NO: 1096 - DNA, 2 bp, Artificial Sequence
  Description of Artificial Sequence: Synthetic oligonucleotide
yg

SEQ ID NO: 1097 - DNA, 2 bp, Artificial Sequence
  Description of Artificial Sequence: Synthetic oligonucleotide
yg

SEQ ID NO: 1098 - DNA, 2 bp, Artificial Sequence
  Description of Artificial Sequence: Synthetic oligonucleotide
yg

SEQ ID NO: 1099 - DNA, 187 bp, Artificial Sequence
  Description of Artificial Sequence: Synthetic polynucleotide
yggtagaagtgggaggtataygaggagttattggaaayggygtttttgtggaggagtygggggggatggggagtagagggagggggttttgttgttttagygtttygaggtygtggagyggtagtagttgtagtyggagtagtattagtaatagtaatagtgagygggayggagttaggatygttyg

SEQ ID NO: 1100 - DNA, 2 bp, Artificial Sequence
  Description of Artificial Sequence: Synthetic oligonucleotide
yg

SEQ ID NO: 1101 - DNA, 2 bp, Artificial Sequence
  Description of Artificial Sequence: Synthetic oligonucleotide
yg

SEQ ID NO: 1102 - DNA, 110 bp, Artificial Sequence
  Description of Artificial Sequence: Synthetic polynucleotide
ygyggygtgtagttyggyggatgttgttaggttaggygatttygtygtttttggagygygagygygttttagtttgtagygatgattttggaattagattttgatttgyg

SEQ ID NO: 1103 - DNA, 4 bp, Artificial Sequence
  Description of Artificial Sequence: Synthetic oligonucleotide
ygyg

SEQ ID NO: 1104 - DNA, 189 bp, Artificial Sequence
  Description of Artificial Sequence: Synthetic polynucleotide
ygggaggttttgttygttyggtggttgtygyggtttttttygygttgttttttaygtttggtttattatgtaygaggtaggtaatttgttttttttttyggggatttatttyggagataagaaggtagtttgttttttgtaatggtttttgttggagtgyggyggggtttaggygygagygggggtayg

SEQ ID NO: 1105 - DNA, 42 bp, Artificial Sequence
  Description of Artificial Sequence: Synthetic oligonucleotide
ygttgaaggtgggtggaaygagggygtttgagtgtattygyg

SEQ ID NO: 1106 - DNA, 33 bp, Artificial Sequence
  Description of Artificial Sequence: Synthetic oligonucleotide
ygygygggggttttaggtattttgygttttayg

SEQ ID NO: 1107 - DNA, 15 bp, Artificial Sequence
  Description of Artificial Sequence: Synthetic oligonucleotide
ygygttagtygaayg

SEQ ID NO: 1108 - DNA, 51 bp, Artificial Sequence
  Description of Artificial Sequence: Synthetic oligonucleotide
ygttgggatagagttgtttgttggagttgtygtagatygtygtggtgggyg

SEQ ID NO: 1109 - DNA, 2 bp, Artificial Sequence
  Description of Artificial Sequence: Synthetic oligonucleotide
yg

SEQ ID NO: 1110 - DNA, 268 bp, Artificial Sequence
  Description of Artificial Sequence: Synthetic polynucleotide
yggagygygtagttygtttttgaataagaagtgagtataatggygtgtttgtaaaaaaaagttttaagttygttttttttaaaaaatattttgaatgttgtatgttttatgttttttagygtttygygggagagattyggttatagagtaggaggtgagatttttttttyggtatttttatttttttggtygtaygtttttttgttttagttttttttgggaggattgtaaatgtttttttttagtaagyggtygttttttattttyg

SEQ ID NO: 1111 - DNA, 2 bp, Artificial Sequence
  Description of Artificial Sequence: Synthetic oligonucleotide
yg

SEQ ID NO: 1112 - DNA, 33 bp, Artificial Sequence
  Description of Artificial Sequence: Synthetic oligonucleotide
yggagtttttaggagtagttagatygattatyg

SEQ ID NO: 1113 - DNA, 23 bp, Artificial Sequence
  Description of Artificial Sequence: Synthetic oligonucleotide
ygtttattagttygagattttyg

SEQ ID NO: 1114 - DNA, 40 bp, Artificial Sequence
  Description of Artificial Sequence: Synthetic oligonucleotide
ygtttygattygaygttttttygttygattaggtgtttyg

SEQ ID NO: 1115 - DNA, 10 bp, Artificial Sequence
  Description of Artificial Sequence: Synthetic oligonucleotide
ygyggtttyg

SEQ ID NO: 1116 - DNA, 181 bp, Artificial Sequence
  Description of Artificial Sequence: Synthetic polynucleotide
yggttgttgatygtttttttygygttygttagggtttttgtttygygttagttatygygygttttttttttgtttatgtygtagttttygtggtttttgttttggattygggatgttaggttgagataygttttgtaaatttttggtagaaatgggygtaagggggtggatttygttttyg

SEQ ID NO: 1117 - DNA, 195 bp, Artificial Sequence
  Description of Artificial Sequence: Synthetic polynucleotide
ygatttaggaygtyggygtttgttaggattttttygtttgtttttygygtttygygygygtttatgttattattayggggagggtgtatgyggtaggtgtttggtygaggttttygggagygagtygtttttaygtgttttagtttgtttttttttygaagttagaygttggygttgtagttttgttgtttgayg

SEQ ID NO: 1118 - DNA, 2 bp, Artificial Sequence
  Description of Artificial Sequence: Synthetic oligonucleotide
yg

SEQ ID NO: 1119 - DNA, 358 bp, Artificial Sequence
  Description of Artificial Sequence: Synthetic polynucleotide
yggygttygagtgattttgtttagtttygttttgygtttttgtaaattaygttgttgygttaattataaatttggttaatatgtttttgtaattttattatttaaaaaygtttttaggtatttggtygttgttagattaggttygygggttyggaggaggtttttttatttgttttygttagtttyggggatygtgygyggttttygtgtggttttygtttaygaggtttttygggtaggaatygtygygygatttttgtttagyggtygygttttggttaygggygatttttgtygggaattttgttttyggttaagttgygttttygtatttyggtggtttttattygagttygyg

SEQ ID NO: 1120 - DNA, 13 bp, Artificial Sequence
  Description of Artificial Sequence: Synthetic oligonucleotide
ygtagttgtggyg

SEQ ID NO: 1121 - DNA, 2 bp, Artificial Sequence
  Description of Artificial Sequence: Synthetic oligonucleotide
yg

SEQ ID NO: 1122 - DNA, 2 bp, Artificial Sequence
  Description of Artificial Sequence: Synthetic oligonucleotide
yg

SEQ ID NO: 1123 - DNA, 95 bp, Artificial Sequence
  Description of Artificial Sequence: Synthetic oligonucleotide
ygtgyggggttatttgaaggttggggygyggaagtttaatttygtgttgattgggttttaagttttttgygttttygtttygtttygagtgttyg

SEQ ID NO: 1124 - DNA, 45 bp, Artificial Sequence
  Description of Artificial Sequence: Synthetic oligonucleotide
yggtagtaggttggagygtatygtgygygttttgttttttyggyg

SEQ ID NO: 1125 - DNA, 104 bp, Artificial Sequence
  Description of Artificial Sequence: Synthetic polynucleotide
yggttgagtyggagtttaygyggygygygtttttygygaggaatttttyggtttgtaggttgtttgttattttygtttttygaygygtttttttttggttygyg

SEQ ID NO: 1126 - DNA, 87 bp, Artificial Sequence
  Description of Artificial Sequence: Synthetic oligonucleotide
ygttttygttttygttgatattttgtaaagtygyggyggtagyggyggggattaygttgyggtgtattatttttygttattttttyg

SEQ ID NO: 1127 - DNA, 62 bp, Artificial Sequence
  Description of Artificial Sequence: Synthetic oligonucleotide
ygatagtttgygagtttyggttgtaagtggtttttttttttygyggttgttgtttagtgtyg

SEQ ID NO: 1128 - DNA, 2 bp, Artificial Sequence
  Description of Artificial Sequence: Synthetic oligonucleotide
yg

SEQ ID NO: 1129 - DNA, 2 bp, Artificial Sequence
  Description of Artificial Sequence: Synthetic oligonucleotide
yg

SEQ ID NO: 1130 - DNA, 2 bp, Artificial Sequence
  Description of Artificial Sequence: Synthetic oligonucleotide
yg

SEQ ID NO: 1131 - DNA, 2 bp, Artificial Sequence
  Description of Artificial Sequence: Synthetic oligonucleotide
yg

SEQ ID NO: 1132 - DNA, 2 bp, Artificial Sequence
  Description of Artificial Sequence: Synthetic oligonucleotide
yg

SEQ ID NO: 1133 - DNA, 2 bp, Artificial Sequence
  Description of Artificial Sequence: Synthetic oligonucleotide
yg

SEQ ID NO: 1134 - DNA, 2 bp, Artificial Sequence
  Description of Artificial Sequence: Synthetic oligonucleotide
yg

SEQ ID NO: 1135 - DNA, 2 bp, Artificial Sequence
  Description of Artificial Sequence: Synthetic oligonucleotide
yg

SEQ ID NO: 1136 - DNA, 145 bp, Artificial Sequence
  Description of Artificial Sequence: Synthetic polynucleotide
ygtyggtttgttggygatttggygtatttgttygygygttttggttttagttgtygtaggttttttttgtatttatttttagtttttaaagttagtgtagttagtatygtttatttggagttttaatttttttttgygattttyg

SEQ ID NO: 1137 - DNA, 2 bp, Artificial Sequence
  Description of Artificial Sequence: Synthetic oligonucleotide
yg

SEQ ID NO: 1138 - DNA, 19 bp, Artificial Sequence
  Description of Artificial Sequence: Synthetic oligonucleotide
ygtttatygttaggagtyg

SEQ ID NO: 1139 - DNA, 35 bp, Artificial Sequence
  Description of Artificial Sequence: Synthetic oligonucleotide
yggyggyggyggyggttttattagyggagttttyg

SEQ ID NO: 1140 - DNA, 2 bp, Artificial Sequence
  Description of Artificial Sequence: Synthetic oligonucleotide
yg

SEQ ID NO: 1141 - DNA, 2 bp, Artificial Sequence
  Description of Artificial Sequence: Synthetic oligonucleotide
yg

SEQ ID NO: 1142 - DNA, 36 bp, Artificial Sequence
  Description of Artificial Sequence: Synthetic oligonucleotide
ygagttggygttggttygttggttgtaggagagtyg

SEQ ID NO: 1143 - DNA, 2 bp, Artificial Sequence
  Description of Artificial Sequence: Synthetic oligonucleotide
yg

SEQ ID NO: 1144 - DNA, 42 bp, Artificial Sequence
  Description of Artificial Sequence: Synthetic oligonucleotide
yggttgagttttygtttgtttaattttatttgttattgtayg

SEQ ID NO: 1145 - DNA, 2 bp, Artificial Sequence
  Description of Artificial Sequence: Synthetic oligonucleotide
yg

SEQ ID NO: 1146 - DNA, 2 bp, Artificial Sequence
  Description of Artificial Sequence: Synthetic oligonucleotide
yg

SEQ ID NO: 1147 - DNA, 18 bp, Artificial Sequence
  Description of Artificial Sequence: Synthetic oligonucleotide
ygygtagygttygygtyg

SEQ ID NO: 1148 - DNA, 2 bp, Artificial Sequence
  Description of Artificial Sequence: Synthetic oligonucleotide
yg

SEQ ID NO: 1149 - DNA, 2 bp, Artificial Sequence
  Description of Artificial Sequence: Synthetic oligonucleotide
yg

SEQ ID NO: 1150 - DNA, 2 bp, Artificial Sequence
  Description of Artificial Sequence: Synthetic oligonucleotide
yg

SEQ ID NO: 1151 - DNA, 118 bp, Artificial Sequence
  Description of Artificial Sequence: Synthetic polynucleotide
ygtgttagatttyggtttygygatttaggtgagtgtygttatygtygtttggagggatttaagggttttgggttgggatttggggtygtatyggggtttgaggtagaatagygaygyg

SEQ ID NO: 1152 - DNA, 22 bp, Artificial Sequence
  Description of Artificial Sequence: Synthetic oligonucleotide
ygaatygygggyggygyggayg

SEQ ID NO: 1153 - DNA, 2 bp, Artificial Sequence
  Description of Artificial Sequence: Synthetic oligonucleotide
yg

SEQ ID NO: 1154 - DNA, 2 bp, Artificial Sequence
  Description of Artificial Sequence: Synthetic oligonucleotide
yg

SEQ ID NO: 1155 - DNA, 2 bp, Artificial Sequence
  Description of Artificial Sequence: Synthetic oligonucleotide
yg

SEQ ID NO: 1156 - DNA, 2 bp, Artificial Sequence
  Description of Artificial Sequence: Synthetic oligonucleotide
yg

SEQ ID NO: 1157 - DNA, 31 bp, Artificial Sequence
  Description of Artificial Sequence: Synthetic oligonucleotide
ygataagagttyggtgttgagatgtgttayg

SEQ ID NO: 1158 - DNA, 2 bp, Artificial Sequence
  Description of Artificial Sequence: Synthetic oligonucleotide
yg

SEQ ID NO: 1159 - DNA, 2 bp, Artificial Sequence
  Description of Artificial Sequence: Synthetic oligonucleotide
yg

SEQ ID NO: 1160 - DNA, 2 bp, Artificial Sequence
  Description of Artificial Sequence: Synthetic oligonucleotide
yg

SEQ ID NO: 1161 - DNA, 2 bp, Artificial Sequence
  Description of Artificial Sequence: Synthetic oligonucleotide
yg

SEQ ID NO: 1162 - DNA, 2 bp, Artificial Sequence
  Description of Artificial Sequence: Synthetic oligonucleotide
yg

SEQ ID NO: 1163 - DNA, 2 bp, Artificial Sequence
  Description of Artificial Sequence: Synthetic oligonucleotide
yg

SEQ ID NO: 1164 - DNA, 2 bp, Artificial Sequence
  Description of Artificial Sequence: Synthetic oligonucleotide
yg

SEQ ID NO: 1165 - DNA, 2 bp, Artificial Sequence
  Description of Artificial Sequence: Synthetic oligonucleotide
yg

SEQ ID NO: 1166 - DNA, 2 bp, Artificial Sequence
  Description of Artificial Sequence: Synthetic oligonucleotide
yg

SEQ ID NO: 1167 - DNA, 69 bp, Artificial Sequence
  Description of Artificial Sequence: Synthetic oligonucleotide
ygttaggggyggttagyggtygtttggttggygtgtyggyggygttyggggagggygggtyggggggyg

SEQ ID NO: 1168 - DNA, 415 bp, Artificial Sequence
  Description of Artificial Sequence: Synthetic polynucleotide
ygtttttttttttggttygattggttttggttttttttaygtttttagtttttaaattggygttygttttatggttygtgtaggaygttaaaagtayggtaaattttagggygatttttagtagaygttttygaygtatgatgtygagtygttatyggttttygtygttttttgtygygttyggggttyggtttgyggtygtygttgygttttgaagygtatygygtygtyggggtttygttatttygtygttygtttttygggtygggtttttttygttttttttaggygttgtttttattttaggyggtttttgttagttgtaatatagagataaattttygaggyggggagatttttagggtatygggatgttgaagtttygyggtttttatttttaagtttaattygtgyg

SEQ ID NO: 1169 - DNA, 2 bp, Artificial Sequence
  Description of Artificial Sequence: Synthetic oligonucleotide
yg

SEQ ID NO: 1170 - DNA, 2 bp, Artificial Sequence
  Description of Artificial Sequence: Synthetic oligonucleotide
yg

SEQ ID NO: 1171 - DNA, 2 bp, Artificial Sequence
  Description of Artificial Sequence: Synthetic oligonucleotide
yg

SEQ ID NO: 1172 - DNA, 2 bp, Artificial Sequence
  Description of Artificial Sequence: Synthetic oligonucleotide
yg

SEQ ID NO: 1173 - DNA, 2 bp, Artificial Sequence
  Description of Artificial Sequence: Synthetic oligonucleotide
yg

SEQ ID NO: 1174 - DNA, 62 bp, Artificial Sequence
  Description of Artificial Sequence: Synthetic oligonucleotide
ygygttygtygttagttygtatagygtttygtatattttygtaygygtttgaaatgygtayg

SEQ ID NO: 1175 - DNA, 2 bp, Artificial Sequence
  Description of Artificial Sequence: Synthetic oligonucleotide
yg

SEQ ID NO: 1176 - DNA, 2 bp, Artificial Sequence
  Description of Artificial Sequence: Synthetic oligonucleotide
yg

SEQ ID NO: 1177 - DNA, 2 bp, Artificial Sequence
  Description of Artificial Sequence: Synthetic oligonucleotide
yg

SEQ ID NO: 1178 - DNA, 2 bp, Artificial Sequence
  Description of Artificial Sequence: Synthetic oligonucleotide
yg

SEQ ID NO: 1179 - DNA, 20 bp, Artificial Sequence
  Description of Artificial Sequence: Synthetic oligonucleotide
ygtaaaygtaaaagttttyg

SEQ ID NO: 1180 - DNA, 69 bp, Artificial Sequence
  Description of Artificial Sequence: Synthetic oligonucleotide
ygttttttggggtttttggttgtygagtttygttaaggtaaagaygttagtaagygaggaagygtagyg

SEQ ID NO: 1181 - DNA, 2 bp, Artificial Sequence
  Description of Artificial Sequence: Synthetic oligonucleotide
yg

SEQ ID NO: 1182 - DNA, 318 bp, Artificial Sequence
  Description of Artificial Sequence: Synthetic polynucleotide
ygtttygyggtagtgttagttttttggggattaggaagggygatttttgtttgggagttagtgtttgggtygtygggttygggtaagygttgggggtttggttygagaagatgyggataggtggtttagggygtygyggattttygttttttgygggtatygggagtttagggtygaggygygtygtttygaggggtttttttttttaataatgygttyggaatggagttygygttttgatagygygggttagttygaaatygtttagaattygtttygatgagtgggtgagtygttttgggagtttgtygygtttyg

SEQ ID NO: 1183 - DNA, 27 bp, Artificial Sequence
  Description of Artificial Sequence: Synthetic oligonucleotide
ygtggtggtttttygagyggaggygyg

SEQ ID NO: 1184 - DNA, 2 bp, Artificial Sequence
  Description of Artificial Sequence: Synthetic oligonucleotide
yg

SEQ ID NO: 1185 - DNA, 13 bp, Artificial Sequence
  Description of Artificial Sequence: Synthetic oligonucleotide
ygagtttttygyg

SEQ ID NO: 1186 - DNA, 189 bp, Artificial Sequence
  Description of Artificial Sequence: Synthetic polynucleotide
yggtgaygatgtgtagagttttttggtatagattgtttatttygttttttttgtggaaatttatygtttggtttttttttygtttttttttttttttttagttagtygttttttttttttttygtatttttaatttttttggygttttaagttatagttygttygyggtgattttggttggagattgyg

SEQ ID NO: 1187 - DNA, 2 bp, Artificial Sequence
  Description of Artificial Sequence: Synthetic oligonucleotide
yg

SEQ ID NO: 1188 - DNA, 2 bp, Artificial Sequence
  Description of Artificial Sequence: Synthetic oligonucleotide
yg

SEQ ID NO: 1189 - DNA, 13 bp, Artificial Sequence
  Description of Artificial Sequence: Synthetic oligonucleotide
ygggggttgagyg

SEQ ID NO: 1190 - DNA, 51 bp, Artificial Sequence
  Description of Artificial Sequence: Synthetic oligonucleotide
yggygtgtgtygtgygtggggtggggtgygggttgggyggtttygttttyg

SEQ ID NO: 1191 - DNA, 289 bp, Artificial Sequence
  Description of Artificial Sequence: Synthetic polynucleotide
ygttygttygtatttygtttttttyggttttttttttaaattttaaaygtatygtygtgttttaaagaaggtgtttaygtygtttttagatttyggagygttttttttttattttygggattttttaggtygtttatttttttygtttttygtttagatttgagagggatygaaaatatattttygattygggtagttagggtygaaattgttaagaggagaaaaggtaaagyggaaggagggtggttataaatagatttttttgtttttttttaaaaggatattgtyg

SEQ ID NO: 1192 - DNA, 2 bp, Artificial Sequence
  Description of Artificial Sequence: Synthetic oligonucleotide
yg

SEQ ID NO: 1193 - DNA, 165 bp, Artificial Sequence
  Description of Artificial Sequence: Synthetic polynucleotide
yggatttgttttygtagtygttgyggatttttyggtygttatggygattgtgaaatgtggggtggggygtatgygttggaagttattygygygggtagtttttgagtgtttttttaygtgttttttagygygagtagtattttygtttttgygttttttagagyg

SEQ ID NO: 1194 - DNA, 21 bp, Artificial Sequence
  Description of Artificial Sequence: Synthetic oligonucleotide
ygtygtttttgtattatttyg

SEQ ID NO: 1195 - DNA, 2 bp, Artificial Sequence
  Description of Artificial Sequence: Synthetic oligonucleotide
yg

SEQ ID NO: 1196 - DNA, 2 bp, Artificial Sequence
  Description of Artificial Sequence: Synthetic oligonucleotide
yg

SEQ ID NO: 1197 - DNA, 2 bp, Artificial Sequence
  Description of Artificial Sequence: Synthetic oligonucleotide
yg

SEQ ID NO: 1198 - DNA, 159 bp, Artificial Sequence
  Description of Artificial Sequence: Synthetic polynucleotide
yggttgygttggtygtattgtttttttataatatgagtagygtyggyggygatygtttgggtygyggtaagtyggttygttgyggttttatttttttygtgggtygygtgtatygttggatggtggatagtygygtggygttgygtatttaygagtayg

SEQ ID NO: 1199 - DNA, 2 bp, Artificial Sequence
  Description of Artificial Sequence: Synthetic oligonucleotide
yg

SEQ ID NO: 1200 - DNA, 129 bp, Artificial Sequence
  Description of Artificial Sequence: Synthetic polynucleotide
yggggggyggaatttagagaggtaaagtgattygtttttaaatygtaatattaggaggatagtagggttagatggaatttttyggtttatagttttygatttygggtaagtgttttattygggygtayg

SEQ ID NO: 1201 - DNA, 2 bp, Artificial Sequence
  Description of Artificial Sequence: Synthetic oligonucleotide
yg

SEQ ID NO: 1202 - DNA, 120 bp, Artificial Sequence
  Description of Artificial Sequence: Synthetic polynucleotide
ygttggagatggygagtttygagattttttttattttttgtttttagagtaattttatggtattaaaaaaaaaaaaaaaaaaaaaaaaaaaaaaaaaaaaaaaaaaagaaggagaaggyg

SEQ ID NO: 1203 - DNA, 2 bp, Artificial Sequence
  Description of Artificial Sequence: Synthetic oligonucleotide
yg

SEQ ID NO: 1204 - DNA, 171 bp, Artificial Sequence
  Description of Artificial Sequence: Synthetic polynucleotide
ygyggaygttgaygattttttttaygttygataagttttygttttygtygtatygttggyggttaatygggygttgygaggatttaaattagagagttygggatattattgtgggggttggaggtygttttttaatttgggtttagtattaataggtgtagtagtygagyg

SEQ ID NO: 1205 - DNA, 2 bp, Artificial Sequence
  Description of Artificial Sequence: Synthetic oligonucleotide
yg

SEQ ID NO: 1206 - DNA, 2 bp, Artificial Sequence
  Description of Artificial Sequence: Synthetic oligonucleotide
yg

SEQ ID NO: 1207 - DNA, 2 bp, Artificial Sequence
  Description of Artificial Sequence: Synthetic oligonucleotide
yg

SEQ ID NO: 1208 - DNA, 64 bp, Artificial Sequence
  Description of Artificial Sequence: Synthetic oligonucleotide
yggtaggtgagyggygyggttgtaggtgagtagtagtttyggttygygygtttagtttttttyg

SEQ ID NO: 1209 - DNA, 2 bp, Artificial Sequence
  Description of Artificial Sequence: Synthetic oligonucleotide
yg

SEQ ID NO: 1210 - DNA, 2 bp, Artificial Sequence
  Description of Artificial Sequence: Synthetic oligonucleotide
yg

SEQ ID NO: 1211 - DNA, 2 bp, Artificial Sequence
  Description of Artificial Sequence: Synthetic oligonucleotide
yg

SEQ ID NO: 1212 - DNA, 2 bp, Artificial Sequence
  Description of Artificial Sequence: Synthetic oligonucleotide
yg

SEQ ID NO: 1213 - DNA, 16 bp, Artificial Sequence
  Description of Artificial Sequence: Synthetic oligonucleotide
ygtttygtagggttyg

SEQ ID NO: 1214 - DNA, 2 bp, Artificial Sequence
  Description of Artificial Sequence: Synthetic oligonucleotide
yg

SEQ ID NO: 1215 - DNA, 2 bp, Artificial Sequence
  Description of Artificial Sequence: Synthetic oligonucleotide
yg

SEQ ID NO: 1216 - DNA, 2 bp, Artificial Sequence
  Description of Artificial Sequence: Synthetic oligonucleotide
yg

SEQ ID NO: 1217 - DNA, 18 bp, Artificial Sequence
  Description of Artificial Sequence: Synthetic oligonucleotide
ygtattttttyggtygyg

SEQ ID NO: 1218 - DNA, 118 bp, Artificial Sequence
  Description of Artificial Sequence: Synthetic polynucleotide
ygggyggatgggggttatygaggyggttygtttttaggygtatatttygtatatttttttgttaagtgaaggggttaaaatgtatagatgggggagtttatttaggaatagaggygyg

SEQ ID NO: 1219 - DNA, 2 bp, Artificial Sequence
  Description of Artificial Sequence: Synthetic oligonucleotide
yg

SEQ ID NO: 1220 - DNA, 2 bp, Artificial Sequence
  Description of Artificial Sequence: Synthetic oligonucleotide
yg

SEQ ID NO: 1221 - DNA, 2 bp, Artificial Sequence
  Description of Artificial Sequence: Synthetic oligonucleotide
yg

SEQ ID NO: 1222 - DNA, 2 bp, Artificial Sequence
  Description of Artificial Sequence: Synthetic oligonucleotide
yg

SEQ ID NO: 1223 - DNA, 2 bp, Artificial Sequence
  Description of Artificial Sequence: Synthetic oligonucleotide
yg

SEQ ID NO: 1224 - DNA, 22 bp, Artificial Sequence
  Description of Artificial Sequence: Synthetic oligonucleotide
ygygtygttttagaggagttyg

SEQ ID NO: 1225 - DNA, 112 bp, Artificial Sequence
  Description of Artificial Sequence: Synthetic polynucleotide
ygggagygtaygagtgtgtgtgtgtgtgtgtgtgttygyggtgtgttygyggttyggtgtataygygygygggttgtaaagttaggagttgygggagygtttttttgtttyg

SEQ ID NO: 1226 - DNA, 109 bp, Artificial Sequence
  Description of Artificial Sequence: Synthetic polynucleotide
ygttttgtttgggttgggtttatttaygttttgggtggggtttaggaattgygtgygggygtagygggtgagtatgttgatgatgattatttggttttatttttttayg

SEQ ID NO: 1227 - DNA, 2 bp, Artificial Sequence
  Description of Artificial Sequence: Synthetic oligonucleotide
yg

SEQ ID NO: 1228 - DNA, 2 bp, Artificial Sequence
  Description of Artificial Sequence: Synthetic oligonucleotide
yg

SEQ ID NO: 1229 - DNA, 2 bp, Artificial Sequence
  Description of Artificial Sequence: Synthetic oligonucleotide
yg

SEQ ID NO: 1230 - DNA, 431 bp, Artificial Sequence
  Description of Artificial Sequence: Synthetic polynucleotide
ygagggggttttgggatygagyggtttygtagyggygatagaaatatatattttaygaaaaagaaaaaaaaaaaaaygagtygygygaattygttaagttagatgtgygyggtttgaagyggaggaggttttgaygttagttttatttygygtagttyggtttggtygtagattygtyggttattygtyggyggtttaggtygggaggggttaggatagtttyggtygygyggtggayggaggggttattttttygggygttagtaaataaattttattygagttaatatygtttagygaayggtgtttttttttagttattygagaaygagaggtatttttaattagaaattaattaatgagtagttgttttttttygttttattgtaattattygttttaattataaatgagatttatgaaaggatayg

SEQ ID NO: 1231 - DNA, 2 bp, Artificial Sequence
  Description of Artificial Sequence: Synthetic oligonucleotide
yg

SEQ ID NO: 1232 - DNA, 40 bp, Artificial Sequence
  Description of Artificial Sequence: Synthetic oligonucleotide
ygtygygtttygttgtagtttygttggagagatggggayg

SEQ ID NO: 1233 - DNA, 2 bp, Artificial Sequence
  Description of Artificial Sequence: Synthetic oligonucleotide
yg

SEQ ID NO: 1234 - DNA, 22 bp, Artificial Sequence
  Description of Artificial Sequence: Synthetic oligonucleotide
ygttagtaggtttagggttayg

SEQ ID NO: 1235 - DNA, 2 bp, Artificial Sequence
  Description of Artificial Sequence: Synthetic oligonucleotide
yg

SEQ ID NO: 1236 - DNA, 47 bp, Artificial Sequence
  Description of Artificial Sequence: Synthetic oligonucleotide
ygggtattttgtattgtaygtagtatatgttgtggttttttagttyg

SEQ ID NO: 1237 - DNA, 24 bp, Artificial Sequence
  Description of Artificial Sequence: Synthetic oligonucleotide
ygtygttgggggatttttggtayg

SEQ ID NO: 1238 - DNA, 2 bp, Artificial Sequence
  Description of Artificial Sequence: Synthetic oligonucleotide
yg

SEQ ID NO: 1239 - DNA, 45 bp, Artificial Sequence
  Description of Artificial Sequence: Synthetic oligonucleotide
ygggattttaggtttatttagtaagttaattggttgaggttttyg

SEQ ID NO: 1240 - DNA, 2 bp, Artificial Sequence
  Description of Artificial Sequence: Synthetic oligonucleotide
yg

SEQ ID NO: 1241 - DNA, 258 bp, Artificial Sequence
  Description of Artificial Sequence: Synthetic polynucleotide
ygaagyggygggagtyggtgtagttttaatttttattgygtgttttaggtygttaattagttttgttygygtgtygttggttyggaggttgtygygttagtttttgygtgygtttgagygygttggagtatttgygaggttagggttgtygayggygagaggatattttgaggaatayggtgttttagtttygttttygtttttygttygagttggaggttggggygygttgagtygtagygtttggataagtgygyg

SEQ ID NO: 1242 - DNA, 45 bp, Artificial Sequence
  Description of Artificial Sequence: Synthetic oligonucleotide
ygttttggyggtttygagggatttgggttygggtttgyggtygyg

SEQ ID NO: 1243 - DNA, 7 bp, Artificial Sequence
  Description of Artificial Sequence: Synthetic oligonucleotide
ygyggyg

SEQ ID NO: 1244 - DNA, 4 bp, Artificial Sequence
  Description of Artificial Sequence: Synthetic oligonucleotide
ygyg

SEQ ID NO: 1245 - DNA, 67 bp, Artificial Sequence
  Description of Artificial Sequence: Synthetic oligonucleotide
yggggygttaatagtttaggatttgggttgtaggttggtttttgtattaattagyggggyggtttyg

SEQ ID NO: 1246 - DNA, 43 bp, Artificial Sequence
  Description of Artificial Sequence: Synthetic oligonucleotide
yggttgattygtagyggtagyggtagtagygaggattygagyg

SEQ ID NO: 1247 - DNA, 2 bp, Artificial Sequence
  Description of Artificial Sequence: Synthetic oligonucleotide
yg

SEQ ID NO: 1248 - DNA, 2 bp, Artificial Sequence
  Description of Artificial Sequence: Synthetic oligonucleotide
yg

SEQ ID NO: 1249 - DNA, 113 bp, Artificial Sequence
  Description of Artificial Sequence: Synthetic polynucleotide
ygtgtgtttagttgaatttagtatatttttttygtatttttygtttttttttttttttttttgaatttgtttttttgttttgygggtttttaatttttttygaatttygggyg

SEQ ID NO: 1250 - DNA, 4 bp, Artificial Sequence
  Description of Artificial Sequence: Synthetic oligonucleotide
ygyg

SEQ ID NO: 1251 - DNA, 2 bp, Artificial Sequence
  Description of Artificial Sequence: Synthetic oligonucleotide
yg

SEQ ID NO: 1252 - DNA, 84 bp, Artificial Sequence
  Description of Artificial Sequence: Synthetic oligonucleotide
ygttgygygtygttttygyggagtygagyggyggtggttgyggaagygattggggttgygyggatattagygttttagagttyg

SEQ ID NO: 1253 - DNA, 2 bp, Artificial Sequence
  Description of Artificial Sequence: Synthetic oligonucleotide
yg

SEQ ID NO: 1254 - DNA, 48 bp, Artificial Sequence
  Description of Artificial Sequence: Synthetic oligonucleotide
ygygttttattttgtagyggtggttttggaattagattttgatttgyg

SEQ ID NO: 1255 - DNA, 228 bp, Artificial Sequence
  Description of Artificial Sequence: Synthetic polynucleotide
ygggtygygygtttatttgygttttygtygtygaaggagtttatgtaygggaagtagatggygagygtttygaaggaggyggatagattgaggyggttttgygagygttttatgttygygtyggygtygggygtttyggtygyggyggyggyggyggyggygggyggtttgggtagtttggtygttttatttttgaygyggagtayggygygyggygtggtggyggyg

SEQ ID NO: 1256 - DNA, 47 bp, Artificial Sequence
  Description of Artificial Sequence: Synthetic oligonucleotide
ygtattttggtygtaataagygygttttaygtygttaygtattagyg

SEQ ID NO: 1257 - DNA, 185 bp, Artificial Sequence
  Description of Artificial Sequence: Synthetic polynucleotide
ygygtagggggygggttttatttttttttygttttygtttyggttttaagtygyggaggygttyggtgggatttygttgttgtttaattaggggggatygggtgagtttttttttttggagtygggttttattagygtygtaggtttataggtygggggtgggggttttggatygaggggyggyg

SEQ ID NO: 1258 - DNA, 216 bp, Artificial Sequence
  Description of Artificial Sequence: Synthetic polynucleotide
ygggggygttaatttygggagtaggaggtygggttttagtygtygggttttgygygtttgttttttgyggygyggtyggtatttgtagttggggtggtygygtaagtgttgtaygygtagtygttyggttttttttaygaagggtygttttttygtygygtttagttttttttaygttttgtttgygggtygtgggygttagtgagtggaaygtyg

SEQ ID NO: 1259 - DNA, 344 bp, Artificial Sequence
  Description of Artificial Sequence: Synthetic polynucleotide
ygtggtttygtgtttyggggygygttttagtttyggtattattagtttttygtttttttyggaggggygttygagtgygttygatayggttagtagygtygyggygagtagtagtagygtgggtattggtttaaagtttygagatttyggagttygtttygygttttttatgtygttgtttagtttgygtttttygaatttttygggtatagttygttgtattggagttttaggagatatygttygtagtagygtayggagygagggatttttagttygggtygggagagtaaagtttygttggtttgttttggattgttaaaattaataatttttattattyg

SEQ ID NO: 1260 - DNA, 28 bp, Artificial Sequence
  Description of Artificial Sequence: Synthetic oligonucleotide
ygttttgtttggtagttaggtygagayg

SEQ ID NO: 1261 - DNA, 124 bp, Artificial Sequence
  Description of Artificial Sequence: Synthetic polynucleotide
ygtggggygttggatttatygagaggttagygtygtygtygggggagggygtgtttygtaygtgtgtgttygygygtgttygygttygygtgtgttagygygygtgttttggtygtgygygtyg

SEQ ID NO: 1262 - DNA, 80 bp, Artificial Sequence
  Description of Artificial Sequence: Synthetic oligonucleotide
ygttygttagggttaygaagagygtaaygaaygttagtagtayggygtttayggtgagygttygygtygtttgtatttyg

SEQ ID NO: 1263 - DNA, 62 bp, Artificial Sequence
  Description of Artificial Sequence: Synthetic oligonucleotide
yggataggtttygtagtgagtaggtaagggtygtttygtygyggttgtttttttaygtttyg

SEQ ID NO: 1264 - DNA, 165 bp, Artificial Sequence
  Description of Artificial Sequence: Synthetic polynucleotide
ygatygtatgygtygatttgtygttgggygttygtttttttttgttggggttgggygyggtttyggagtttggyggyggtggtgagggygtayggttagttgtagyggygttgtgtttgtygtggatttaggatattttaggtttggtggyggggttaggtggyg

SEQ ID NO: 1265 - DNA, 43 bp, Artificial Sequence
  Description of Artificial Sequence: Synthetic oligonucleotide
ygtttttgtgtttttggtggtttyggygttttttyggagygyg

SEQ ID NO: 1266 - DNA, 86 bp, Artificial Sequence
  Description of Artificial Sequence: Synthetic oligonucleotide
ygtygtygttttygtygggagttaagttygtygggtyggttyggttttaggtgggtagttyggtttgtagttggttggaggtggyg

SEQ ID NO: 1267 - DNA, 23 bp, Artificial Sequence
  Description of Artificial Sequence: Synthetic oligonucleotide
ygagttygtgggataagggggyg

SEQ ID NO: 1268 - DNA, 2 bp, Artificial Sequence
  Description of Artificial Sequence: Synthetic oligonucleotide
yg

SEQ ID NO: 1269 - DNA, 99 bp, Artificial Sequence
  Description of Artificial Sequence: Synthetic oligonucleotide
ygyggttatgtaattggtggatttttttaaatygttttggaggggggagygyggygttgggggygggagagygtttttggttgtgagttgtttttgtyg

SEQ ID NO: 1270 - DNA, 73 bp, Artificial Sequence
  Description of Artificial Sequence: Synthetic oligonucleotide
ygtggaattygtgagttttaygtaaygtttttttgtygtttagggtgggtttttagaagtatagaaatggtyg

SEQ ID NO: 1271 - DNA, 2 bp, Artificial Sequence
  Description of Artificial Sequence: Synthetic oligonucleotide
yg

SEQ ID NO: 1272 - DNA, 52 bp, Artificial Sequence
  Description of Artificial Sequence: Synthetic oligonucleotide
yggggygggtagggatygagttaggagagagygggygggggttttgggagyg

SEQ ID NO: 1273 - DNA, 50 bp, Artificial Sequence
  Description of Artificial Sequence: Synthetic oligonucleotide
ygygagtaggagggygtattttatggttaggtgyggaygyggyggttgyg

SEQ ID NO: 1274 - DNA, 50 bp, Artificial Sequence
  Description of Artificial Sequence: Synthetic oligonucleotide
ygggtyggggtattataggygygggaatttaygtgtggattttgygttyg

SEQ ID NO: 1275 - DNA, 2 bp, Artificial Sequence
  Description of Artificial Sequence: Synthetic oligonucleotide
yg

SEQ ID NO: 1276 - DNA, 2 bp, Artificial Sequence
  Description of Artificial Sequence: Synthetic oligonucleotide
yg

SEQ ID NO: 1277 - DNA, 52 bp, Artificial Sequence
  Description of Artificial Sequence: Synthetic oligonucleotide
yggggtagygtaggagtaggtaggggttygyggttygygtgggttttaggyg

SEQ ID NO: 1278 - DNA, 2 bp, Artificial Sequence
  Description of Artificial Sequence: Synthetic oligonucleotide
yg

SEQ ID NO: 1279 - DNA, 2 bp, Artificial Sequence
  Description of Artificial Sequence: Synthetic oligonucleotide
yg

SEQ ID NO: 1280 - DNA, 2 bp, Artificial Sequence
  Description of Artificial Sequence: Synthetic oligonucleotide
yg

SEQ ID NO: 1281 - DNA, 138 bp, Artificial Sequence
  Description of Artificial Sequence: Synthetic polynucleotide
ygagtggtagtagtaggagyggggtgaygaataagattaygaaggatttgaatttggagatatagtttagygtygaggttatygygygggagggagattggygggygagaygagtgaggggtagttagaggygtygyg

SEQ ID NO: 1282 - DNA, 2 bp, Artificial Sequence
  Description of Artificial Sequence: Synthetic oligonucleotide
yg

SEQ ID NO: 1283 - DNA, 2 bp, Artificial Sequence
  Description of Artificial Sequence: Synthetic oligonucleotide
yg

SEQ ID NO: 1284 - DNA, 2 bp, Artificial Sequence
  Description of Artificial Sequence: Synthetic oligonucleotide
yg

SEQ ID NO: 1285 - DNA, 1017 bp, Artificial Sequence
  Description of Artificial Sequence: Synthetic polynucleotide
cggcgatttcggttttcgtaaggtggggcggcgagtaggagtcggggttaggttaggggttcgagttttcgttcgaggggcggggaaggcgggtgacgtgagtcgggtcgggcgggcggagttgggatcggtttcgggaggcgggggcgagcgcgcggagaggtagacgcgaggagggaggcggttgagtagcgcgggcggttttgcggcgggcgcggtgggcgcgggcggcggggtttcgggattttcgcgcgtttttttcgcgcggcgtcgtcgtcgcgcgtttttacgtttcgcgttttacggcgttttcgtttcgcgcgtttttcgtgttcgttttttgttagttttcgggtcgcggtcgtttgtagagcgagcgtttagacggagttttcgggtaatttgagtggcgtcgatcggcggcggagtttttggtagagtttttcgattcggtagcgcggaggggattcgcgttcgttcgcgtcgcgttattttaaattttaagtagcgtcgttttatcggcgcggagtttcggttggaggtaagagtcgcgcgtcgggagatacgtatcgtgagcggtagcgtcgtcggttttttttttcgtcgtttcggagggcgaagtcgcggttttttagttttttgttgcgtcgcgatagcgtcggaatacgtttcgtttcgttgtcgttttcgttgtgtcgtcggcggagggggtcgcgagtttcgcgtttcggtcggaggatgtgcgttttcgcgggtcgtttagtttgagttatgcgttttaacggcggcggcgcgtcggtcggtatggagtttcgcgcggtcgcgttttgattcgttgtgcgtttcgcggtcggcgggcggcgggaggcggcggatcgagagtcggagatcggcgtcgcgggacggaagcgagcgggcgcgggcgtcgcgtagatggtttgggcgagttaggtttgaggtttcgtttttcgaaacgtgattatgtggatttaatagtttttaggatttaggtgagcg

SEQ ID NO: 1286 - DNA, 166 bp, Artificial Sequence
  Description of Artificial Sequence: Synthetic polynucleotide
cgttcggagcgcgggcggggttagtttgggtagtcgcgggtcgttgttgcgtcggaagttttcgtcgttagggagttttttgggcgttaggttttgggtttttgggcgaagtcgacgttagaatatgtttggtttcgtatttagtttatcgtatttttagcgcgcg

SEQ ID NO: 1287 - DNA, 2 bp, Artificial Sequence
  Description of Artificial Sequence: Synthetic oligonucleotide
cg

SEQ ID NO: 1288 - DNA, 2 bp, Artificial Sequence
  Description of Artificial Sequence: Synthetic oligonucleotide
cg

SEQ ID NO: 1289 - DNA, 2 bp, Artificial Sequence
  Description of Artificial Sequence: Synthetic oligonucleotide
cg

SEQ ID NO: 1290 - DNA, 2 bp, Artificial Sequence
  Description of Artificial Sequence: Synthetic oligonucleotide
cg

SEQ ID NO: 1291 - DNA, 2 bp, Artificial Sequence
  Description of Artificial Sequence: Synthetic oligonucleotide
cg

SEQ ID NO: 1292 - DNA, 2 bp, Artificial Sequence
  Description of Artificial Sequence: Synthetic oligonucleotide
cg

SEQ ID NO: 1293 - DNA, 14 bp, Artificial Sequence
  Description of Artificial Sequence: Synthetic oligonucleotide
cgcgttttagcgcg

SEQ ID NO: 1294 - DNA, 2 bp, Artificial Sequence
  Description of Artificial Sequence: Synthetic oligonucleotide
cg

SEQ ID NO: 1295 - DNA, 2 bp, Artificial Sequence
  Description of Artificial Sequence: Synthetic oligonucleotide
cg

SEQ ID NO: 1296 - DNA, 2 bp, Artificial Sequence
  Description of Artificial Sequence: Synthetic oligonucleotide
cg

SEQ ID NO: 1297 - DNA, 125 bp, Artificial Sequence
  Description of Artificial Sequence: Synthetic polynucleotide
cggttttatttatttgtttcgaagagtggttttagttttgcgtttttttttgcgattttatatatagggatagttttaggtatagttttagtagtaggagtatggcggggcgagggcgcgggacg

SEQ ID NO: 1298 - DNA, 2 bp, Artificial Sequence
  Description of Artificial Sequence: Synthetic oligonucleotide
cg

SEQ ID NO: 1299 - DNA, 131 bp, Artificial Sequence
  Description of Artificial Sequence: Synthetic polynucleotide
cggggtgtgaagtggcggcgggtagaggggttcgtaggggttgggattcgcgtgtttttttttgtttcggtgcggagtacgatgtgttcgggcgggggcgaggacgttcgggaggggttgggttgcgtacg

SEQ ID NO: 1300 - DNA, 94 bp, Artificial Sequence
  Description of Artificial Sequence: Synthetic oligonucleotide
cgggtttgttttcggtttcgttcggagggtgtgcgggttttcgtttcgttggtttcgtttgtttattacggcgcgtttaaatttacgcggttcg

SEQ ID NO: 1301 - DNA, 2 bp, Artificial Sequence
  Description of Artificial Sequence: Synthetic oligonucleotide
cg

SEQ ID NO: 1302 - DNA, 2 bp, Artificial Sequence
  Description of Artificial Sequence: Synthetic oligonucleotide
cg

SEQ ID NO: 1303 - DNA, 27 bp, Artificial Sequence
  Description of Artificial Sequence: Synthetic oligonucleotide
cgcgatggggaggggaatatttgcgcg

SEQ ID NO: 1304 - DNA, 164 bp, Artificial Sequence
  Description of Artificial Sequence: Synthetic polynucleotide
cgagattagaggggaaattcgaaaaagtaagtttttgcggtagtagttaggaaatattcgttaggaattggttgcgattttaattttagcggttcgaagttttagtttttttatttttatcgcggtagagtcgttttcgtagatatttttcgaggagaatcgcg

SEQ ID NO: 1305 - DNA, 2 bp, Artificial Sequence
  Description of Artificial Sequence: Synthetic oligonucleotide
cg

SEQ ID NO: 1306 - DNA, 2 bp, Artificial Sequence
  Description of Artificial Sequence: Synthetic oligonucleotide
cg

SEQ ID NO: 1307 - DNA, 68 bp, Artificial Sequence
  Description of Artificial Sequence: Synthetic oligonucleotide
cgttgggttcgtcgaggtcggggtttttttatgggagggaggtggttgcggcggaatttttagatgcg

SEQ ID NO: 1308 - DNA, 508 bp, Artificial Sequence
  Description of Artificial Sequence: Synthetic polynucleotide
cggcggtagcgggagttcgagcgttgcgcgtttattatggtcgtttagggagagttcggttatttggcggcgtagtcggatttcggttttaatagcgagcgtagtatcgattttttagtgttcggtttcgaggacgatttggtcgtcggggcgattttgtatagttcggagtggagcgaggagcgttttcgcgtggataggaagaaatttgaggttatgttataaggtaggtatttttcgtgttttcggatttttcgattgagtttttaattttttttcggatatttttatcgcgcgtttcggcgttcgttattttagtttacggtcggtcggtttagttttaggttcgttttttcgcggagtcggaggatatttagggattggagatttcgcgggattttttatttttttacgttttttagatttttaggcgttgggggttttgtgcgaatttgattggttttagaaaagtcgaaggtcgagtttgtattggcgcgtttaagttgcg

SEQ ID NO: 1309 - DNA, 2 bp, Artificial Sequence
  Description of Artificial Sequence: Synthetic oligonucleotide
cg

SEQ ID NO: 1310 - DNA, 2 bp, Artificial Sequence
  Description of Artificial Sequence: Synthetic oligonucleotide
cg

SEQ ID NO: 1311 - DNA, 2 bp, Artificial Sequence
  Description of Artificial Sequence: Synthetic oligonucleotide
cg

SEQ ID NO: 1312 - DNA, 2 bp, Artificial Sequence
  Description of Artificial Sequence: Synthetic oligonucleotide
cg

SEQ ID NO: 1313 - DNA, 4 bp, Artificial Sequence
  Description of Artificial Sequence: Synthetic oligonucleotide
cgcg

SEQ ID NO: 1314 - DNA, 2 bp, Artificial Sequence
  Description of Artificial Sequence: Synthetic oligonucleotide
cg

SEQ ID NO: 1315 - DNA, 2 bp, Artificial Sequence
  Description of Artificial Sequence: Synthetic oligonucleotide
cg

SEQ ID NO: 1316 - DNA, 9 bp, Artificial Sequence
  Description of Artificial Sequence: Synthetic oligonucleotide
cgtgtagcg

SEQ ID NO: 1317 - DNA, 2 bp, Artificial Sequence
  Description of Artificial Sequence: Synthetic oligonucleotide
cg

SEQ ID NO: 1318 - DNA, 2 bp, Artificial Sequence
  Description of Artificial Sequence: Synthetic oligonucleotide
cg

SEQ ID NO: 1319 - DNA, 396 bp, Artificial Sequence
  Description of Artificial Sequence: Synthetic polynucleotide
tgaggacgaggaggaagaggaggaggaagaagaagaagaggaagaggaggaggaggaggaggaggacgcgtttaggttgagatggttcgcgtggatattgttatttattttaagattgttgttttcgtcgtcgtcgtcgtcgtcgttgttgtcgtcgtcgtcgtcgttattatttgttatagttagtaacgggtagtcggcgtaggggttcgggggagtttttttcgtcgttagcgttattttaaatatttattaatagttatattgttgttattgttgtcgtcgtcgtcgtcgtcgtggagcgcgggaggggggcggggaggcgtttgggttcggggcgttgtgcgcgatttggcggggtgcgtcgagatatatatagcgagtcgtcgtcgttcg

SEQ ID NO: 1320 - DNA, 2 bp, Artificial Sequence
  Description of Artificial Sequence: Synthetic oligonucleotide
cg

SEQ ID NO: 1321 - DNA, 70 bp, Artificial Sequence
  Description of Artificial Sequence: Synthetic oligonucleotide
cgggtcgttatttgtttatttgttttatttaggatatttttttaaataatttttaagtggaaaaattacg

SEQ ID NO: 1322 - DNA, 2 bp, Artificial Sequence
  Description of Artificial Sequence: Synthetic oligonucleotide
cg

SEQ ID NO: 1323 - DNA, 68 bp, Artificial Sequence
  Description of Artificial Sequence: Synthetic oligonucleotide
cgcgggggacgcggggcgcggcgcgttgagcgcgggtgtcgaggttggagggcgcggtcgggttttcg

SEQ ID NO: 1324 - DNA, 88 bp, Artificial Sequence
  Description of Artificial Sequence: Synthetic oligonucleotide
cgagggtcggttcgtttttggggattcgcggatgtcgcgagggggcgtcgcgttattgaaggttgggacgggggcggtgcgcggggcg

SEQ ID NO: 1325 - DNA, 2 bp, Artificial Sequence
  Description of Artificial Sequence: Synthetic oligonucleotide
cg

SEQ ID NO: 1326 - DNA, 2 bp, Artificial Sequence
  Description of Artificial Sequence: Synthetic oligonucleotide
cg

SEQ ID NO: 1327 - DNA, 87 bp, Artificial Sequence
  Description of Artificial Sequence: Synthetic oligonucleotide
cgagttgtttcgtttttttattttgggggcgaagaagggtcggggagtgggggaaagcgggaggcgtcgcggtttgggaggttttcg

SEQ ID NO: 1328 - DNA, 45 bp, Artificial Sequence
  Description of Artificial Sequence: Synthetic oligonucleotide
cgagtttttgcgttgtttttgtcgtcggagttcgggtttgttacg

SEQ ID NO: 1329 - DNA, 2 bp, Artificial Sequence
  Description of Artificial Sequence: Synthetic oligonucleotide
cg

SEQ ID NO: 1330 - DNA, 173 bp, Artificial Sequence
  Description of Artificial Sequence: Synthetic polynucleotide
cggttggaatttttttaagtattgttttgagtttatttttaaatgaaagggggaaaaatttaaattagattagaatttgaaatagttgaaatagttatcgatttttagtttgtttttaagtttggtagagattgtgaaagttttaattttttcgcgatgttagttacggttcg

SEQ ID NO: 1331 - DNA, 2 bp, Artificial Sequence
  Description of Artificial Sequence: Synthetic oligonucleotide
cg

SEQ ID NO: 1332 - DNA, 48 bp, Artificial Sequence
  Description of Artificial Sequence: Synthetic oligonucleotide
cgaagacgagacgtagagttttaattgtagttagagataaaggtttcg

SEQ ID NO: 1333 - DNA, 2 bp, Artificial Sequence
  Description of Artificial Sequence: Synthetic oligonucleotide
cg

SEQ ID NO: 1334 - DNA, 2 bp, Artificial Sequence
  Description of Artificial Sequence: Synthetic oligonucleotide
cg

SEQ ID NO: 1335 - DNA, 36 bp, Artificial Sequence
  Description of Artificial Sequence: Synthetic oligonucleotide
cgatcgtggcgttagtttttcgttttttttgtttcg

SEQ ID NO: 1336 - DNA, 2 bp, Artificial Sequence
  Description of Artificial Sequence: Synthetic oligonucleotide
cg

SEQ ID NO: 1337 - DNA, 2 bp, Artificial Sequence
  Description of Artificial Sequence: Synthetic oligonucleotide
cg

SEQ ID NO: 1338 - DNA, 2 bp, Artificial Sequence
  Description of Artificial Sequence: Synthetic oligonucleotide
cg

SEQ ID NO: 1339 - DNA, 2 bp, Artificial Sequence
  Description of Artificial Sequence: Synthetic oligonucleotide
cg

SEQ ID NO: 1340 - DNA, 2 bp, Artificial Sequence
  Description of Artificial Sequence: Synthetic oligonucleotide
cg

SEQ ID NO: 1341 - DNA, 97 bp, Artificial Sequence
  Description of Artificial Sequence: Synthetic oligonucleotide
cgtttgtaaggacgggagtcggggagggtgtagggcgagtttaaaggacgggtagagtaagtttcgggaagaggtaggggttttttttttcgggtcg

SEQ ID NO: 1342 - DNA, 2 bp, Artificial Sequence
  Description of Artificial Sequence: Synthetic oligonucleotide
cg

SEQ ID NO: 1343 - DNA, 2 bp, Artificial Sequence
  Description of Artificial Sequence: Synthetic oligonucleotide
cg

SEQ ID NO: 1344 - DNA, 67 bp, Artificial Sequence
  Description of Artificial Sequence: Synthetic oligonucleotide
cgttagatttttatagttttttatacgttatttttattgttttagggaattataagtataggtatcg

SEQ ID NO: 1345 - DNA, 2 bp, Artificial Sequence
  Description of Artificial Sequence: Synthetic oligonucleotide
cg

SEQ ID NO: 1346 - DNA, 29 bp, Artificial Sequence
  Description of Artificial Sequence: Synthetic oligonucleotide
cgatagggtagagggttagtagttattcg

SEQ ID NO: 1347 - DNA, 49 bp, Artificial Sequence
  Description of Artificial Sequence: Synthetic oligonucleotide
cggtcgagtttaagtggttgaagcgcggacgaggatgcgcggggtttcg

SEQ ID NO: 1348 - DNA, 188 bp, Artificial Sequence
  Description of Artificial Sequence: Synthetic polynucleotide
cgggagttcgaagtcgtttcgagcgggggtgggcggtgagcggattttcgggtgttgattaggtgtttggtggtagagtagggaaggggggaacggacgtcgattttagggattttttattcgtttacgttttttggcgttggttatacgtcgtcgttttagtattaattggaggtttttagtggacg

SEQ ID NO: 1349 - DNA, 4 bp, Artificial Sequence
  Description of Artificial Sequence: Synthetic oligonucleotide
cgcg

SEQ ID NO: 1350 - DNA, 4 bp, Artificial Sequence
  Description of Artificial Sequence: Synthetic oligonucleotide
cgcg

SEQ ID NO: 1351 - DNA, 113 bp, Artificial Sequence
  Description of Artificial Sequence: Synthetic polynucleotide
cggtcgtgggcggttgcggcgcggtcgcggcgaggggcgagcggggttggtttcgtcgttcgggcgagagtatttttttgggggttaattttgcggtttcgtttttattcgcg

SEQ ID NO: 1352 - DNA, 208 bp, Artificial Sequence
  Description of Artificial Sequence: Synthetic polynucleotide
cggcggatggagacgggagggaggttgcgaggtcgttcgaggagagattaaggttttagaaacggagaagcgggcgttttgcgggaggcggcggcgttgtcgttggtcgttaagggcgggaagtgttttgggatttttattaggggtcgcgagtttcgagcgttaaattttcgcggcgttcgtttagcgcgttgttgtggcgggcgcg

SEQ ID NO: 1353 - DNA, 96 bp, Artificial Sequence
  Description of Artificial Sequence: Synthetic oligonucleotide
cggttcgttcgttttttagtagttttggggtgttcggggcggttttgtaagcgggagagagcggcgaggcggcggcgtcgagtgcggggggatgcg

SEQ ID NO: 1354 - DNA, 236 bp, Artificial Sequence
  Description of Artificial Sequence: Synthetic polynucleotide
cggtgagtattcgtcgtggggaagggttttggggatttattggaggtcgcggttcgtagtagttaggggtcgagttacggttacggacgttttggtgtttcggttcgtgtcgggtttttaggcggaggaggcgttcgttgggtttagattttcgattttagtttcggtttttcggcgtttgggttgcgcggagtttttgtttcgcgtttcggatttttacgcgtagtttttacgcg

SEQ ID NO: 1355 - DNA, 211 bp, Artificial Sequence
  Description of Artificial Sequence: Synthetic polynucleotide
cgtttttagtcgtgttttggttgcgtagttggaaaggttgagtagtttattgttgtttttttgttcggttttggatatatcgtttgaatttttgggcgtttttgttgttaagtgggggatagtattatttattggggaggaaaattttaggaatgtggattttggggttacgtaggggttgggaagtgaagggtagggaacgcgggcggcg

SEQ ID NO: 1356 - DNA, 193 bp, Artificial Sequence
  Description of Artificial Sequence: Synthetic polynucleotide
cgcgcgtcgaagttgtgacggtttattaagtagagatttgcgaggtatatagagagggaatgaggcggaatcgttcgggggttcgttgatattgtagagtttttcgtagtatcgttgttttaaatttcgtttttttaggcgtgcgcgtatagcgagttagaggaggtttcgtttcgatttggggtttttcgcg

SEQ ID NO: 1357 - DNA, 4 bp, Artificial Sequence
  Description of Artificial Sequence: Synthetic oligonucleotide
cgcg

SEQ ID NO: 1358 - DNA, 199 bp, Artificial Sequence
  Description of Artificial Sequence: Synthetic polynucleotide
cgagtaggaggatttaacgaatttagtttgtggatatgttttaatttttattttcgttttttttaggtttgtttaggtgaggatgatgggagggaaaagcggtgtatagtcgtaatattggtattttgtaagagtcgtcggggtattgatatagagggatatcgtattggagatgcggtgtttacggagatttattgcg

SEQ ID NO: 1359 - DNA, 87 bp, Artificial Sequence
  Description of Artificial Sequence: Synthetic oligonucleotide
cggttagtagaggcggcgtttggttttggatgttgtagcggagacgttaaggagattgaatgtagggagcgaggcgtagcggtcgcg

SEQ ID NO: 1360 - DNA, 68 bp, Artificial Sequence
  Description of Artificial Sequence: Synthetic oligonucleotide
cgcgcgagagtgtttagttgggaaatgtagtttcgaattaatatcgtatgttttataattagtttacg

SEQ ID NO: 1361 - DNA, 61 bp, Artificial Sequence
  Description of Artificial Sequence: Synthetic oligonucleotide
cgtttttggtatttagggaatggtttgtaaattttaatgtattatagattagtttttatcg

SEQ ID NO: 1362 - DNA, 40 bp, Artificial Sequence
  Description of Artificial Sequence: Synthetic oligonucleotide
cgggtgttttgtcgttgtcgtttttgttgtcgtcgattcg

SEQ ID NO: 1363 - DNA, 647 bp, Artificial Sequence
  Description of Artificial Sequence: Synthetic polynucleotide
cgagcggcgaggcgagggcgagcgcgtcgaggaagggcgggagaggcgcggagtttggtcgcgtcgcgttgcgtcgagcgtcgggtttttttcgcgagtttttcgggttcgcgcgcgcgttttttattgttttcgtttttcgcgcggcgcgtgttttttatttttcgtcgcgcgttttcgtattcgttcggttttacgcggcgcgcgtttgttttggcggtagcggcggcggcggcggcgcgttttttttcgaacgtcgtttttagggttgttggttgcgttttttattgtttcgcggttgttgttcggggtgggcggcgaggcgggggggaggtgtcggtttggtcgtcggggagggtttatcgttcgggcggatttttattgcgagagcgatgcgggtttaggcgcggcgcgcgggggttgtagggcgtttagtattgggggttgtcggcgcgcgggggtttttttttggtttttaggtattcgttgttgttgggcgtttttcgtattttcggttattatggatatttcgttttttcgtcgtttttttcgcgtatttcgggaggtcgtcggggcggtagtagcggcgcggtttcgcgggtgtttaggtgatcggttcggtagcggtagagtagtggtagtagtcg

SEQ ID NO: 1364 - DNA, 327 bp, Artificial Sequence
  Description of Artificial Sequence: Synthetic polynucleotide
cgcggaggagggtcgggttgattgtcgtcgttgagttgttttcggacgggagcgtttgtttacggtatttattttttttagcggtggaaatgtggagaagtaagtgggaggcggtgtcgggaattgattttttttaaaacggtcggcgtcgttgttttgaaatgggcggttaagtgtttgtgggattaagggcggttttagagatgttcggaaaatcgttgttacggttagagtgcggcgtagacgcggtagagttggaggtgttcgcggtgtaggttgttgtttacgtcgtttaggttaggtgttgagggtttagttcgcgtttcg

SEQ ID NO: 1365 - DNA, 2 bp, Artificial Sequence
  Description of Artificial Sequence: Synthetic oligonucleotide
cg

SEQ ID NO: 1366 - DNA, 324 bp, Artificial Sequence
  Description of Artificial Sequence: Synthetic polynucleotide
cgtagttgttgtagtcgttgcggttgtcgttatttggtaggaggtatagggtatgggtgagggaggttgcggtagcggttacgagttgttgaggaagttagattgtaggtatttggggggcgttaggtagtcgtagtcgtcggtttcggcgttcgttacgtcgtattcgtttgcggcgttttcggtttcgaagagttttttgtcgggttggaagtgcgcgggcggcggtcggaagggtttttttatgcggcggcggcgtcggtagttgtttttttcgaatatgttttcgtaggtcgggtttagcgtttagtagttgtttttgcg

SEQ ID NO: 1367 - DNA, 77 bp, Artificial Sequence
  Description of Artificial Sequence: Synthetic oligonucleotide
cggcgtagcggcgggaattcgaggtcgagcgtcgcggcggtagcgttagaagcgtatttatcgggtacggcgaggcg

SEQ ID NO: 1368 - DNA, 158 bp, Artificial Sequence
  Description of Artificial Sequence: Synthetic polynucleotide
cgttttggattttcgaagttagttttttgcgtagcggattagagaggtttattcgcggacgttaatttaatttttgggcggggttcgggggttgagtagaaggcgaggtttggggagtacggataattttgagggttgtttgtgtcggggtgggagcg

SEQ ID NO: 1369 - DNA, 79 bp, Artificial Sequence
  Description of Artificial Sequence: Synthetic oligonucleotide
cgtttttaaaaattaaataaattaataagagaattaattaataggtagcgttgcgatcgttaggagcgcggagcgcgcg

SEQ ID NO: 1370 - DNA, 137 bp, Artificial Sequence
  Description of Artificial Sequence: Synthetic polynucleotide
cgttttttttgatttttaaggttagaaagatttattatttttttcgagagggcgtagttatagatttattagagagggcgggtagggtgtcggaagttagagaacggcgtttcgcgtttttttatcgttttagggcg

SEQ ID NO: 1371 - DNA, 112 bp, Artificial Sequence
  Description of Artificial Sequence: Synthetic polynucleotide
cgcgggttatgtattgttgttggtgtttattatgtttaattttttggattataagtggtataaggagtcgttgtagtagtgtaatttcgatgggtcgttgggtgtcgtagcg

SEQ ID NO: 1372 - DNA, 2 bp, Artificial Sequence
  Description of Artificial Sequence: Synthetic oligonucleotide
cg

SEQ ID NO: 1373 - DNA, 2 bp, Artificial Sequence
  Description of Artificial Sequence: Synthetic oligonucleotide
cg

SEQ ID NO: 1374 - DNA, 282 bp, Artificial Sequence
  Description of Artificial Sequence: Synthetic polynucleotide
cgtgggtagggcgtcgtagtttgcgtagtttcgaggatttcgcgtcgttttttcgagttagggtttttaggagcgggtcgcgtaggagacgttagagggggttgttagcggttgttgggagaacgggttacggaaatagttttttttaaagtcggggttatcgtggggtgggcgagttcgtttttttaggtcgggggcgcggattagaggggacgtgtgtagacggtcgcggttagttttatttcgttcgggcggagacgtatagttggagttggagggtcg

SEQ ID NO: 1375 - DNA, 81 bp, Artificial Sequence
  Description of Artificial Sequence: Synthetic oligonucleotide
cggttgttaattcgtttaatttgttgcgcgggtggtcgtttagagtcgcgggtttgcggggcgtttttcgtcgtcgcgtcg

SEQ ID NO: 1376 - DNA, 53 bp, Artificial Sequence
  Description of Artificial Sequence: Synthetic oligonucleotide
cggtcgtggagattttaatcgagtttacgttggcgtaaaaggtaaaagtcgcg

SEQ ID NO: 1377 - DNA, 40 bp, Artificial Sequence
  Description of Artificial Sequence: Synthetic oligonucleotide
cgcgtcgagggggcgttagcggggacgtgagttggcgtcg

SEQ ID NO: 1378 - DNA, 206 bp, Artificial Sequence
  Description of Artificial Sequence: Synthetic polynucleotide
cggtagtttgagcgtttcggatggttcgcggcggggcggtttgtaagagcgacgcgcggttgttgttggggcgggacgcgttgcggtcggcgttcgttttgttggttttcgtcgtgttgttgggcgtcgcgttcggtttcggtttcggtttttggtttggttgtcgcgcgggtcgttagcgtacgcgatattaggtgggtcggtcg

SEQ ID NO: 1379 - DNA, 38 bp, Artificial Sequence
  Description of Artificial Sequence: Synthetic oligonucleotide
cgagggtacggcggtcgtcgtttcgcgtagtagtagcg

SEQ ID NO: 1380 - DNA, 5 bp, Artificial Sequence
  Description of Artificial Sequence: Synthetic oligonucleotide
cggcg

SEQ ID NO: 1381 - DNA, 25 bp, Artificial Sequence
  Description of Artificial Sequence: Synthetic oligonucleotide
cgagcgaatgtaacgcgtatatacg

SEQ ID NO: 1382 - DNA, 79 bp, Artificial Sequence
  Description of Artificial Sequence: Synthetic oligonucleotide
cgtttttttttttttttaaaaaaaaaatttaaataatttttaaataatatttaataggaaagaagaaggaaaaggagcg

SEQ ID NO: 1383 - DNA, 33 bp, Artificial Sequence
  Description of Artificial Sequence: Synthetic oligonucleotide
cgagggtaacggtcgaggcgttacgcggggtcg

SEQ ID NO: 1384 - DNA, 132 bp, Artificial Sequence
  Description of Artificial Sequence: Synthetic polynucleotide
cgtaggttaggcggtcgtgggtcgagttggttatgattattttttcgcgggcgttttgtttgggcgagtgtttttcgtagcgttcgtatttcgtttttttcgtgtgtagtttcgcgtcgtcgtcgttcgtcg

SEQ ID NO: 1385 - DNA, 32 bp, Artificial Sequence
  Description of Artificial Sequence: Synthetic oligonucleotide
cgttttcggggtagaggagggggtgttaggcg

SEQ ID NO: 1386 - DNA, 2 bp, Artificial Sequence
  Description of Artificial Sequence: Synthetic oligonucleotide
cg

SEQ ID NO: 1387 - DNA, 2 bp, Artificial Sequence
  Description of Artificial Sequence: Synthetic oligonucleotide
cg

SEQ ID NO: 1388 - DNA, 20 bp, Artificial Sequence
  Description of Artificial Sequence: Synthetic oligonucleotide
cggcgtcgttggtatattcg

SEQ ID NO: 1389 - DNA, 85 bp, Artificial Sequence
  Description of Artificial Sequence: Synthetic oligonucleotide
cggcgggcgtaggggtagggtatgattgacgcgttttttgtttgcgtttatgtgagagaaagcggtcgagggagggagcgtgtcg

SEQ ID NO: 1390 - DNA, 230 bp, Artificial Sequence
  Description of Artificial Sequence: Synthetic polynucleotide
cgtaggggtcgagaaagtggcggagaggcggtggtcgaggtttaggggcgagcgcgggttgagttggtttttgttgcgtttacgagcgatatttattttttcgttgcggacgtttcgcgggcgttaggttgggggttttgcgatcgatttttttcgttttcgaggtatcgtcgggttcgtttggtaggtagcgcgtttcgcgagttggagggtcgagtttcgcggggtcg

SEQ ID NO: 1391 - DNA, 84 bp, Artificial Sequence
  Description of Artificial Sequence: Synthetic oligonucleotide
cgtaagagttggttaaaatgtttttaggtgcgtgggggtttcggggttttagttggagttcgatattttgagattggcggttcg

SEQ ID NO: 1392 - DNA, 42 bp, Artificial Sequence
  Description of Artificial Sequence: Synthetic oligonucleotide
cgcgcgagttttttcgtttggttgagttaaaaagggatcgcg

SEQ ID NO: 1393 - DNA, 45 bp, Artificial Sequence
  Description of Artificial Sequence: Synthetic oligonucleotide
cggacgattttttttattttttcgaggacgaggaggagtacggcg

SEQ ID NO: 1394 - DNA, 26 bp, Artificial Sequence
  Description of Artificial Sequence: Synthetic oligonucleotide
cgcgggataagggatgttggcgggcg

SEQ ID NO: 1395 - DNA, 50 bp, Artificial Sequence
  Description of Artificial Sequence: Synthetic oligonucleotide
cgaggtttttttcgcggcgcgcggtagttttagtttttatttaaatttcg

SEQ ID NO: 1396 - DNA, 56 bp, Artificial Sequence
  Description of Artificial Sequence: Synthetic oligonucleotide
cgttggtttattcgcgtgtacgtttattttttacgcgcgtttttggtttagaagcg

SEQ ID NO: 1397 - DNA, 44 bp, Artificial Sequence; identical to SEQ ID NO: 113
  Description of Artificial Sequence: Synthetic oligonucleotide

SEQ ID NO: 1398 - DNA, 2 bp, Artificial Sequence
  Description of Artificial Sequence: Synthetic oligonucleotide
cg

SEQ ID NO: 1399 - DNA, 9 bp, Artificial Sequence
  Description of Artificial Sequence: Synthetic oligonucleotide
cggaaggcg

SEQ ID NO: 1400 - DNA, 58 bp, Artificial Sequence
  Description of Artificial Sequence: Synthetic oligonucleotide
cgttcgtttattcgttaggtaggcggtggtgtcgatttatttgagtagttgtttcgcg

SEQ ID NO: 1401 - DNA, 151 bp, Artificial Sequence
  Description of Artificial Sequence: Synthetic polynucleotide
cgtattggtttttttcgttttcgttcgtacgaaagttttgttcgacgtttgtagttagtatcgttcgtattgtttagggagggtttgcgtcgagatttagtggtcgagtgagttatagagtcgttggttttggggacgttgttttttatcg

SEQ ID NO: 1402 - DNA, 17 bp, Artificial Sequence
  Description of Artificial Sequence: Synthetic oligonucleotide
cggttttggggagttcg

SEQ ID NO: 1403 - DNA, 70 bp, Artificial Sequence
  Description of Artificial Sequence: Synthetic oligonucleotide
cgtagaggggttagtaattttatgggtggtggggttttttatttttggacgtagcggggagtagcgggcg

SEQ ID NO: 1404 - DNA, 59 bp, Artificial Sequence
  Description of Artificial Sequence: Synthetic oligonucleotide
cggcgtttagcgtttaagcgttaattcgttgaaagttttttagcgaaattttagggacg

SEQ ID NO: 1405 - DNA, 25 bp, Artificial Sequence
  Description of Artificial Sequence: Synthetic oligonucleotide
cggttcggatagaggttatttagcg

SEQ ID NO: 1406 - DNA, 57 bp, Artificial Sequence
  Description of Artificial Sequence: Synthetic oligonucleotide
cgtttttcgttatttgatattagttaggtagtttttagggttagagcgttagcgtcg

SEQ ID NO: 1407 - DNA, 111 bp, Artificial Sequence
  Description of Artificial Sequence: Synthetic polynucleotide
cgtttagggttggggttcggtgggaattttttcgtgttcgaagggacgatttcgttagagagtttttcgatttttgtatttatcgtttttggtaggacgtggagttgttcg

SEQ ID NO: 1408 - DNA, 211 bp, Artificial Sequence
  Description of Artificial Sequence: Synthetic polynucleotide
cgttattgtcgtcgttggcgttttgtttttggaattttttagtaagatggtatttattgtttgttttttttcgattagtatttttagtcgcgttttttttttttcgggatacgtattagttatatattgtggggagaagatgggttatgtaaatgtaagttaacgcgtttttttagttatttttgtataatgtaataggaatagcgattcg

SEQ ID NO: 1409 - DNA, 75 bp, Artificial Sequence
  Description of Artificial Sequence: Synthetic oligonucleotide
cgtttttattatttttttaaatattgtagtaagttgtagtaaggcgggtaaatatcgatagcgcgcgtgggggcg

SEQ ID NO: 1410 - DNA, 2 bp, Artificial Sequence
  Description of Artificial Sequence: Synthetic oligonucleotide
cg

SEQ ID NO: 1411 - DNA, 66 bp, Artificial Sequence
  Description of Artificial Sequence: Synthetic oligonucleotide
cggttatttgtttttcgttttcggggcgtcgtttagtttcgcgttaggcgttttttttagcgttcg

SEQ ID NO: 1412 - DNA, 2 bp, Artificial Sequence
  Description of Artificial Sequence: Synthetic oligonucleotide
cg

SEQ ID NO: 1413 - DNA, 163 bp, Artificial Sequence
  Description of Artificial Sequence: Synthetic polynucleotide
cgcgcgtttttcggcgggtcggcgggttcggaagtttcgttgttcgggtcgggtttttaagttcgtagtcgttttgattaaaataggtatcgcgacggcggcggtaggcggcggtagttagggttggggtcgtatcgcgtacgcgtatgcgttcgtcgtttcg

SEQ ID NO: 1414 - DNA, 99 bp, Artificial Sequence
  Description of Artificial Sequence: Synthetic oligonucleotide
cgtttttgttttggagcgcggtcgggagtaaaatcgtaggagtgggagggtagcgagttagttggatttcgagtcgcggagcgcgttggttttgtttcg

SEQ ID NO: 1415 - DNA, 96 bp, Artificial Sequence
  Description of Artificial Sequence: Synthetic oligonucleotide
cgcgttttcgtaggcggtattgttcgcggcgcggcgtgtgtatcgagcgagtgaaggtatgtgtggcgggcgcggttggagttgtcgtcgtcgtcg

SEQ ID NO: 1416 - DNA, 4 bp, Artificial Sequence
  Description of Artificial Sequence: Synthetic oligonucleotide
cgcg

SEQ ID NO: 1417 - DNA, 16 bp, Artificial Sequence
  Description of Artificial Sequence: Synthetic oligonucleotide
cggcgagattggtacg

SEQ ID NO: 1418 - DNA, 2 bp, Artificial Sequence
  Description of Artificial Sequence: Synthetic oligonucleotide
cg

SEQ ID NO: 1419 - DNA, 141 bp, Artificial Sequence
  Description of Artificial Sequence: Synthetic polynucleotide
cgcggttgatggttgacgcgttgcgcggttgcgtgtttgttttttacggcgtggtggagcgcgacggcgaaagttatttgtagttgtaggatttgttcgatggtttcgacggattttgtgtgttcgattgtaaaatgggcg

SEQ ID NO: 1420 - DNA, 2 bp, Artificial Sequence
  Description of Artificial Sequence: Synthetic oligonucleotide
cg

SEQ ID NO: 1421 - DNA, 37 bp, Artificial Sequence
  Description of Artificial Sequence: Synthetic oligonucleotide
cgtttttaattaatcgtataaaattcgtaatatttcg

SEQ ID NO: 1422 - DNA, 52 bp, Artificial Sequence
  Description of Artificial Sequence: Synthetic oligonucleotide
cgggtcggggtatttggcgttttgtgtgggtggcgggagcggggacgtttcg

SEQ ID NO: 1423 - DNA, 2 bp, Artificial Sequence
  Description of Artificial Sequence: Synthetic oligonucleotide
cg

SEQ ID NO: 1424 - DNA, 7 bp, Artificial Sequence
  Description of Artificial Sequence: Synthetic oligonucleotide
cggagcg

SEQ ID NO: 1425 - DNA, 2 bp, Artificial Sequence
  Description of Artificial Sequence: Synthetic oligonucleotide
cg

SEQ ID NO: 1426 - DNA, 4 bp, Artificial Sequence
  Description of Artificial Sequence: Synthetic oligonucleotide
cgcg

SEQ ID NO: 1427 - DNA, 17 bp, Artificial Sequence
  Description of Artificial Sequence: Synthetic oligonucleotide
cgagttggggcgggacg

SEQ ID NO: 1428 - DNA, 136 bp, Artificial Sequence
  Description of Artificial Sequence: Synthetic polynucleotide
cgcgagttttttgacgcggggattagttatgaatcgggggtgtgtgtttgtttttagagatttggtaaggtgcggagttttttagaagtgcggttaagcggtagcggagacggcgagttaggaattttttttcgcg

SEQ ID NO: 1429 - DNA, 31 bp, Artificial Sequence
  Description of Artificial Sequence: Synthetic oligonucleotide
cgcgtttagcgtttcgtttattttttggtcg

SEQ ID NO: 1430 - DNA, 25 bp, Artificial Sequence
  Description of Artificial Sequence: Synthetic oligonucleotide
cgtgtattttgaggtttggttggcg

SEQ ID NO: 1431 - DNA, 12 bp, Artificial Sequence
  Description of Artificial Sequence: Synthetic oligonucleotide
cgttgacgagcg

SEQ ID NO: 1432 - DNA, 6 bp, Artificial Sequence
  Description of Artificial Sequence: Synthetic oligonucleotide
cgtacg

SEQ ID NO: 1433 - DNA, 199 bp, Artificial Sequence
  Description of Artificial Sequence: Synthetic polynucleotide
cgcgttcgcggtcgcggtcgttgtatggcgttgagatggcgggggcgtcgcgcggcggaggcggcggcggaggcggcgcgggcgagttcgggggcgtcgagcgggcggtcgggataagtcgtcggcgcgggtttcgggcgtgcgacgaggagttcgtttgtttagagttggaggcgttgtttcgcggttatacgttgcg

SEQ ID NO: 1434 - DNA, 91 bp, Artificial Sequence
  Description of Artificial Sequence: Synthetic oligonucleotide
cggtttcgggtgtagggtggcgggttcggcggcgcgcgttttttttttttttttggcggttcgtacgtgtcgttcgcgtcgcgtttttacg

SEQ ID NO: 1435 - DNA, 108 bp, Artificial Sequence
  Description of Artificial Sequence: Synthetic polynucleotide
cgcgtttttattgttttatttttttcgtttttggagtttttcggtgattttattatagtttttgttattttgtgatttgtaggtattgggagatttatagggaggacg

SEQ ID NO: 1436 - DNA, 13 bp, Artificial Sequence
  Description of Artificial Sequence: Synthetic oligonucleotide
cgtatcgatttcg

SEQ ID NO: 1437 - DNA, 176 bp, Artificial Sequence
  Description of Artificial Sequence: Synthetic polynucleotide
cggttcgttgggtaaggcgttcgagaaagcgtttggcgggaggaggtgcgcggttttttgttttaggcggttcgggtgttcgttttatgcggggcgagcgttcggtcgattttcgtcggggcggagtttgaggggtggttgatttatgtacggggattgttatttcgtcgttttcg

SEQ ID NO: 1438 - DNA, 2 bp, Artificial Sequence
  Description of Artificial Sequence: Synthetic oligonucleotide
cg

SEQ ID NO: 1439 - DNA, 157 bp, Artificial Sequence
  Description of Artificial Sequence: Synthetic polynucleotide
cgagaagtttcgcgggagacggcggtttttaaagttattttgggtcgcgggagcgcgggatcggggttgcgggcgtcgagagcgcgtcgtttgtcgttttcgtgcgtcgtcgtcgtttttgcgcgacgtttttcggttaggtttgggaaagcgttcg

SEQ ID NO: 1440 - DNA, 66 bp, Artificial Sequence
  Description of Artificial Sequence: Synthetic oligonucleotide
cgcgaatcgttaggggttttcgcgttttttttttatttaggttttttgtttttttcgtcgcggtcg

SEQ ID NO: 1441 - DNA, 498 bp, Artificial Sequence
  Description of Artificial Sequence: Synthetic polynucleotide
cgtcgtcgcgtcgatcggtcgcgttttcgggattttttgggtcggtcgcgttttcggttttttttttcgtcgcgtttgtgcgtacgcgtagacgtcgtaagttttacgagttgtacgcggtcggcgtttcgtttttttcgtcgttcggttacgttttcgcgttcgagtcgtcgcggttcggaagcggaagcggaagcggtttcggtttcgtttttgcgcgttcgttcggtttcgcggtcgacggttttatcgatttgagtaagaagtcgcggcgttcgtttttcggagtttcggtatcggcgttggtcgattattacgagtgtacggtttgtcgcgtgagtttttatagtttcgaggtttatttggcgtataagaagtattcgtgtttcgttgcgttatcgttcggcgcgttcggtttgttcgtcgtcgtttgtttttattgtttttcgaacggttcggtgcgcggggatttgttggagtattttcgtttggcgtacg

SEQ ID NO: 1442 - DNA, 27 bp, Artificial Sequence
  Description of Artificial Sequence: Synthetic oligonucleotide
cgcgggttcgaacgtttttcgcgtttg

SEQ ID NO: 1443 - DNA, 2 bp, Artificial Sequence
  Description of Artificial Sequence: Synthetic oligonucleotide
cg

SEQ ID NO: 1444 - DNA, 2 bp, Artificial Sequence
  Description of Artificial Sequence: Synthetic oligonucleotide
cg

SEQ ID NO: 1445 - DNA, 16 bp, Artificial Sequence
  Description of Artificial Sequence: Synthetic oligonucleotide
cgtcgtttgtttcgcg

SEQ ID NO: 1446 - DNA, 53 bp, Artificial Sequence
  Description of Artificial Sequence: Synthetic oligonucleotide
cgcggagggcgtcgaattagagtttgcggggtttgatagttttttttgcggcg

SEQ ID NO: 1447 - DNA, 4 bp, Artificial Sequence
  Description of Artificial Sequence: Synthetic oligonucleotide
cgcg

SEQ ID NO: 1448 - DNA, 2 bp, Artificial Sequence
  Description of Artificial Sequence: Synthetic oligonucleotide
cg

SEQ ID NO: 1449 - DNA, 2 bp, Artificial Sequence
  Description of Artificial Sequence: Synthetic oligonucleotide
cg

SEQ ID NO: 1450 - DNA, 2 bp, Artificial Sequence
  Description of Artificial Sequence: Synthetic oligonucleotide
cg

SEQ ID NO: 1451 - DNA, 14 bp, Artificial Sequence
  Description of Artificial Sequence: Synthetic oligonucleotide
cgtgtttatttacg

SEQ ID NO: 1452 - DNA, 186 bp, Artificial Sequence
  Description of Artificial Sequence: Synthetic polynucleotide
cggcgggaaggtttgggtgtttatagatagagttggagtttttcggtgggtggtatagataattagttggggttgttttatatgtaatttaattataggggaaataggtttaaatatcgggtgataagtagcgtaattgtttcgggtgattttgtaattttttttttattaattttttttataacg

SEQ ID NO: 1453 - DNA, 79 bp, Artificial Sequence
  Description of Artificial Sequence: Synthetic oligonucleotide
cggggtacgttcgttttcggcggggtttttcgtttcgttgtgggagtggtagtgggtgtcggggtggagaaagtacgcg

SEQ ID NO: 1454 - DNA, 49 bp, Artificial Sequence
  Description of Artificial Sequence: Synthetic oligonucleotide
cgtcgcgttcgcgtcgcgttttttgtaggtaacgggagacgttttcgcg

SEQ ID NO: 1455 - DNA, 17 bp, Artificial Sequence
  Description of Artificial Sequence: Synthetic oligonucleotide
cggatgaatcgttcgcg

SEQ ID NO: 1456 - DNA, 2 bp, Artificial Sequence
  Description of Artificial Sequence: Synthetic oligonucleotide
cg

SEQ ID NO: 1457 - DNA, 9 bp, Artificial Sequence
  Description of Artificial Sequence: Synthetic oligonucleotide
cgggttacg

SEQ ID NO: 1458 - DNA, 2 bp, Artificial Sequence
  Description of Artificial Sequence: Synthetic oligonucleotide
cg

SEQ ID NO: 1459 - DNA, 165 bp, Artificial Sequence
  Description of Artificial Sequence: Synthetic polynucleotide
cgggaacgttgtagtttggttgagcgtgatttttaggttttgtgaggaaaagtcgagcgcgttatatcgaggcgttagtcgtttattttattataaggtaaaagatttatgttgttttagttattttaaagttgggagatatattgtattttttattagatttcg

SEQ ID NO: 1460 - DNA, 14 bp, Artificial Sequence
  Description of Artificial Sequence: Synthetic oligonucleotide
cgcgcgggttagcg

SEQ ID NO: 1461 - DNA, 2 bp, Artificial Sequence
  Description of Artificial Sequence: Synthetic oligonucleotide
cg

SEQ ID NO: 1462 - DNA, 2 bp, Artificial Sequence
  Description of Artificial Sequence: Synthetic oligonucleotide
cg

SEQ ID NO: 1463 - DNA, 97 bp, Artificial Sequence
  Description of Artificial Sequence: Synthetic oligonucleotide
cgtgtgtttagggttagtagtacgtataagtgttagcgtacggtcgtcgcgtttatgtttaatgcgggtttcgttgggcgtgcgggcgtgcggggcg

SEQ ID NO: 1464 - DNA, 2 bp, Artificial Sequence
  Description of Artificial Sequence: Synthetic oligonucleotide
cg

SEQ ID NO: 1465 - DNA, 98 bp, Artificial Sequence
  Description of Artificial Sequence: Synthetic oligonucleotide
cgcggatcgcgcgttttcgtcgttttgtttttaaatttttgtcgtagtttttttttaagttagcgaatttattttttaaaattagaaattgaatttcg

SEQ ID NO: 1466 - DNA, 69 bp, Artificial Sequence
  Description of Artificial Sequence: Synthetic oligonucleotide
cggaggggcggaggaggtgttggcggcggtattgagcggcggcggcgtagggcgcgcgggtttttcgcg

SEQ ID NO: 1467 - DNA, 2 bp, Artificial Sequence
  Description of Artificial Sequence: Synthetic oligonucleotide
cg

SEQ ID NO: 1468 - DNA, 2 bp, Artificial Sequence
  Description of Artificial Sequence: Synthetic oligonucleotide
cg

SEQ ID NO: 1469 - DNA, 2 bp, Artificial Sequence
  Description of Artificial Sequence: Synthetic oligonucleotide
cg

SEQ ID NO: 1470 - DNA, 2 bp, Artificial Sequence
  Description of Artificial Sequence: Synthetic oligonucleotide
cg

SEQ ID NO: 1471 - DNA, 103 bp, Artificial Sequence
  Description of Artificial Sequence: Synthetic polynucleotide
cggttttaggacggtagggatcgcgatggagcggtttcgggggcggtcgggggacggcgcggtggcggtcggttagttcgttttttcgggggcggcgggcgcg

SEQ ID NO: 1472 - DNA, 2 bp, Artificial Sequence
  Description of Artificial Sequence: Synthetic oligonucleotide
cg

SEQ ID NO: 1473 - DNA, 21 bp, Artificial Sequence
  Description of Artificial Sequence: Synthetic oligonucleotide
cggtttttggcggcggcggcg

SEQ ID NO: 1474 - DNA, 148 bp, Artificial Sequence
  Description of Artificial Sequence: Synthetic polynucleotide
cggcgttttaaaggggaggattttgcggcgcgggtaagaggcggcgggagcgcgcggttcgggagtgtggttgtagtgcgtcgggatattagggtttcgcgtttcgtatttaagaggttttcgcgttttaatttttcgcgttcgcgcg

SEQ ID NO: 1475 - DNA, 2 bp, Artificial Sequence
  Description of Artificial Sequence: Synthetic oligonucleotide
cg

SEQ ID NO: 1476 - DNA, 2 bp, Artificial Sequence
  Description of Artificial Sequence: Synthetic oligonucleotide
cg

SEQ ID NO: 1477 - DNA, 26 bp, Artificial Sequence
  Description of Artificial Sequence: Synthetic oligonucleotide
cgtcgagaggtagcgcgtgatggtcg

SEQ ID NO: 1478 - DNA, 119 bp, Artificial Sequence
  Description of Artificial Sequence: Synthetic polynucleotide
cgtacgtttaagtgcgcgcgttgtcgtaattatggcgttttgttttggtttaagggttataagcgttattgtcgttttaaggattgtatttgcgagaagtgtatttttattatcgagcg

SEQ ID NO: 1479 - DNA, 66 bp, Artificial Sequence
  Description of Artificial Sequence: Synthetic oligonucleotide
cggttcgatttttttcgtttagtttgggttagaggaagtcgaaagcggttttagtaaggtgaggcg

SEQ ID NO: 1480 - DNA, 60 bp, Artificial Sequence
  Description of Artificial Sequence: Synthetic oligonucleotide
cgagcgaagtcgtcgtgtttgggtagaaggcgttttaggaggcgcgaggttttagtcgcg

SEQ ID NO: 1481 - DNA, 2 bp, Artificial Sequence
  Description of Artificial Sequence: Synthetic oligonucleotide
cg

SEQ ID NO: 1482 - DNA, 124 bp, Artificial Sequence
  Description of Artificial Sequence: Synthetic polynucleotide
cgttcggagcgggatttgtttgttttagtgtacgtcgcggagcgaattatcgggttggcgggggtggaggggtgtaggcgtgggggttgcgggtcgttcgggttttgggttttttttgtcgtcg

SEQ ID NO: 1483 - DNA, 2 bp, Artificial Sequence
  Description of Artificial Sequence: Synthetic oligonucleotide
cg

SEQ ID NO: 1484 - DNA, 156 bp, Artificial Sequence
  Description of Artificial Sequence: Synthetic polynucleotide
cggggtatcgcggcgttcgtcgtcgttttttcgtaggtgattatttttttgtaggtgttttcgggttttaggtggttgcgtgtttgcgttatggttgatattttgggcgagcggtatttggtgatttgtaagggcgcgacggtggaggtcgaggcg

SEQ ID NO: 1485 - DNA, 2 bp, Artificial Sequence
  Description of Artificial Sequence: Synthetic oligonucleotide
cg

SEQ ID NO: 1486 - DNA, 91 bp, Artificial Sequence
  Description of Artificial Sequence: Synthetic oligonucleotide
cgcgcgtcgtcgaaattttgttttcgtcgtcgtttatcgataggttgtggagaaggttatcgatcgatgttatcgagttatttttgaagcg

SEQ ID NO: 1487 - DNA, 2 bp, Artificial Sequence
  Description of Artificial Sequence: Synthetic oligonucleotide
cg

SEQ ID NO: 1488 - DNA, 2 bp, Artificial Sequence
  Description of Artificial Sequence: Synthetic oligonucleotide
cg

SEQ ID NO: 1489 - DNA, 89 bp, Artificial Sequence
  Description of Artificial Sequence: Synthetic oligonucleotide
cgttattcgcgtgttagtagttgggcgtttcgattttttagatcgcgtgagtttagtaaagcggttaggcgcgcgtttgtagttcggcg

SEQ ID NO: 1490 - DNA, 13 bp, Artificial Sequence
  Description of Artificial Sequence: Synthetic oligonucleotide
cgtttttaattcg

SEQ ID NO: 1491 - DNA, 2 bp, Artificial Sequence
  Description of Artificial Sequence: Synthetic oligonucleotide
cg

SEQ ID NO: 1492 - DNA, 47 bp, Artificial Sequence
  Description of Artificial Sequence: Synthetic oligonucleotide
cgagcgttagattttagtaataaaaggttaggcgaggttatatcgcg

SEQ ID NO: 1493 - DNA, 2 bp, Artificial Sequence
  Description of Artificial Sequence: Synthetic oligonucleotide
cg

SEQ ID NO: 1494 - DNA, 2 bp, Artificial Sequence
  Description of Artificial Sequence: Synthetic oligonucleotide
cg

SEQ ID NO: 1495 - DNA, 159 bp, Artificial Sequence
  Description of Artificial Sequence: Synthetic polynucleotide
cgatgttcgcggcgtgaaagcgttcgcggcgggcgtcgatttttgttttagttttttgtttttttcgtttcgtttgtttcgtgtttttgtgattttggttttggcgtcgtcgtttaggcgtttcgtaatgtagttgtttttgcgtttcggcgggaggcg

SEQ ID NO: 1496 - DNA, 2 bp, Artificial Sequence
  Description of Artificial Sequence: Synthetic oligonucleotide
cg

SEQ ID NO: 1497 - DNA, 2 bp, Artificial Sequence
  Description of Artificial Sequence: Synthetic oligonucleotide
cg

SEQ ID NO: 1498 - DNA, 2 bp, Artificial Sequence
  Description of Artificial Sequence: Synthetic oligonucleotide
cg

SEQ ID NO: 1499 - DNA, 78 bp, Artificial Sequence
  Description of Artificial Sequence: Synthetic oligonucleotide
cgggcgtcgaggtttgggttttagtcgtggcgttcgtttcggcgtagtggggagtcgcgggcgtcggagaagcggtcg

SEQ ID NO: 1500 - DNA, 2 bp, Artificial Sequence
  Description of Artificial Sequence: Synthetic oligonucleotide
cg

SEQ ID NO: 1501 - DNA, 48 bp, Artificial Sequence
  Description of Artificial Sequence: Synthetic oligonucleotide
cgcggaggagtttcgtattcgatcgtgtatagcgatcgagttggcgcg

SEQ ID NO: 1502 - DNA, 2 bp, Artificial Sequence
  Description of Artificial Sequence: Synthetic oligonucleotide
cg

SEQ ID NO: 1503 - DNA, 2 bp, Artificial Sequence
  Description of Artificial Sequence: Synthetic oligonucleotide
cg

SEQ ID NO: 1504 - DNA, 2 bp, Artificial Sequence
  Description of Artificial Sequence: Synthetic oligonucleotide
cg

SEQ ID NO: 1505 - DNA, 157 bp, Artificial Sequence
  Description of Artificial Sequence: Synthetic polynucleotide
cgtttttatagttttgttttgatagttaaggaaaaaatttgttaaaaattagaggcgttgttgagtgttggcgtgggaatgttagtttagttagagttttgttttgggttatttaaataaaaatagatatgttggtggtaaatgttagttgaatacg

SEQ ID NO: 1506 - DNA, 2 bp, Artificial Sequence
  Description of Artificial Sequence: Synthetic oligonucleotide
cg

SEQ ID NO: 1507 - DNA, 82 bp, Artificial Sequence
  Description of Artificial Sequence: Synthetic oligonucleotide
cgcgcgttagtttttcgtttcgtggaagcgtttttttttcgatttcggttgattttcgttcgtcgtttttttcgcgggtgcg

SEQ ID NO: 1508 - DNA, 23 bp, Artificial Sequence
  Description of Artificial Sequence: Synthetic oligonucleotide
cgtttggtcgttttatttggtcg

SEQ ID NO: 1509 - DNA, 38 bp, Artificial Sequence
  Description of Artificial Sequence: Synthetic oligonucleotide
cgagttttcgcgcgtttacgagtagttttgcgagttcg

SEQ ID NO: 1510 - DNA, 2 bp, Artificial Sequence
  Description of Artificial Sequence: Synthetic oligonucleotide
gg

SEQ ID NO: 1511 - DNA, 165 bp, Artificial Sequence
  Description of Artificial Sequence: Synthetic polynucleotide
cgtgtttttttttagcgagcgtagcgagttgtttttgaagtttaggtagattaggtcgtcgtagaagatgaagaagttttcggggattcgttggatgcggttgtcggttattagtagtttgcgtacgtttagggggaaagggtttggtacgttgggtagttcgcg

SEQ ID NO: 1512 - DNA, 2 bp, Artificial Sequence
  Description of Artificial Sequence: Synthetic oligonucleotide
cg

SEQ ID NO: 1513 - DNA, 2 bp, Artificial Sequence
  Description of Artificial Sequence: Synthetic oligonucleotide
cg

SEQ ID NO: 1514 - DNA, 2 bp, Artificial Sequence
  Description of Artificial Sequence: Synthetic oligonucleotide
cg

SEQ ID NO: 1515 - DNA, 23 bp, Artificial Sequence
  Description of Artificial Sequence: Synthetic oligonucleotide
cggtgttcgggggtcgtttgtcg

SEQ ID NO: 1516 - DNA, 2 bp, Artificial Sequence
  Description of Artificial Sequence: Synthetic oligonucleotide
cg

SEQ ID NO: 1517 - DNA, 66 bp, Artificial Sequence
  Description of Artificial Sequence: Synthetic oligonucleotide
cggtcgtggcgggttttttggggcggtagttttaggcgcgggcgcgtagtagtttcgaaggcgtcg

SEQ ID NO: 1518 - DNA, 43 bp, Artificial Sequence
  Description of Artificial Sequence: Synthetic oligonucleotide
cgaataaaaagagtttaggtcgcgcgggcgggttgcgcgttcg

SEQ ID NO: 1519 - DNA, 2 bp, Artificial Sequence
  Description of Artificial Sequence: Synthetic oligonucleotide
cg

SEQ ID NO: 1520 - DNA, 62 bp, Artificial Sequence
  Description of Artificial Sequence: Synthetic oligonucleotide
cgtttagatgcggcggcggcgacggttttagttgcgtttcgtggttattttcgtgtagcgcg

SEQ ID NO: 1521 - DNA, 2 bp, Artificial Sequence
  Description of Artificial Sequence: Synthetic oligonucleotide
cg

SEQ ID NO: 1522 - DNA, 138 bp, Artificial Sequence
  Description of Artificial Sequence: Synthetic polynucleotide
cgaaagattcgaaattttaaaagttttattgcgtgtttttgggaggggagggggcgcgttaggaaaggagtggaaaaaagtgggcgaggaggagcgttgaaaattttttgataagtagttttcgtgcgttcgagagcg

SEQ ID NO: 1523 - DNA, 2 bp, Artificial Sequence
  Description of Artificial Sequence: Synthetic oligonucleotide
cg

SEQ ID NO: 1524 - DNA, 2 bp, Artificial Sequence
  Description of Artificial Sequence: Synthetic oligonucleotide
cg

SEQ ID NO: 1525 - DNA, 2 bp, Artificial Sequence
  Description of Artificial Sequence: Synthetic oligonucleotide
cg

SEQ ID NO: 1526 - DNA, 2 bp, Artificial Sequence
  Description of Artificial Sequence: Synthetic oligonucleotide
cg

SEQ ID NO: 1527 - DNA, 187 bp, Artificial Sequence
  Description of Artificial Sequence: Synthetic polynucleotide
cggtagaagtgggaggtatacgaggagttattggaaacggcgtttttgtggaggagtcgggggggatggggagtagagggagggggttttgttgttttagcgtttcgaggtcgtggagcggtagtagttgtagtcggagtagtattagtaatagtaatagtgagcgggacggagttaggatcgttcg

SEQ ID NO: 1528 - DNA, 2 bp, Artificial Sequence
  Description of Artificial Sequence: Synthetic oligonucleotide
cg

SEQ ID NO: 1529 - DNA, 2 bp, Artificial Sequence
  Description of Artificial Sequence: Synthetic oligonucleotide
cg

SEQ ID NO: 1530 - DNA, 110 bp, Artificial Sequence
  Description of Artificial Sequence: Synthetic polynucleotide
cgcggcgtgtagttcggcggatgttgttaggttaggcgatttcgtcgtttttggagcgcgagcgcgttttagtttgtagcgatgattttggaattagattttgatttgcg

SEQ ID NO: 1531 - DNA, 4 bp, Artificial Sequence
  Description of Artificial Sequence: Synthetic oligonucleotide
cgcg

SEQ ID NO: 1532 - DNA, 189 bp, Artificial Sequence
  Description of Artificial Sequence: Synthetic polynucleotide
cgggaggttttgttcgttcggtggttgtcgcggtttttttcgcgttgttttttacgtttggtttattatgtacgaggtaggtaatttgttttttttttcggggatttatttcggagataagaaggtagtttgttttttgtaatggtttttgttggagtgcggcggggtttaggcgcgagcgggggtacg

SEQ ID NO: 1533 - DNA, 42 bp, Artificial Sequence
  Description of Artificial Sequence: Synthetic oligonucleotide
cgttgaaggtgggtggaacgagggcgtttgagtgtattcgcg

SEQ ID NO: 1534 - DNA, 33 bp, Artificial Sequence
  Description of Artificial Sequence: Synthetic oligonucleotide
cgcgcgggggttttaggtattttgcgttttacg

SEQ ID NO: 1535 - DNA, 15 bp, Artificial Sequence
  Description of Artificial Sequence: Synthetic oligonucleotide
cgcgttagtcgaacg

SEQ ID NO: 1536 - DNA, 51 bp, Artificial Sequence
  Description of Artificial Sequence: Synthetic oligonucleotide
cgttgggatagagttgtttgttggagttgtcgtagatcgtcgtggtgggcg

SEQ ID NO: 1537 - DNA, 2 bp, Artificial Sequence
  Description of Artificial Sequence: Synthetic oligonucleotide
cg

SEQ ID NO: 1538 - DNA, 268 bp, Artificial Sequence
  Description of Artificial Sequence: Synthetic polynucleotide
cggagcgcgtagttcgtttttgaataagaagtgagtataatggcgtgtttgtaaaaaaaagttttaagttcgttttttttaaaaaatattttgaatgttgtatgttttatgttttttagcgtttcgcgggagagattcggttatagagtaggaggtgagatttttttttcggtatttttatttttttggtcgtacgtttttttgttttagttttttttgggaggattgtaaatgtttttttttagtaagcggtcgttttttattttcg

SEQ ID NO: 1539 - DNA, 2 bp, Artificial Sequence
  Description of Artificial Sequence: Synthetic oligonucleotide
cg

SEQ ID NO: 1540 - DNA, 33 bp, Artificial Sequence
  Description of Artificial Sequence: Synthetic oligonucleotide
cggagtttttaggagtagttagatcgattatcg

SEQ ID NO: 1541 - DNA, 23 bp, Artificial Sequence
  Description of Artificial Sequence: Synthetic oligonucleotide
cgtttattagttcgagattttcg

SEQ ID NO: 1542 - DNA, 40 bp, Artificial Sequence
  Description of Artificial Sequence: Synthetic oligonucleotide
cgtttcgattcgacgttttttcgttcgattaggtgtttcg

SEQ ID NO: 1543 - DNA, 10 bp, Artificial Sequence
  Description of Artificial Sequence: Synthetic oligonucleotide
cgcggtttcg

SEQ ID NO: 1544 - DNA, 181 bp, Artificial Sequence
  Description of Artificial Sequence: Synthetic polynucleotide
cggttgttgatcgtttttttcgcgttcgttagggtttttgtttcgcgttagttatcgcgcgttttttttttgtttatgtcgtagttttcgtggtttttgttttggattcgggatgttaggttgagatacgttttgtaaatttttggtagaaatgggcgtaagggggtggatttcgttttcg

SEQ ID NO: 1545 - DNA, 195 bp, Artificial Sequence
  Description of Artificial Sequence: Synthetic polynucleotide
cgatttaggacgtcggcgtttgttaggattttttcgtttgtttttcgcgtttcgcgcgcgtttatgttattattacggggagggtgtatgcggtaggtgtttggtcgaggttttcgggagcgagtcgtttttacgtgttttagtttgtttttttttcgaagttagacgttggcgttgtagttttgttgtttgacg

SEQ ID NO: 1546 - DNA, 2 bp, Artificial Sequence
  Description of Artificial Sequence: Synthetic oligonucleotide
cg

SEQ ID NO: 1547 - DNA, 358 bp, Artificial Sequence
  Description of Artificial Sequence: Synthetic polynucleotide
cggcgttcgagtgattttgtttagtttcgttttgcgtttttgtaaattacgttgttgcgttaattataaatttggttaatatgtttttgtaattttattatttaaaaacgtttttaggtatttggtcgttgttagattaggttcgcgggttcggaggaggtttttttatttgttttcgttagtttcggggatcgtgcgcggttttcgtgtggttttcgtttacgaggtttttcgggtaggaatcgtcgcgcgatttttgtttagcggtcgcgttttggttacgggcgatttttgtcgggaattttgttttcggttaagttgcgttttcgtatttcggtggtttttattcgagttcgcg

SEQ ID NO: 1548 - DNA, 13 bp, Artificial Sequence
  Description of Artificial Sequence: Synthetic oligonucleotide
cgtagttgtggcg

SEQ ID NO: 1549 - DNA, 2 bp, Artificial Sequence
  Description of Artificial Sequence: Synthetic oligonucleotide
cg

SEQ ID NO: 1550 - DNA, 2 bp, Artificial Sequence
  Description of Artificial Sequence: Synthetic oligonucleotide
cg

SEQ ID NO: 1551 - DNA, 95 bp, Artificial Sequence
  Description of Artificial Sequence: Synthetic oligonucleotide
cgtgcggggttatttgaaggttggggcgcggaagtttaatttcgtgttgattgggttttaagttttttgcgttttcgtttcgtttcgagtgttcg

SEQ ID NO: 1552 - DNA, 45 bp, Artificial Sequence
  Description of Artificial Sequence: Synthetic oligonucleotide
cggtagtaggttggagcgtatcgtgcgcgttttgttttttcggcg

SEQ ID NO: 1553 - DNA, 104 bp, Artificial Sequence
  Description of Artificial Sequence: Synthetic polynucleotide
cggttgagtcggagtttacgcggcgcgcgtttttcgcgaggaatttttcggtttgtaggttgtttgttattttcgtttttcgacgcgtttttttttggttcgcg

SEQ ID NO: 1554 - DNA, 87 bp, Artificial Sequence
  Description of Artificial Sequence: Synthetic oligonucleotide
cgttttcgttttcgttgatattttgtaaagtcgcggcggtagcggcggggattacgttgcggtgtattatttttcgttattttttcg

SEQ ID NO: 1555 - DNA, 62 bp, Artificial Sequence
  Description of Artificial Sequence: Synthetic oligonucleotide
cgatagtttgcgagtttcggttgtaagtggtttttttttttcgcggttgttgtttagtgtcg

SEQ ID NO: 1556 - DNA, 2 bp, Artificial Sequence
  Description of Artificial Sequence: Synthetic oligonucleotide
cg

SEQ ID NO: 1557 - DNA, 2 bp, Artificial Sequence
  Description of Artificial Sequence: Synthetic oligonucleotide
cg

SEQ ID NO: 1558 - DNA, 2 bp, Artificial Sequence
  Description of Artificial Sequence: Synthetic oligonucleotide
cg

SEQ ID NO: 1559 - DNA, 2 bp, Artificial Sequence
  Description of Artificial Sequence: Synthetic oligonucleotide
cg

SEQ ID NO: 1560 - DNA, 2 bp, Artificial Sequence
  Description of Artificial Sequence: Synthetic oligonucleotide
cg

SEQ ID NO: 1561 - DNA, 2 bp, Artificial Sequence
  Description of Artificial Sequence: Synthetic oligonucleotide
cg

SEQ ID NO: 1562 - DNA, 2 bp, Artificial Sequence
  Description of Artificial Sequence: Synthetic oligonucleotide
cg

SEQ ID NO: 1563 - DNA, 2 bp, Artificial Sequence
  Description of Artificial Sequence: Synthetic oligonucleotide
cg

SEQ ID NO: 1564 - DNA, 145 bp, Artificial Sequence
  Description of Artificial Sequence: Synthetic polynucleotide
cgtcggtttgttggcgatttggcgtatttgttcgcgcgttttggttttagttgtcgtaggttttttttgtatttatttttagtttttaaagttagtgtagttagtatcgtttatttggagttttaatttttttttgcgattttcg

SEQ ID NO: 1565 - DNA, 2 bp, Artificial Sequence
  Description of Artificial Sequence: Synthetic oligonucleotide
cg

SEQ ID NO: 1566 - DNA, 19 bp, Artificial Sequence
  Description of Artificial Sequence: Synthetic oligonucleotide
cgtttatcgttaggagtcg

SEQ ID NO: 1567 - DNA, 35 bp, Artificial Sequence
  Description of Artificial Sequence: Synthetic oligonucleotide
cggcggcggcggcggttttattagcggagttttcg

SEQ ID NO: 1568 - DNA, 2 bp, Artificial Sequence
  Description of Artificial Sequence: Synthetic oligonucleotide
cg

SEQ ID NO: 1569 - DNA, 2 bp, Artificial Sequence
  Description of Artificial Sequence: Synthetic oligonucleotide
cg

SEQ ID NO: 1570 - DNA, 36 bp, Artificial Sequence
  Description of Artificial Sequence: Synthetic oligonucleotide
cgagttggcgttggttcgttggttgtaggagagtcg

SEQ ID NO: 1571 - DNA, 2 bp, Artificial Sequence
  Description of Artificial Sequence: Synthetic oligonucleotide
cg

SEQ ID NO: 1572 - DNA, 42 bp, Artificial Sequence
  Description of Artificial Sequence: Synthetic oligonucleotide
cggttgagttttcgtttgtttaattttatttgttattgtacg

SEQ ID NO: 1573 - DNA, 2 bp, Artificial Sequence
  Description of Artificial Sequence: Synthetic oligonucleotide
cg

SEQ ID NO: 1574 - DNA, 2 bp, Artificial Sequence
  Description of Artificial Sequence: Synthetic oligonucleotide
cg

SEQ ID NO: 1575 - DNA, 18 bp, Artificial Sequence
  Description of Artificial Sequence: Synthetic oligonucleotide
cgcgtagcgttcgcgtcg

SEQ ID NO: 1576 - DNA, 2 bp, Artificial Sequence
  Description of Artificial Sequence: Synthetic oligonucleotide
cg

SEQ ID NO: 1577 - DNA, 2 bp, Artificial Sequence
  Description of Artificial Sequence: Synthetic oligonucleotide
cg

SEQ ID NO: 1578 - DNA, 2 bp, Artificial Sequence
  Description of Artificial Sequence: Synthetic oligonucleotide
cg

SEQ ID NO: 1579 - DNA, 118 bp, Artificial Sequence
  Description of Artificial Sequence: Synthetic polynucleotide
cgtgttagatttcggtttcgcgatttaggtgagtgtcgttatcgtcgtttggagggatttaagggttttgggttgggatttggggtcgtatcggggtttgaggtagaatagcgacgcg

SEQ ID NO: 1580 - DNA, 22 bp, Artificial Sequence
  Description of Artificial Sequence: Synthetic oligonucleotide
cgaatcgcgggcggcgcggacg

SEQ ID NO: 1581 - DNA, 2 bp, Artificial Sequence
  Description of Artificial Sequence: Synthetic oligonucleotide
cg

SEQ ID NO: 1582 - DNA, 2 bp, Artificial Sequence
  Description of Artificial Sequence: Synthetic oligonucleotide
cg

SEQ ID NO: 1583 - DNA, 2 bp, Artificial Sequence
  Description of Artificial Sequence: Synthetic oligonucleotide
cg

SEQ ID NO: 1584 - DNA, 2 bp, Artificial Sequence
  Description of Artificial Sequence: Synthetic oligonucleotide
cg

SEQ ID NO: 1585 - DNA, 31 bp, Artificial Sequence
  Description of Artificial Sequence: Synthetic oligonucleotide
cgataagagttcggtgttgagatgtgttacg

SEQ ID NO: 1586 - DNA, 2 bp, Artificial Sequence
  Description of Artificial Sequence: Synthetic oligonucleotide
cg

SEQ ID NO: 1587 - DNA, 2 bp, Artificial Sequence
  Description of Artificial Sequence: Synthetic oligonucleotide
cg

SEQ ID NO: 1588 - DNA, 2 bp, Artificial Sequence
  Description of Artificial Sequence: Synthetic oligonucleotide
cg

SEQ ID NO: 1589 - DNA, 2 bp, Artificial Sequence
  Description of Artificial Sequence: Synthetic oligonucleotide
cg

SEQ ID NO: 1590 - DNA, 2 bp, Artificial Sequence
  Description of Artificial Sequence: Synthetic oligonucleotide
cg

SEQ ID NO: 1591 - DNA, 2 bp, Artificial Sequence
  Description of Artificial Sequence: Synthetic oligonucleotide
cg

SEQ ID NO: 1592 - DNA, 2 bp, Artificial Sequence
  Description of Artificial Sequence: Synthetic oligonucleotide
cg

SEQ ID NO: 1593 - DNA, 2 bp, Artificial Sequence
  Description of Artificial Sequence: Synthetic oligonucleotide
cg

SEQ ID NO: 1594 - DNA, 2 bp, Artificial Sequence
  Description of Artificial Sequence: Synthetic oligonucleotide
cg

SEQ ID NO: 1595 - DNA, 69 bp, Artificial Sequence
  Description of Artificial Sequence: Synthetic oligonucleotide
cgttaggggcggttagcggtcgtttggttggcgtgtcggcggcgttcggggagggcgggtcggggggcg

SEQ ID NO: 1596 - DNA, 415 bp, Artificial Sequence
  Description of Artificial Sequence: Synthetic polynucleotide
cgtttttttttttggttcgattggttttggttttttttacgtttttagtttttaaattggcgttcgttttatggttcgtgtaggacgttaaaagtacggtaaattttagggcgatttttagtagacgttttcgacgtatgatgtcgagtcgttatcggttttcgtcgttttttgtcgcgttcggggttcggtttgcggtcgtcgttgcgttttgaagcgtatcgcgtcgtcggggtttcgttatttcgtcgttcgtttttcgggtcgggtttttttcgttttttttaggcgttgtttttattttaggcggtttttgttagttgtaatatagagataaattttcgaggcggggagatttttagggtatcgggatgttgaagtttcgcggtttttatttttaagtttaattcgtgcg

SEQ ID NO: 1597 - DNA, 2 bp, Artificial Sequence
  Description of Artificial Sequence: Synthetic oligonucleotide
cg

SEQ ID NO: 1598 - DNA, 2 bp, Artificial Sequence
  Description of Artificial Sequence: Synthetic oligonucleotide
cg

SEQ ID NO: 1599 - DNA, 2 bp, Artificial Sequence
  Description of Artificial Sequence: Synthetic oligonucleotide
cg

SEQ ID NO: 1600 - DNA, 2 bp, Artificial Sequence
  Description of Artificial Sequence: Synthetic oligonucleotide
cg

SEQ ID NO: 1601 - DNA, 2 bp, Artificial Sequence
  Description of Artificial Sequence: Synthetic oligonucleotide
cg

SEQ ID NO: 1602 - DNA, 62 bp, Artificial Sequence
  Description of Artificial Sequence: Synthetic oligonucleotide
cgcgttcgtcgttagttcgtatagcgtttcgtatattttcgtacgcgtttgaaatgcgtacg

SEQ ID NO: 1603 - DNA, 2 bp, Artificial Sequence
  Description of Artificial Sequence: Synthetic oligonucleotide
cg

SEQ ID NO: 1604 - DNA, 2 bp, Artificial Sequence
  Description of Artificial Sequence: Synthetic oligonucleotide
cg

SEQ ID NO: 1605 - DNA, 2 bp, Artificial Sequence
  Description of Artificial Sequence: Synthetic oligonucleotide
cg

SEQ ID NO: 1606 - DNA, 2 bp, Artificial Sequence
  Description of Artificial Sequence: Synthetic oligonucleotide
cg

SEQ ID NO: 1607 - DNA, 20 bp, Artificial Sequence
  Description of Artificial Sequence: Synthetic oligonucleotide
cgtaaacgtaaaagttttcg

SEQ ID NO: 1608 - DNA, 69 bp, Artificial Sequence
  Description of Artificial Sequence: Synthetic oligonucleotide
cgttttttggggtttttggttgtcgagtttcgttaaggtaaagacgttagtaagcgaggaagcgtagcg

SEQ ID NO: 1609 - DNA, 2 bp, Artificial Sequence
  Description of Artificial Sequence: Synthetic oligonucleotide
cg

SEQ ID NO: 1610 - DNA, 318 bp, Artificial Sequence
  Description of Artificial Sequence: Synthetic polynucleotide
cgtttcgcggtagtgttagttttttggggattaggaagggcgatttttgtttgggagttagtgtttgggtcgtcgggttcgggtaagcgttgggggtttggttcgagaagatgcggataggtggtttagggcgtcgcggattttcgttttttgcgggtatcgggagtttagggtcgaggcgcgtcgtttcgaggggtttttttttttaataatgcgttcggaatggagttcgcgttttgatagcgcgggttagttcgaaatcgtttagaattcgtttcgatgagtgggtgagtcgttttgggagtttgtcgcgtttcg

SEQ ID NO: 1611 - DNA, 27 bp, Artificial Sequence
  Description of Artificial Sequence: Synthetic oligonucleotide
cgtggtggtttttcgagcggaggcgcg

SEQ ID NO: 1612 - DNA, 2 bp, Artificial Sequence
  Description of Artificial Sequence: Synthetic oligonucleotide
cg

SEQ ID NO: 1613 - DNA, 13 bp, Artificial Sequence
  Description of Artificial Sequence: Synthetic oligonucleotide
cgagtttttcgcg

SEQ ID NO: 1614 - DNA, 189 bp, Artificial Sequence
  Description of Artificial Sequence: Synthetic polynucleotide
cggtgacgatgtgtagagttttttggtatagattgtttatttcgttttttttgtggaaatttatcgtttggtttttttttcgtttttttttttttttttagttagtcgttttttttttttttcgtatttttaatttttttggcgttttaagttatagttcgttcgcggtgattttggttggagattgcg

SEQ ID NO: 1615 - DNA, 2 bp, Artificial Sequence
  Description of Artificial Sequence: Synthetic oligonucleotide
cg

SEQ ID NO: 1616 - DNA, 2 bp, Artificial Sequence
  Description of Artificial Sequence: Synthetic oligonucleotide
cg

SEQ ID NO: 1617 - DNA, 13 bp, Artificial Sequence
  Description of Artificial Sequence: Synthetic oligonucleotide
cgggggttgagcg

SEQ ID NO: 1618 - DNA, 51 bp, Artificial Sequence
  Description of Artificial Sequence: Synthetic oligonucleotide
cggcgtgtgtcgtgcgtggggtggggtgcgggttgggcggtttcgttttcg

SEQ ID NO: 1619 - DNA, 289 bp, Artificial Sequence
  Description of Artificial Sequence: Synthetic polynucleotide
cgttcgttcgtatttcgtttttttcggttttttttttaaattttaaacgtatcgtcgtgttttaaagaaggtgtttacgtcgtttttagatttcggagcgttttttttttattttcgggattttttaggtcgtttatttttttcgtttttcgtttagatttgagagggatcgaaaatatattttcgattcgggtagttagggtcgaaattgttaagaggagaaaaggtaaagcggaaggagggtggttataaatagatttttttgtttttttttaaaaggatattgtcg

SEQ ID NO: 1620 - DNA, 2 bp, Artificial Sequence
  Description of Artificial Sequence: Synthetic oligonucleotide
cg

SEQ ID NO: 1621 - DNA, 165 bp, Artificial Sequence
  Description of Artificial Sequence: Synthetic polynucleotide
cggatttgttttcgtagtcgttgcggatttttcggtcgttatggcgattgtgaaatgtggggtggggcgtatgcgttggaagttattcgcgcgggtagtttttgagtgtttttttacgtgttttttagcgcgagtagtattttcgtttttgcgttttttagagcg

SEQ ID NO: 1622 - DNA, 21 bp, Artificial Sequence
  Description of Artificial Sequence: Synthetic oligonucleotide
cgtcgtttttgtattatttcg

SEQ ID NO: 1623 - DNA, 2 bp, Artificial Sequence
  Description of Artificial Sequence: Synthetic oligonucleotide
cg

SEQ ID NO: 1624 - DNA, 2 bp, Artificial Sequence
  Description of Artificial Sequence: Synthetic oligonucleotide
cg

SEQ ID NO: 1625 - DNA, 2 bp, Artificial Sequence
  Description of Artificial Sequence: Synthetic oligonucleotide
cg

SEQ ID NO: 1626 - DNA, 159 bp, Artificial Sequence
  Description of Artificial Sequence: Synthetic polynucleotide
cggttgcgttggtcgtattgtttttttataatatgagtagcgtcggcggcgatcgtttgggtcgcggtaagtcggttcgttgcggttttatttttttcgtgggtcgcgtgtatcgttggatggtggatagtcgcgtggcgttgcgtatttacgagtacg

SEQ ID NO: 1627 - DNA, 2 bp, Artificial Sequence
  Description of Artificial Sequence: Synthetic oligonucleotide
cg

SEQ ID NO: 1628 - DNA, 129 bp, Artificial Sequence
  Description of Artificial Sequence: Synthetic polynucleotide
cggggggcggaatttagagaggtaaagtgattcgtttttaaatcgtaatattaggaggatagtagggttagatggaatttttcggtttatagttttcgatttcgggtaagtgttttattcgggcgtacg

SEQ ID NO: 1629 - DNA, 2 bp, Artificial Sequence
  Description of Artificial Sequence: Synthetic oligonucleotide
cg

SEQ ID NO: 1630 - DNA, 120 bp, Artificial Sequence
  Description of Artificial Sequence: Synthetic polynucleotide
cgttggagatggcgagtttcgagattttttttattttttgtttttagagtaattttatggtattaaaaaaaaaaaaaaaaaaaaaaaaaaaaaaaaaaaaaaaaaaagaaggagaaggcg

SEQ ID NO: 1631 - DNA, 2 bp, Artificial Sequence
  Description of Artificial Sequence: Synthetic oligonucleotide
cg

SEQ ID NO: 1632 - DNA, 171 bp, Artificial Sequence
  Description of Artificial Sequence: Synthetic polynucleotide
cgcggacgttgacgattttttttacgttcgataagttttcgttttcgtcgtatcgttggcggttaatcgggcgttgcgaggatttaaattagagagttcgggatattattgtgggggttggaggtcgttttttaatttgggtttagtattaataggtgtagtagtcgagcg

SEQ ID NO: 1633 - DNA, 2 bp, Artificial Sequence
  Description of Artificial Sequence: Synthetic oligonucleotide
cg

SEQ ID NO: 1634 - DNA, 2 bp, Artificial Sequence
  Description of Artificial Sequence: Synthetic oligonucleotide
cg

SEQ ID NO: 1635 - DNA, 2 bp, Artificial Sequence
  Description of Artificial Sequence: Synthetic oligonucleotide
cg

SEQ ID NO: 1636 - DNA, 64 bp, Artificial Sequence
  Description of Artificial Sequence: Synthetic oligonucleotide
cggtaggtgagcggcgcggttgtaggtgagtagtagtttcggttcgcgcgtttagtttttttcg

SEQ ID NO: 1637 - DNA, 2 bp, Artificial Sequence
  Description of Artificial Sequence: Synthetic oligonucleotide
cg

SEQ ID NO: 1638 - DNA, 2 bp, Artificial Sequence
  Description of Artificial Sequence: Synthetic oligonucleotide
cg

SEQ ID NO: 1639 - DNA, 2 bp, Artificial Sequence
  Description of Artificial Sequence: Synthetic oligonucleotide
cg

SEQ ID NO: 1640 - DNA, 2 bp, Artificial Sequence
  Description of Artificial Sequence: Synthetic oligonucleotide
cg

SEQ ID NO: 1641 - DNA, 16 bp, Artificial Sequence
  Description of Artificial Sequence: Synthetic oligonucleotide
cgtttcgtagggttcg

SEQ ID NO: 1642 - DNA, 2 bp, Artificial Sequence
  Description of Artificial Sequence: Synthetic oligonucleotide
cg

SEQ ID NO: 1643 - DNA, 2 bp, Artificial Sequence
  Description of Artificial Sequence: Synthetic oligonucleotide
cg

SEQ ID NO: 1644 - DNA, 2 bp, Artificial Sequence
  Description of Artificial Sequence: Synthetic oligonucleotide
cg

SEQ ID NO: 1645 - DNA, 18 bp, Artificial Sequence
  Description of Artificial Sequence: Synthetic oligonucleotide
cgtattttttcggtcgcg

SEQ ID NO: 1646 - DNA, 118 bp, Artificial Sequence
  Description of Artificial Sequence: Synthetic polynucleotide
cgggcggatgggggttatcgaggcggttcgtttttaggcgtatatttcgtatatttttttgttaagtgaaggggttaaaatgtatagatgggggagtttatttaggaatagaggcgcg

SEQ ID NO: 1647 - DNA, 2 bp, Artificial Sequence
  Description of Artificial Sequence: Synthetic oligonucleotide
cg

SEQ ID NO: 1648 - DNA, 2 bp, Artificial Sequence
  Description of Artificial Sequence: Synthetic oligonucleotide
cg

SEQ ID NO: 1649 - DNA, 2 bp, Artificial Sequence
  Description of Artificial Sequence: Synthetic oligonucleotide
cg

SEQ ID NO: 1650 - DNA, 2 bp, Artificial Sequence
  Description of Artificial Sequence: Synthetic oligonucleotide
cg

SEQ ID NO: 1651 - DNA, 2 bp, Artificial Sequence
  Description of Artificial Sequence: Synthetic oligonucleotide
cg

SEQ ID NO: 1652 - DNA, 22 bp, Artificial Sequence
  Description of Artificial Sequence: Synthetic oligonucleotide
cgcgtcgttttagaggagttcg

SEQ ID NO: 1653 - DNA, 112 bp, Artificial Sequence
  Description of Artificial Sequence: Synthetic polynucleotide
cgggagcgtacgagtgtgtgtgtgtgtgtgtgtgttcgcggtgtgttcgcggttcggtgtatacgcgcgcgggttgtaaagttaggagttgcgggagcgtttttttgtttcg

SEQ ID NO: 1654 - DNA, 109 bp, Artificial Sequence
  Description of Artificial Sequence: Synthetic polynucleotide
cgttttgtttgggttgggtttatttacgttttgggtggggtttaggaattgcgtgcgggcgtagcgggtgagtatgttgatgatgattatttggttttatttttttacg

SEQ ID NO: 1655 - DNA, 2 bp, Artificial Sequence
  Description of Artificial Sequence: Synthetic oligonucleotide
cg

SEQ ID NO: 1656 - DNA, 2 bp, Artificial Sequence
  Description of Artificial Sequence: Synthetic oligonucleotide
cg

SEQ ID NO: 1657 - DNA, 2 bp, Artificial Sequence
  Description of Artificial Sequence: Synthetic oligonucleotide
cg

SEQ ID NO: 1658 - DNA, 431 bp, Artificial Sequence
  Description of Artificial Sequence: Synthetic polynucleotide
cgagggggttttgggatcgagcggtttcgtagcggcgatagaaatatatattttacgaaaaagaaaaaaaaaaaaacgagtcgcgcgaattcgttaagttagatgtgcgcggtttgaagcggaggaggttttgacgttagttttatttcgcgtagttcggtttggtcgtagattcgtcggttattcgtcggcggtttaggtcgggaggggttaggatagtttcggtcgcgcggtggacggaggggttattttttcgggcgttagtaaataaattttattcgagttaatatcgtttagcgaacggtgtttttttttagttattcgagaacgagaggtatttttaattagaaattaattaatgagtagttgttttttttcgttttattgtaattattcgttttaattataaatgagatttatgaaaggatacg

SEQ ID NO: 1659 - DNA, 2 bp, Artificial Sequence
  Description of Artificial Sequence: Synthetic oligonucleotide
cg

SEQ ID NO: 1660 - DNA, 40 bp, Artificial Sequence
  Description of Artificial Sequence: Synthetic oligonucleotide
cgtcgcgtttcgttgtagtttcgttggagagatggggacg

SEQ ID NO: 1661 - DNA, 2 bp, Artificial Sequence
  Description of Artificial Sequence: Synthetic oligonucleotide
cg

SEQ ID NO: 1662 - DNA, 22 bp, Artificial Sequence
  Description of Artificial Sequence: Synthetic oligonucleotide
cgttagtaggtttagggttacg

SEQ ID NO: 1663 - DNA, 2 bp, Artificial Sequence
  Description of Artificial Sequence: Synthetic oligonucleotide
cg

SEQ ID NO: 1664 - DNA, 47 bp, Artificial Sequence
  Description of Artificial Sequence: Synthetic oligonucleotide
cgggtattttgtattgtacgtagtatatgttgtggttttttagttcg

SEQ ID NO: 1665 - DNA, 24 bp, Artificial Sequence
  Description of Artificial Sequence: Synthetic oligonucleotide
cgtcgttgggggatttttggtacg

SEQ ID NO: 1666 - DNA, 2 bp, Artificial Sequence
  Description of Artificial Sequence: Synthetic oligonucleotide
cg

SEQ ID NO: 1667 - DNA, 45 bp, Artificial Sequence
  Description of Artificial Sequence: Synthetic oligonucleotide
cgggattttaggtttatttagtaagttaattggttgaggttttcg

SEQ ID NO: 1668 - DNA, 2 bp, Artificial Sequence
  Description of Artificial Sequence: Synthetic oligonucleotide
cg

SEQ ID NO: 1669 - DNA, 258 bp, Artificial Sequence
  Description of Artificial Sequence: Synthetic polynucleotide
cgaagcggcgggagtcggtgtagttttaatttttattgcgtgttttaggtcgttaattagttttgttcgcgtgtcgttggttcggaggttgtcgcgttagtttttgcgtgcgtttgagcgcgttggagtatttgcgaggttagggttgtcgacggcgagaggatattttgaggaatacggtgttttagtttcgttttcgtttttcgttcgagttggaggttggggcgcgttgagtcgtagcgtttggataagtgcgcg

SEQ ID NO: 1670 - DNA, 45 bp, Artificial Sequence
  Description of Artificial Sequence: Synthetic oligonucleotide
cgttttggcggtttcgagggatttgggttcgggtttgcggtcgcg

SEQ ID NO: 1671 - DNA, 7 bp, Artificial Sequence
  Description of Artificial Sequence: Synthetic oligonucleotide
cgcggcg

SEQ ID NO: 1672 - DNA, 4 bp, Artificial Sequence
  Description of Artificial Sequence: Synthetic oligonucleotide
cgcg

SEQ ID NO: 1673 - DNA, 67 bp, Artificial Sequence
  Description of Artificial Sequence: Synthetic oligonucleotide
cggggcgttaatagtttaggatttgggttgtaggttggtttttgtattaattagcggggcggtttcg

SEQ ID NO: 1674 - DNA, 43 bp, Artificial Sequence
  Description of Artificial Sequence: Synthetic oligonucleotide
cggttgattcgtagcggtagcggtagtagcgaggattcgagcg

SEQ ID NO: 1675 - DNA, 2 bp, Artificial Sequence
  Description of Artificial Sequence: Synthetic oligonucleotide
cg

SEQ ID NO: 1676 - DNA, 2 bp, Artificial Sequence
  Description of Artificial Sequence: Synthetic oligonucleotide
cg

SEQ ID NO: 1677 - DNA, 113 bp, Artificial Sequence
  Description of Artificial Sequence: Synthetic polynucleotide
cgtgtgtttagttgaatttagtatatttttttcgtatttttcgtttttttttttttttttttgaatttgtttttttgttttgcgggtttttaatttttttcgaatttcgggcg

SEQ ID NO: 1678 - DNA, 4 bp, Artificial Sequence
  Description of Artificial Sequence: Synthetic oligonucleotide
cgcg

SEQ ID NO: 1679 - DNA, 2 bp, Artificial Sequence
  Description of Artificial Sequence: Synthetic oligonucleotide
cg

SEQ ID NO: 1680 - DNA, 84 bp, Artificial Sequence
  Description of Artificial Sequence: Synthetic oligonucleotide
cgttgcgcgtcgttttcgcggagtcgagcggcggtggttgcggaagcgattggggttgcgcggatattagcgttttagagttcg

SEQ ID NO: 1681 - DNA, 2 bp, Artificial Sequence
  Description of Artificial Sequence: Synthetic oligonucleotide
cg

SEQ ID NO: 1682 - DNA, 48 bp, Artificial Sequence
  Description of Artificial Sequence: Synthetic oligonucleotide
cgcgttttattttgtagcggtggttttggaattagattttgatttgcg

SEQ ID NO: 1683 - DNA, 228 bp, Artificial Sequence
  Description of Artificial Sequence: Synthetic polynucleotide
cgggtcgcgcgtttatttgcgttttcgtcgtcgaaggagtttatgtacgggaagtagatggcgagcgtttcgaaggaggcggatagattgaggcggttttgcgagcgttttatgttcgcgtcggcgtcgggcgtttcggtcgcggcggcggcggcggcggcgggcggtttgggtagtttggtcgttttatttttgacgcggagtacggcgcgcggcgtggtggcggcg

SEQ ID NO: 1684 - DNA, 47 bp, Artificial Sequence
  Description of Artificial Sequence: Synthetic oligonucleotide
cgtattttggtcgtaataagcgcgttttacgtcgttacgtattagcg

SEQ ID NO: 1685 - DNA, 185 bp, Artificial Sequence
  Description of Artificial Sequence: Synthetic polynucleotide
cgcgtagggggcgggttttatttttttttcgttttcgtttcggttttaagtcgcggaggcgttcggtgggatttcgttgttgtttaattaggggggatcgggtgagtttttttttttggagtcgggttttattagcgtcgtaggtttataggtcgggggtgggggttttggatcgaggggcggcg

SEQ ID NO: 1686 - DNA, 216 bp, Artificial Sequence
  Description of Artificial Sequence: Synthetic polynucleotide
cgggggcgttaatttcgggagtaggaggtcgggttttagtcgtcgggttttgcgcgtttgttttttgcggcgcggtcggtatttgtagttggggtggtcgcgtaagtgttgtacgcgtagtcgttcggttttttttacgaagggtcgttttttcgtcgcgtttagttttttttacgttttgtttgcgggtcgtgggcgttagtgagtggaacgtcg

SEQ ID NO: 1687 - DNA, 344 bp, Artificial Sequence
  Description of Artificial Sequence: Synthetic polynucleotide
cgtggtttcgtgtttcggggcgcgttttagtttcggtattattagtttttcgtttttttcggaggggcgttcgagtgcgttcgatacggttagtagcgtcgcggcgagtagtagtagcgtgggtattggtttaaagtttcgagatttcggagttcgtttcgcgttttttatgtcgttgtttagtttgcgtttttcgaatttttcgggtatagttcgttgtattggagttttaggagatatcgttcgtagtagcgtacggagcgagggatttttagttcgggtcgggagagtaaagtttcgttggtttgttttggattgttaaaattaataatttttattattcg

SEQ ID NO: 1688 - DNA, 28 bp, Artificial Sequence
  Description of Artificial Sequence: Synthetic oligonucleotide
cgttttgtttggtagttaggtcgagacg

SEQ ID NO: 1689 - DNA, 124 bp, Artificial Sequence
  Description of Artificial Sequence: Synthetic polynucleotide
cgtggggcgttggatttatcgagaggttagcgtcgtcgtcgggggagggcgtgtttcgtacgtgtgtgttcgcgcgtgttcgcgttcgcgtgtgttagcgcgcgtgttttggtcgtgcgcgtcg

SEQ ID NO: 1690 - DNA, 80 bp, Artificial Sequence
  Description of Artificial Sequence: Synthetic oligonucleotide
cgttcgttagggttacgaagagcgtaacgaacgttagtagtacggcgtttacggtgagcgttcgcgtcgtttgtatttcg

SEQ ID NO: 1691 - DNA, 62 bp, Artificial Sequence
  Description of Artificial Sequence: Synthetic oligonucleotide
cggataggtttcgtagtgagtaggtaagggtcgtttcgtcgcggttgtttttttacgtttcg

SEQ ID NO: 1692 - DNA, 165 bp, Artificial Sequence
  Description of Artificial Sequence: Synthetic polynucleotide
cgatcgtatgcgtcgatttgtcgttgggcgttcgtttttttttgttggggttgggcgcggtttcggagtttggcggcggtggtgagggcgtacggttagttgtagcggcgttgtgtttgtcgtggatttaggatattttaggtttggtggcggggttaggtggcg

SEQ ID NO: 1693 - DNA, 43 bp, Artificial Sequence
  Description of Artificial Sequence: Synthetic oligonucleotide
cgtttttgtgtttttggtggtttcggcgttttttcggagcgcg

SEQ ID NO: 1694 - DNA, 86 bp, Artificial Sequence
  Description of Artificial Sequence: Synthetic oligonucleotide
cgtcgtcgttttcgtcgggagttaagttcgtcgggtcggttcggttttaggtgggtagttcggtttgtagttggttggaggtggcg

SEQ ID NO: 1695 - DNA, 23 bp, Artificial Sequence
  Description of Artificial Sequence: Synthetic oligonucleotide
cgagttcgtgggataagggggcg

SEQ ID NO: 1696 - DNA, 2 bp, Artificial Sequence
  Description of Artificial Sequence: Synthetic oligonucleotide
cg

SEQ ID NO: 1697 - DNA, 99 bp, Artificial Sequence
  Description of Artificial Sequence: Synthetic oligonucleotide
cgcggttatgtaattggtggatttttttaaatcgttttggaggggggagcgcggcgttgggggcgggagagcgtttttggttgtgagttgtttttgtcg

SEQ ID NO: 1698 - DNA, 73 bp, Artificial Sequence
  Description of Artificial Sequence: Synthetic oligonucleotide
cgtggaattcgtgagttttacgtaacgtttttttgtcgtttagggtgggtttttagaagtatagaaatggtcg

SEQ ID NO: 1699 - DNA, 2 bp, Artificial Sequence
  Description of Artificial Sequence: Synthetic oligonucleotide
cg

SEQ ID NO: 1700 - DNA, 52 bp, Artificial Sequence
  Description of Artificial Sequence: Synthetic oligonucleotide
cggggcgggtagggatcgagttaggagagagcgggcgggggttttgggagcg

SEQ ID NO: 1701 - DNA, 50 bp, Artificial Sequence
  Description of Artificial Sequence: Synthetic oligonucleotide
cgcgagtaggagggcgtattttatggttaggtgcggacgcggcggttgcg

SEQ ID NO: 1702 - DNA, 50 bp, Artificial Sequence
  Description of Artificial Sequence: Synthetic oligonucleotide
cgggtcggggtattataggcgcgggaatttacgtgtggattttgcgttcg

SEQ ID NO: 1703 - DNA, 2 bp, Artificial Sequence
  Description of Artificial Sequence: Synthetic oligonucleotide
cg

SEQ ID NO: 1704 - DNA, 2 bp, Artificial Sequence
  Description of Artificial Sequence: Synthetic oligonucleotide
cg

SEQ ID NO: 1705 - DNA, 52 bp, Artificial Sequence
  Description of Artificial Sequence: Synthetic oligonucleotide
cggggtagcgtaggagtaggtaggggttcgcggttcgcgtgggttttaggcg

SEQ ID NO: 1706 - DNA, 2 bp, Artificial Sequence
  Description of Artificial Sequence: Synthetic oligonucleotide
cg

SEQ ID NO: 1707 - DNA, 2 bp, Artificial Sequence
  Description of Artificial Sequence: Synthetic oligonucleotide
cg

SEQ ID NO: 1708 - DNA, 2 bp, Artificial Sequence
  Description of Artificial Sequence: Synthetic oligonucleotide
cg

SEQ ID NO: 1709 - DNA, 138 bp, Artificial Sequence
  Description of Artificial Sequence: Synthetic polynucleotide
cgagtggtagtagtaggagcggggtgacgaataagattacgaaggatttgaatttggagatatagtttagcgtcgaggttatcgcgcgggagggagattggcgggcgagacgagtgaggggtagttagaggcgtcgcg

SEQ ID NO: 1710 - DNA, 2 bp, Artificial Sequence
  Description of Artificial Sequence: Synthetic oligonucleotide
cg

SEQ ID NO: 1711 - DNA, 2 bp, Artificial Sequence
  Description of Artificial Sequence: Synthetic oligonucleotide
cg

SEQ ID NO: 1712 - DNA, 2 bp, Artificial Sequence
  Description of Artificial Sequence: Synthetic oligonucleotide
cg

SEQ ID NO: 1713 - DNA, 1017 bp, Artificial Sequence
  Description of Artificial Sequence: Synthetic polynucleotide
ygtttatttgagttttaaaagttgttgaatttatatggttaygtttyggggagyggggttttagatttggttygtttaggttatttgygyggygttygygttygttygttttygtttygyggygtyggttttyggttttyggttygtygtttttygtygttygtyggtygyggggygtatagygagttagagygyggtygygyggggttttatgtyggtyggygygtygtygtygttggggygtatggtttaggttgggyggttygygggggygtatatttttyggtyggggygyggggttygyggtttttttygtyggyggtatagygaaggyggtagygaggyggggygtgtttyggygttgtygyggygtagtaaagggttggggagtygyggtttygtttttyggggyggygaggagggaggtyggyggygttgtygtttayggtgygtgtttttyggygygyggtttttgtttttagtyggagtttygygtygatggggyggygttgtttagggtttggggtgaygygaygyggayggaygygagtttttttygygttgtygggtyggggggttttgttagaggtttygtygtygatyggygttatttaagttgttygggggtttygtttgagygttygttttgtagayggtygyggttyggagattggtaggaggygggtaygagaggygygyggggygagggygtygtggagygyggggygtggggaygygyggyggyggygtygygyggaggaggygygyggggatttyggggtttygtygttygygtttatygygttygtygtagagtygttygygttgtttagtygttttttttttygygtttgttttttygygygttygttttygtttttyggagtyggttttaatttygttygttyggttyggtttaygttattygtttttttygtttttygaaygggagttygagtttttggtttggtttyggtttttgttygtygttttattttgygggggtyggggtygtyg

SEQ ID NO: 1714 - DNA, 166 bp, Artificial Sequence
  Description of Artificial Sequence: Synthetic polynucleotide
ygygygttgagggtgyggtgagttgagtgyggggttaagtatgttttggygtygatttygtttaggggtttaggatttggygtttaaggggttttttggygayggagattttygaygtagtagygattygyggttgtttaagttgatttygttygygtttygagyg

SEQ ID NO: 1715 - DNA, 2 bp, Artificial Sequence
  Description of Artificial Sequence: Synthetic oligonucleotide
yg

SEQ ID NO: 1716 - DNA, 2 bp, Artificial Sequence
  Description of Artificial Sequence: Synthetic oligonucleotide
yg

SEQ ID NO: 1717 - DNA, 2 bp, Artificial Sequence
  Description of Artificial Sequence: Synthetic oligonucleotide
yg

SEQ ID NO: 1718 - DNA, 2 bp, Artificial Sequence
  Description of Artificial Sequence: Synthetic oligonucleotide
yg

SEQ ID NO: 1719 - DNA, 2 bp, Artificial Sequence
  Description of Artificial Sequence: Synthetic oligonucleotide
yg

SEQ ID NO: 1720 - DNA, 2 bp, Artificial Sequence
  Description of Artificial Sequence: Synthetic oligonucleotide
yg

SEQ ID NO: 1721 - DNA, 14 bp, Artificial Sequence
  Description of Artificial Sequence: Synthetic oligonucleotide
ygygttgagaygyg

SEQ ID NO: 1722 - DNA, 2 bp, Artificial Sequence
  Description of Artificial Sequence: Synthetic oligonucleotide
yg

SEQ ID NO: 1723 - DNA, 2 bp, Artificial Sequence
  Description of Artificial Sequence: Synthetic oligonucleotide
yg

SEQ ID NO: 1724 - DNA, 2 bp, Artificial Sequence
  Description of Artificial Sequence: Synthetic oligonucleotide
yg

SEQ ID NO: 1725 - DNA, 125 bp, Artificial Sequence
  Description of Artificial Sequence: Synthetic polynucleotide
ygtttygygttttygtttygttatgtttttgttgttggggttgtgtttggggttgtttttgtgtgtggggtygtaggaagaggygtagagttggggttatttttyggagtaggtaagtggagtyg

SEQ ID NO: 1726 - DNA, 2 bp, Artificial Sequence
  Description of Artificial Sequence: Synthetic oligonucleotide
yg

SEQ ID NO: 1727 - DNA, 131 bp, Artificial Sequence
  Description of Artificial Sequence: Synthetic polynucleotide
ygtgygtagtttagtttttttyggaygttttygttttygttygggtatatygtgtttygtatygaggtagagaggggtaygyggattttagtttttgygagtttttttgttygtygttattttatatttyg

SEQ ID NO: 1728 - DNA, 94 bp, Artificial Sequence
  Description of Artificial Sequence: Synthetic oligonucleotide
ygggtygygtgggtttgggygygtygtggtgggtaagyggggttagyggagygggaattygtatatttttygagyggagtygaggataggttyg

SEQ ID NO: 1729 - DNA, 2 bp, Artificial Sequence
  Description of Artificial Sequence: Synthetic oligonucleotide
yg

SEQ ID NO: 1730 - DNA, 2 bp, Artificial Sequence
  Description of Artificial Sequence: Synthetic oligonucleotide
yg

SEQ ID NO: 1731 - DNA, 27 bp, Artificial Sequence
  Description of Artificial Sequence: Synthetic oligonucleotide
ygygtaagtatttttttttttatygyg

SEQ ID NO: 1732 - DNA, 164 bp, Artificial Sequence
  Description of Artificial Sequence: Synthetic polynucleotide
ygygatttttttygggaggtgtttgygaaggyggttttgtygyggtgggggtggggaggttagggtttyggatygttggagttggggtygtagttagtttttggygagtgttttttggttgttgtygtaggggtttgttttttyggattttttttttaatttyg

SEQ ID NO: 1733 - DNA, 2 bp, Artificial Sequence
  Description of Artificial Sequence: Synthetic oligonucleotide
yg

SEQ ID NO: 1734 - DNA, 2 bp, Artificial Sequence
  Description of Artificial Sequence: Synthetic oligonucleotide
yg

SEQ ID NO: 1735 - DNA, 68 bp, Artificial Sequence
  Description of Artificial Sequence: Synthetic oligonucleotide
ygtatttgaaaatttygtygtagttattttttttttatgggaaagtttygatttyggygggtttagyg

SEQ ID NO: 1736 - DNA, 508 bp, Artificial Sequence
  Description of Artificial Sequence: Synthetic polynucleotide
ygtaatttgggygygttagtataaattyggttttyggtttttttgaagttagttaagttygtatagggtttttagygtttggaaatttgagaggygtggaagggtggggagtttygygaagtttttagtttttgggtgtttttyggtttygygggggagygggtttggagttaaatyggtyggtygtaggttggagtagygggygtyggagygygyggtggggatgttygaaaaggagttagaggtttagtyggagagttygagaataygagggatgtttattttgtaatatggttttaagtttttttttgtttaygyggaagygtttttygttttatttygggttgtgtagggtygtttyggygattaagtygttttyggagtygggtattggggagtyggtgttgygttygttgttggagtyggggttygattgygtygttaggtagtygggttttttttgggyggttatggtgggygygtagygttygggttttygttgtygtyg

SEQ ID NO: 1737 - DNA, 2 bp, Artificial Sequence
  Description of Artificial Sequence: Synthetic oligonucleotide
yg

SEQ ID NO: 1738 - DNA, 2 bp, Artificial Sequence
  Description of Artificial Sequence: Synthetic oligonucleotide
yg

SEQ ID NO: 1739 - DNA, 2 bp, Artificial Sequence
  Description of Artificial Sequence: Synthetic oligonucleotide
yg

SEQ ID NO: 1740 - DNA, 2 bp, Artificial Sequence
  Description of Artificial Sequence: Synthetic oligonucleotide
yg

SEQ ID NO: 1741 - DNA, 4 bp, Artificial Sequence
  Description of Artificial Sequence: Synthetic oligonucleotide
ygyg

SEQ ID NO: 1742 - DNA, 2 bp, Artificial Sequence
  Description of Artificial Sequence: Synthetic oligonucleotide
yg

SEQ ID NO: 1743 - DNA, 2 bp, Artificial Sequence
  Description of Artificial Sequence: Synthetic oligonucleotide
yg

SEQ ID NO: 1744 - DNA, 9 bp, Artificial Sequence
  Description of Artificial Sequence: Synthetic oligonucleotide
ygttgtayg

SEQ ID NO: 1745 - DNA, 2 bp, Artificial Sequence
  Description of Artificial Sequence: Synthetic oligonucleotide
yg

SEQ ID NO: 1746 - DNA, 2 bp, Artificial Sequence
  Description of Artificial Sequence: Synthetic oligonucleotide
yg

SEQ ID NO: 1747 - DNA, 396 bp, Artificial Sequence
  Description of Artificial Sequence: Synthetic polynucleotide
ygggyggyggyggttygttgtatatatttyggygtatttygttaggtygygtatagygtttygagtttaggygttttttygtttttttttygygttttgyggyggyggyggyggyggtagtagtagtagtaatatggttgttgatgggtgtttggggtggygttggyggygggaggagttttttygagtttttgygtyggttgttygttgttagttatggtaaatggtggyggyggyggyggyggtagtagyggyggyggyggyggyggyggaggtagtagttttagaatgagtagtaatatttaygygaattattttagtttagaygygttttttttttttttttttttttttttttttttttttttttttttttttttttttttttygtttttg

SEQ ID NO: 1748 - DNA, 2 bp, Artificial Sequence
  Description of Artificial Sequence: Synthetic oligonucleotide
yg

SEQ ID NO: 1749 - DNA, 70 bp, Artificial Sequence
  Description of Artificial Sequence: Synthetic oligonucleotide
ygtgatttttttatttagagattatttagggagatgttttggatgggataagtagataaatggyggttyg

SEQ ID NO: 1750 - DNA, 2 bp, Artificial Sequence
  Description of Artificial Sequence: Synthetic oligonucleotide
yg

SEQ ID NO: 1751 - DNA, 68 bp, Artificial Sequence
  Description of Artificial Sequence: Synthetic oligonucleotide
ygggagttyggtygygttttttagtttyggtattygygtttagygygtygygtttygygtttttygyg

SEQ ID NO: 1752 - DNA, 88 bp, Artificial Sequence
  Description of Artificial Sequence: Synthetic oligonucleotide
ygtttygygtatygttttygttttagtttttagtggygyggygttttttygygatattygygggtttttaggagygagtygattttyg

SEQ ID NO: 1753 - DNA, 2 bp, Artificial Sequence
  Description of Artificial Sequence: Synthetic oligonucleotide
yg

SEQ ID NO: 1754 - DNA, 2 bp, Artificial Sequence
  Description of Artificial Sequence: Synthetic oligonucleotide
yg

SEQ ID NO: 1755 - DNA, 87 bp, Artificial Sequence
  Description of Artificial Sequence: Synthetic oligonucleotide
ygggggttttttaggtygyggygtttttygtttttttttatttttygattttttttygtttttaaaatgaggaaayggagtaattyg

SEQ ID NO: 1756 - DNA, 45 bp, Artificial Sequence
  Description of Artificial Sequence: Synthetic oligonucleotide
ygtggtaaattygggtttygaygatagaggtagygtagaagttyg

SEQ ID NO: 1757 - DNA, 2 bp, Artificial Sequence
  Description of Artificial Sequence: Synthetic oligonucleotide
yg

SEQ ID NO: 1758 - DNA, 173 bp, Artificial Sequence
  Description of Artificial Sequence: Synthetic polynucleotide
ygggtygtggttgatatygyggagaagttaggatttttatagtttttgttagatttgaaagtaagttggaaatygatagttgttttagttgttttagattttaatttggtttgggttttttttttttttatttgaaaatagatttagggtaatgtttaagagaattttaatyg

SEQ ID NO: 1759 - DNA, 2 bp, Artificial Sequence
  Description of Artificial Sequence: Synthetic oligonucleotide
yg

SEQ ID NO: 1760 - DNA, 48 bp, Artificial Sequence
  Description of Artificial Sequence: Synthetic oligonucleotide
yggggtttttgtttttggttgtagttggagttttgygtttygttttyg

SEQ ID NO: 1761 - DNA, 2 bp, Artificial Sequence
  Description of Artificial Sequence: Synthetic oligonucleotide
yg

SEQ ID NO: 1762 - DNA, 2 bp, Artificial Sequence
  Description of Artificial Sequence: Synthetic oligonucleotide
yg

SEQ ID NO: 1763 - DNA, 36 bp, Artificial Sequence
  Description of Artificial Sequence: Synthetic oligonucleotide
yggggtagagggggygggaagttggygttayggtyg

SEQ ID NO: 1764 - DNA, 2 bp, Artificial Sequence
  Description of Artificial Sequence: Synthetic oligonucleotide
yg

SEQ ID NO: 1765 - DNA, 2 bp, Artificial Sequence
  Description of Artificial Sequence: Synthetic oligonucleotide
yg

SEQ ID NO: 1766 - DNA, 2 bp, Artificial Sequence
  Description of Artificial Sequence: Synthetic oligonucleotide
yg

SEQ ID NO: 1767 - DNA, 2 bp, Artificial Sequence
  Description of Artificial Sequence: Synthetic oligonucleotide
yg

SEQ ID NO: 1768 - DNA, 2 bp, Artificial Sequence
  Description of Artificial Sequence: Synthetic oligonucleotide
yg

SEQ ID NO: 1769 - DNA, 97 bp, Artificial Sequence
  Description of Artificial Sequence: Synthetic oligonucleotide
ygattygggagggaaaatttttgttttttttyggggtttgttttgttygttttttaaattygttttatatttttttygattttygtttttgtaagyg

SEQ ID NO: 1770 - DNA, 2 bp, Artificial Sequence
  Description of Artificial Sequence: Synthetic oligonucleotide
yg

SEQ ID NO: 1771 - DNA, 2 bp, Artificial Sequence
  Description of Artificial Sequence: Synthetic oligonucleotide
yg

SEQ ID NO: 1772 - DNA, 67 bp, Artificial Sequence
  Description of Artificial Sequence: Synthetic oligonucleotide
ygatgtttgtgtttgtggttttttgaggtagtgggagtggygtgtgaaggattgtgagagtttggyg

SEQ ID NO: 1773 - DNA, 2 bp, Artificial Sequence
  Description of Artificial Sequence: Synthetic oligonucleotide
yg

SEQ ID NO: 1774 - DNA, 29 bp, Artificial Sequence
  Description of Artificial Sequence: Synthetic oligonucleotide
ygggtgattgttgattttttgttttgtyg

SEQ ID NO: 1775 - DNA, 49 bp, Artificial Sequence
  Description of Artificial Sequence: Synthetic oligonucleotide
ygaggtttygygtattttygttygygttttagttatttaggttyggtyg

SEQ ID NO: 1776 - DNA, 188 bp, Artificial Sequence
  Description of Artificial Sequence: Synthetic polynucleotide
ygtttattgaaaatttttagttggtgttggagyggyggygtgtggttaaygttaaggagygtgagygggtgagggatttttagggtygaygttygttttttttttttttgttttattattaaatatttggttaatattygggggttygtttatygtttattttygttygaggygatttygagttttyg

SEQ ID NO: 1777 - DNA, 4 bp, Artificial Sequence
  Description of Artificial Sequence: Synthetic oligonucleotide
ygyg

SEQ ID NO: 1778 - DNA, 4 bp, Artificial Sequence
  Description of Artificial Sequence: Synthetic oligonucleotide
ygyg

SEQ ID NO: 1779 - DNA, 113 bp, Artificial Sequence
  Description of Artificial Sequence: Synthetic polynucleotide
ygygggtgaaggyggagtygtagggttggtttttaaagggatgttttygttygagyggygagattagtttygttygtttttygtygyggtygygtygtagtygtttayggtyg

SEQ ID NO: 1780 - DNA, 208 bp, Artificial Sequence
  Description of Artificial Sequence: Synthetic polynucleotide
ygygttygttatagtagygygttaggyggaygtygygggaatttgaygttygaggttygyggtttttaatgagagttttagaatatttttygtttttgayggttagyggtagygtygtygtttttygtagagygttygttttttygtttttagagttttagttttttttygagygatttygtagtttttttttygtttttattygtyg

SEQ ID NO: 1781 - DNA, 96 bp, Artificial Sequence
  Description of Artificial Sequence: Synthetic oligonucleotide
ygtattttttygtattyggygtygtygtttygtygttttttttygtttgtagggtygtttygggtattttagggttgttgaggggygggygggtyg

SEQ ID NO: 1782 - DNA, 236 bp, Artificial Sequence
  Description of Artificial Sequence: Synthetic polynucleotide
ygygtggaggttgygygtaggggttygggaygygggatagggatttygygtagtttaggygtyggggaatyggggttggagtyggggatttgagtttagyggaygtttttttygtttggaggttyggtayggatygggatattagggygttygtggtygtggttyggtttttggttgttgygggtygyggtttttagtgggtttttaggatttttttttayggygggtatttatyg

SEQ ID NO: 1783 - DNA, 211 bp, Artificial Sequence
  Description of Artificial Sequence: Synthetic polynucleotide
ygtygttygygttttttgttttttattttttaatttttgygtggttttagggtttatatttttggagtttttttttttagtaaatagtgttgttttttatttaatagtagaggygtttaggagtttaggygatgtgtttaaggtygaatagagggatagtagtgagttgtttaatttttttagttgygtagttaggatayggttgggggyg

SEQ ID NO: 1784 - DNA, 193 bp, Artificial Sequence
  Description of Artificial Sequence: Synthetic polynucleotide
ygygggggattttaggtygggayggagttttttttggttygttgtgygygtaygtttggaaaggygggatttaaggtagygatgttgygggaggttttgtagtgttaaygagttttygaayggtttygttttattttttttttgtgtgtttygtaagtttttgtttagtaaatygttatagtttyggygygyg

SEQ ID NO: 1785 - DNA, 4 bp, Artificial Sequence
  Description of Artificial Sequence: Synthetic oligonucleotide
ygyg

SEQ ID NO: 1786 - DNA, 199 bp, Artificial Sequence
  Description of Artificial Sequence: Synthetic polynucleotide
ygtaataaattttygtagatatygtatttttaatgyggtgtttttttgtgttagtgtttyggyggtttttgtagggtgttaatgttayggttgtatatygttttttttttttattatttttatttgaatagatttggaggaggyggaaatggaaattagggtatgtttataagttggattygttagatttttttgttyg

SEQ ID NO: 1787 - DNA, 87 bp, Artificial Sequence
  Description of Artificial Sequence: Synthetic oligonucleotide
ygyggtygttaygtttygttttttgtatttagtttttttggygttttygttgtagtatttaagattaggygtygtttttgttagtyg

SEQ ID NO: 1788 - DNA, 68 bp, Artificial Sequence
  Description of Artificial Sequence: Synthetic oligonucleotide
ygtaaattgattatgaaatataygatgttaattyggagttgtattttttagttgggtattttygygyg

SEQ ID NO: 1789 - DNA, 61 bp, Artificial Sequence
  Description of Artificial Sequence: Synthetic oligonucleotide
yggtgaaaattagtttgtggtgtattgagatttgtaaattattttttgaatgttaggggyg

SEQ ID NO: 1790 - DNA, 40 bp, Artificial Sequence
  Description of Artificial Sequence: Synthetic oligonucleotide
yggatyggyggtagtagaagyggtagyggtaaagtattyg

SEQ ID NO: 1791 - DNA, 647 bp, Artificial Sequence
  Description of Artificial Sequence: Synthetic polynucleotide
yggttgttgttattgttttgtygttgtygagtyggttatttgggtattygyggagtygygtygttgttatygtttyggyggtttttyggagtgygyggagggggyggyggaggagygagatatttatagtaatygaggatgygaggggygtttagtagtagygagtgtttgggagttaggaggaggttttygygygtyggtaatttttagtgttaggygttttgtagttttygygygtygygtttgggttygtatygttttygtagtgagggttygttygagyggtaagtttttttyggyggttaagtygatatttttttttygtttygtygtttatttygggtagtagtygyggaataatggagagygtagttagtagttttggagayggygttygggggaggaygygtygtygtygtygtygttgtygttagggtaggygygygtygygtggagtygggygggtgygagggygygyggyggggggtggggggtaygygtygygyggggggygggggtagtggggggygygygygygggttyggggagttygyggggagagttyggygttyggygtagygyggygyggttaagtttygygtttttttygttttttttyggygygttygttttygtttygtygttyg

SEQ ID NO: 1792 - DNA, 327 bp, Artificial Sequence
  Description of Artificial Sequence: Synthetic polynucleotide
ygaggygygggttgagtttttagtatttggtttgagyggygtgggtagtagtttgtatygyggatatttttaattttgtygygtttgygtygtattttggtygtggtagygatttttygggtatttttgaggtygtttttagttttataagtatttagtygtttattttagagtagyggygtygatygttttaagaggagttagttttygatatygttttttatttatttttttatatttttatygttggagggggtgagtgtygtggataggygttttygttyggggatagtttagyggyggtagttagttygattttttttygyg

SEQ ID NO: 1793 - DNA, 2 bp, Artificial Sequence
  Description of Artificial Sequence: Synthetic oligonucleotide
yg

SEQ ID NO: 1794 - DNA, 324 bp, Artificial Sequence
  Description of Artificial Sequence: Synthetic polynucleotide
ygtaagggtaattattggaygttggattyggtttgygaagatatgttygagaagggtaattatyggygtygtygtygtatgaagaggttttttyggtygtygttygygtatttttagttyggtaaggggtttttyggggtyggaggygtygtaggygggtgyggygtggygggygtyggggtygayggttayggttatttggygttttttaagtatttgtagtttggtttttttaataattygtggtygttatygtagttttttttatttatgttttatgttttttgttagatggyggtagtygtagyggttgtagtagttgyg

SEQ ID NO: 1795 - DNA, 77 bp, Artificial Sequence
  Description of Artificial Sequence: Synthetic oligonucleotide
ygtttygtygtgttygatgggtgygtttttagygttgtygtygyggygttyggtttygggttttygtygttgygtyg

SEQ ID NO: 1796 - DNA, 158 bp, Artificial Sequence
  Description of Artificial Sequence: Synthetic polynucleotide
ygtttttatttyggtatagatagtttttaaagttgttygtattttttagatttygttttttgtttagttttyggatttygtttaggggttgagttgaygttygygggtggatttttttggttygttgygtagggaattgatttygggaatttagggyg

SEQ ID NO: 1797 - DNA, 79 bp, Artificial Sequence
  Description of Artificial Sequence: Synthetic oligonucleotide
ygygygtttygygtttttggyggtygtagygttgtttattaattgatttttttattgatttatttaatttttaggagyg

SEQ ID NO: 1798 - DNA, 137 bp, Artificial Sequence
  Description of Artificial Sequence: Synthetic polynucleotide
ygttttggagyggtgggaggaygyggagygtygttttttggttttygatattttgttygttttttttagtgggtttgtggttgygttttttygaaggaagtaataaatttttttgattttgggggttagaggagayg

SEQ ID NO: 1799 - DNA, 112 bp, Artificial Sequence
  Description of Artificial Sequence: Synthetic polynucleotide
ygttgyggtatttagyggtttatyggggttgtattgttgtagyggttttttgtgttatttgtagtttaggaggttgagtatagtgagtattagtagtagtgtatagttygyg

SEQ ID NO: 1800 - DNA, 2 bp, Artificial Sequence
  Description of Artificial Sequence: Synthetic oligonucleotide
yg

SEQ ID NO: 1801 - DNA, 2 bp, Artificial Sequence
  Description of Artificial Sequence: Synthetic oligonucleotide
yg

SEQ ID NO: 1802 - DNA, 282 bp, Artificial Sequence
  Description of Artificial Sequence: Synthetic polynucleotide
yggttttttagttttagttgtgygttttygttygggygaggtggggttgatygyggtygtttgtataygttttttttggttygygttttyggtttgggagggyggattygtttattttaygatggtttyggttttggaagggattgttttygtgattygtttttttaatagtygttaataattttttttaaygttttttgygyggttygtttttgagaattttggttygggagagygaygyggggttttyggggttgygtaggttgyggygttttgtttayg

SEQ ID NO: 1803 - DNA, 81 bp, Artificial Sequence
  Description of Artificial Sequence: Synthetic oligonucleotide
yggygyggyggyggggggygtttygtaagttygyggttttgagyggttattygygtagtaagttgggygagttggtagtyg

SEQ ID NO: 1804 - DNA, 53 bp, Artificial Sequence
  Description of Artificial Sequence: Synthetic oligonucleotide
ygyggtttttgttttttgygttagygtgagttyggttagggtttttayggtyg

SEQ ID NO: 1805 - DNA, 40 bp, Artificial Sequence
  Description of Artificial Sequence: Synthetic oligonucleotide
yggygttagtttaygttttygttggygttttttyggygyg

SEQ ID NO: 1806 - DNA, 206 bp, Artificial Sequence
  Description of Artificial Sequence: Synthetic polynucleotide
yggtygatttatttggtgtygygtgygttggyggttygygyggtagttaagttaaaggtygaggtygaggtygagygyggygtttagtagtayggygggggttagtagggygggygtyggtygtagygygtttygttttagtagtagtygygygtygtttttgtaggtygtttygtygygggttattyggggygtttaggttgtyg

SEQ ID NO: 1807 - DNA, 38 bp, Artificial Sequence
  Description of Artificial Sequence: Synthetic oligonucleotide
ygttgttgttgygyggggyggyggtygtygtgttttyg

SEQ ID NO: 1808 - DNA, 5 bp, Artificial Sequence
  Description of Artificial Sequence: Synthetic oligonucleotide
ygtyg

SEQ ID NO: 1809 - DNA, 25 bp, Artificial Sequence
  Description of Artificial Sequence: Synthetic oligonucleotide
ygtgtgtaygygttgtattygttyg

SEQ ID NO: 1810 - DNA, 79 bp, Artificial Sequence
  Description of Artificial Sequence: Synthetic oligonucleotide
ygttttttttttttttttttttttattaaatattatttgggaattgtttaaattttttttttaaaaaaagagagaggyg

SEQ ID NO: 1811 - DNA, 33 bp, Artificial Sequence
  Description of Artificial Sequence: Synthetic oligonucleotide
yggtttygygtggygtttyggtygttgttttyg

SEQ ID NO: 1812 - DNA, 132 bp, Artificial Sequence
  Description of Artificial Sequence: Synthetic polynucleotide
yggygggyggyggyggygyggagttgtatayggagaagayggagtgygggygttayggagagtattygtttaagtaggaygttygyggggaggtggttatggttagttyggtttaygatygtttggtttgyg

SEQ ID NO: 1813 - DNA, 32 bp, Artificial Sequence
  Description of Artificial Sequence: Synthetic oligonucleotide
ygtttggtatttttttttttgtttygagggyg

SEQ ID NO: 1814 - DNA, 2 bp, Artificial Sequence
  Description of Artificial Sequence: Synthetic oligonucleotide
yg

SEQ ID NO: 1815 - DNA, 2 bp, Artificial Sequence
  Description of Artificial Sequence: Synthetic oligonucleotide
yg

SEQ ID NO: 1816 - DNA, 20 bp, Artificial Sequence
  Description of Artificial Sequence: Synthetic oligonucleotide
ygagtatgttagyggygtyg

SEQ ID NO: 1817 - DNA, 85 bp, Artificial Sequence
  Description of Artificial Sequence: Synthetic oligonucleotide
yggtaygttttttttttyggtygtttttttttatataagygtaggtagagggygygttagttatgttttgtttttgygttygtyg

SEQ ID NO: 1818 - DNA, 230 bp, Artificial Sequence
  Description of Artificial Sequence: Synthetic polynucleotide
yggtttygygaaattyggttttttagttygygggaygygttgtttgttaggygggttyggyggtatttygggggygggaggggtyggtygtagggtttttagtttggygttygyggggygttygtagygaaggggtgggtgtygttygtgaaygtagtagggattagtttagttygygttygtttttgggtttyggttatygttttttygttattttttyggtttttgyg

SEQ ID NO: 1819 - DNA, 84 bp, Artificial Sequence
  Description of Artificial Sequence: Synthetic oligonucleotide
ygggtygttagttttagggtgtygggttttaattaaggtttygaagtttttaygtatttgagggtattttgattagtttttgyg

SEQ ID NO: 1820 - DNA, 42 bp, Artificial Sequence
  Description of Artificial Sequence: Synthetic oligonucleotide
ygygatttttttttgatttagttaaayggaaaagttygygyg

SEQ ID NO: 1821 - DNA, 45 bp, Artificial Sequence
  Description of Artificial Sequence: Synthetic oligonucleotide
ygtygtgttttttttygttttygaaagggtagaaagagtygttyg

SEQ ID NO: 1822 - DNA, 26 bp, Artificial Sequence
  Description of Artificial Sequence: Synthetic oligonucleotide
ygttygttagtattttttgtttygyg

SEQ ID NO: 1823 - DNA, 50 bp, Artificial Sequence
  Description of Artificial Sequence: Synthetic oligonucleotide
ygaggtttaggtggaggttgaggttgtygygygtygygggaggagtttyg

SEQ ID NO: 1824 - DNA, 56 bp, Artificial Sequence
  Description of Artificial Sequence: Synthetic oligonucleotide
ygtttttgagttagggaygygygtggggggtgggygtgtaygygggtgggttagyg

SEQ ID NO: 1825 - DNA, 44 bp, Artificial Sequence
  Description of Artificial Sequence: Synthetic oligonucleotide
ygtttttatygygtaygygtttttttygygygygtataygttyg

SEQ ID NO: 1826 - DNA, 2 bp, Artificial Sequence
  Description of Artificial Sequence: Synthetic oligonucleotide
yg

SEQ ID NO: 1827 - DNA, 9 bp, Artificial Sequence
  Description of Artificial Sequence: Synthetic oligonucleotide
ygtttttyg

SEQ ID NO: 1828 - DNA, 58 bp, Artificial Sequence
  Description of Artificial Sequence: Synthetic oligonucleotide
ygyggggtagttgtttaagtggatygatattatygtttgtttggygggtaggygggyg

SEQ ID NO: 1829 - DNA, 151 bp, Artificial Sequence
  Description of Artificial Sequence: Synthetic polynucleotide
yggtagaagatagygtttttaggattagygattttgtggtttattyggttattgggtttyggygtaaattttttttaggtagtgygggygatgttgattgtagaygtygggtagggttttygtgygggygggagygggggaagttagtgyg

SEQ ID NO: 1830 - DNA, 17 bp, Artificial Sequence
  Description of Artificial Sequence: Synthetic oligonucleotide
yggattttttaggatyg

SEQ ID NO: 1831 - DNA, 70 bp, Artificial Sequence
  Description of Artificial Sequence: Synthetic oligonucleotide
ygttygttgtttttygttgygtttagggatggagggttttattatttatggaattgttggtttttttgyg

SEQ ID NO: 1832 - DNA, 59 bp, Artificial Sequence
  Description of Artificial Sequence: Synthetic oligonucleotide
ygtttttgagatttygttgagaaatttttagygggttagygtttgggygttgggygtyg

SEQ ID NO: 1833 - DNA, 25 bp, Artificial Sequence
  Description of Artificial Sequence: Synthetic oligonucleotide
ygttgggtaatttttattygagtyg

SEQ ID NO: 1834 - DNA, 57 bp, Artificial Sequence
  Description of Artificial Sequence: Synthetic oligonucleotide
yggygttgaygttttggttttgggggttgtttggttggtgttaggtagyggaagayg

SEQ ID NO: 1835 - DNA, 111 bp, Artificial Sequence
  Description of Artificial Sequence: Synthetic polynucleotide
ygagtagttttaygttttgttaaggayggtaggtgtaagggtygggggattttttgayggggtygttttttygggtayggggaggtttttatygagttttaattttgaayg

SEQ ID NO: 1836 - DNA, 211 bp, Artificial Sequence
  Description of Artificial Sequence: Synthetic polynucleotide
ygggtygttgtttttgttgtattatgtaaaggtggttgggaaagygygttgatttatatttatatagtttattttttttttatagtatgtgattaataygtatttyggggaggagggagygyggttgggggtgttaatyggaagggaatagatagtgagtgttattttgttgggaggttttagaagtaaagygttaaygaygatagtagyg

SEQ ID NO: 1837 - DNA, 75 bp, Artificial Sequence
  Description of Artificial Sequence: Synthetic oligonucleotide
ygtttttaygygygttgtyggtatttgttygttttgttgtaatttgttgtagtgtttgaaagagtagtaggagyg

SEQ ID NO: 1838 - DNA, 2 bp, Artificial Sequence
  Description of Artificial Sequence: Synthetic oligonucleotide
yg

SEQ ID NO: 1839 - DNA, 66 bp, Artificial Sequence
  Description of Artificial Sequence: Synthetic oligonucleotide
ygggygttggagaaggygtttggygygaagttgggyggygtttygagggyggaggataggtggtyg

SEQ ID NO: 1840 - DNA, 2 bp, Artificial Sequence
  Description of Artificial Sequence: Synthetic oligonucleotide
yg

SEQ ID NO: 1841 - DNA, 163 bp, Artificial Sequence
  Description of Artificial Sequence: Synthetic polynucleotide
yggggyggygggygtatgygygtgygyggtgyggttttagttttggttgtygtygtttgtygtygtygtygygatgtttattttagttaaagyggttgygggtttggggattyggttygggtagyggagttttyggattygtygattygtygaggagygygyg

SEQ ID NO: 1842 - DNA, 99 bp, Artificial Sequence
  Description of Artificial Sequence: Synthetic oligonucleotide
yggagtaaagttagygygtttygyggttyggaatttagttggttygttatttttttatttttgygattttattttygatygygttttagggtagaagyg

SEQ ID NO: 1843 - DNA, 96 bp, Artificial Sequence
  Description of Artificial Sequence: Synthetic oligonucleotide
yggyggyggyggtagttttagtygygttygttatatatatttttattygttyggtgtataygtygygtygygggtagtgtygtttgyggaggygyg

SEQ ID NO: 1844 - DNA, 4 bp, Artificial Sequence
  Description of Artificial Sequence: Synthetic oligonucleotide
ygyg

SEQ ID NO: 1845 - DNA, 16 bp, Artificial Sequence
  Description of Artificial Sequence: Synthetic oligonucleotide
ygtgttaatttygtyg

SEQ ID NO: 1846 - DNA, 2 bp, Artificial Sequence
  Description of Artificial Sequence: Synthetic oligonucleotide
yg

SEQ ID NO: 1847 - DNA, 141 bp, Artificial Sequence
  Description of Artificial Sequence: Synthetic polynucleotide
ygtttattttgtagtygagtatataaggttygtygaagttatygagtaggttttgtagttgtaggtagttttygtygtygygttttattaygtygtggaaggtaggtaygtagtygygtagygygttagttattagtygyg

SEQ ID NO: 1848 - DNA, 2 bp, Artificial Sequence
  Description of Artificial Sequence: Synthetic oligonucleotide
yg

SEQ ID NO: 1849 - DNA, 37 bp, Artificial Sequence
  Description of Artificial Sequence: Synthetic oligonucleotide
ygaggtgttgygggttttgtgyggttggttgggaayg

SEQ ID NO: 1850 - DNA, 52 bp, Artificial Sequence
  Description of Artificial Sequence: Synthetic oligonucleotide
ygaggygttttygttttygttatttatatagggygttaagtgtttygattyg

SEQ ID NO: 1851 - DNA, 2 bp, Artificial Sequence
  Description of Artificial Sequence: Synthetic oligonucleotide
yg

SEQ ID NO: 1852 - DNA, 7 bp, Artificial Sequence
  Description of Artificial Sequence: Synthetic oligonucleotide
ygtttyg

SEQ ID NO: 1853 - DNA, 2 bp, Artificial Sequence
  Description of Artificial Sequence: Synthetic oligonucleotide
yg

SEQ ID NO: 1854 - DNA, 4 bp, Artificial Sequence
  Description of Artificial Sequence: Synthetic oligonucleotide
ygyg

SEQ ID NO: 1855 - DNA, 17 bp, Artificial Sequence
  Description of Artificial Sequence: Synthetic oligonucleotide
ygtttygttttaattyg

SEQ ID NO: 1856 - DNA, 136 bp, Artificial Sequence
  Description of Artificial Sequence: Synthetic polynucleotide
ygyggggggaggtttttggttygtygttttygttgtygtttgatygtatttttggagggtttygtattttgttaggtttttggaggtaaatatatattttygatttataattggttttygygttaggggattygyg

SEQ ID NO: 1857 - DNA, 31 bp, Artificial Sequence
  Description of Artificial Sequence: Synthetic oligonucleotide
yggttagggagtgagyggggygttgggygyg

SEQ ID NO: 1858 - DNA, 25 bp, Artificial Sequence
  Description of Artificial Sequence: Synthetic oligonucleotide
ygttaattagattttagggtgtayg

SEQ ID NO: 1859 - DNA, 12 bp, Artificial Sequence
  Description of Artificial Sequence: Synthetic oligonucleotide
ygttygttaayg

SEQ ID NO: 1860 - DNA, 6 bp, Artificial Sequence
  Description of Artificial Sequence: Synthetic oligonucleotide
ygtayg

SEQ ID NO: 1861 - DNA, 199 bp, Artificial Sequence
  Description of Artificial Sequence: Synthetic polynucleotide
ygtagygtgtagtygyggaatagygtttttagttttgggtaagygaatttttygtygtaygttyggagttygygtyggyggtttgtttyggtygttygttyggygttttygggttygttygygtygttttygtygtygttttygtygygyggygttttygttattttagygttatgtagyggtygyggtygygggygyg

SEQ ID NO: 1862 - DNA, 91 bp, Artificial Sequence
  Description of Artificial Sequence: Synthetic oligonucleotide
ygtgggggygyggygygggygataygtgygggtygttaggagggggagggggaygygygtygtygggttygttattttgtattyggggtyg

SEQ ID NO: 1863 - DNA, 108 bp, Artificial Sequence
  Description of Artificial Sequence: Synthetic polynucleotide
ygttttttttatggattttttagtatttgtaggttataggataatagaagttatagtagagttatygaggaattttaggaayggaggagatggaatagtggagaygyg

SEQ ID NO: 1864 - DNA, 13 bp, Artificial Sequence
  Description of Artificial Sequence: Synthetic oligonucleotide
ygaaatyggtgyg

SEQ ID NO: 1865 - DNA, 176 bp, Artificial Sequence
  Description of Artificial Sequence: Synthetic polynucleotide
ygggggyggyggggtgatagttttygtgtatgaattagttattttttaggtttygtttyggygggggtyggtyggaygttygtttygtataaagygggtattygggtygtttggagtagaaagtygygtattttttttygttaggygttttttyggaygttttgtttagygggtyg

SEQ ID NO: 1866 - DNA, 2 bp, Artificial Sequence
  Description of Artificial Sequence: Synthetic oligonucleotide
yg

SEQ ID NO: 1867 - DNA, 157 bp, Artificial Sequence
  Description of Artificial Sequence: Synthetic polynucleotide
ygggygtttttttaggtttggtygaggggygtygygtagaggyggyggyggygtayggaggyggtagaygaygygttttyggygttygtagtttyggtttygygttttygyggtttaaagtaattttgggagtygtygtttttygyggaatttttyg

SEQ ID NO: 1868 - DNA, 66 bp, Artificial Sequence
  Description of Artificial Sequence: Synthetic oligonucleotide
yggtygyggygggagggatagggggtttgggtgggaagggagygygagggtttttagyggttygyg

SEQ ID NO: 1869 - DNA, 498 bp, Artificial Sequence
  Description of Artificial Sequence: Synthetic polynucleotide
ygtgygttaggyggaaatgttttagtaggttttygygtatygggtygttyggggggtagtaggggtaggyggyggygggtaggtygagygygtygggyggtggygtagyggggtaygagtattttttgtgygttaggtaggtttygaggttgtggaagtttaygyggtaggtygtgtattygtggtagtyggttagygtyggtgtyggggtttyggggagygggygtygyggttttttgtttaggtygatggggtygtyggtygyggggtygggygagygygtaggggygaggtyggggtygttttygttttygttttygggtygyggygattygggygygggggygtggtygggyggyggggggggyggggygtyggtygygtgtagttygtagagtttgyggygtttgygygtgygtataggygyggygggagagggggtygggggygyggtyggtttagggggtttygggggygyggtyggtyggygyggyggyg

SEQ ID NO: 1870 - DNA, 27 bp, Artificial Sequence
  Description of Artificial Sequence: Synthetic oligonucleotide
ygagygygaagggygttyggattygyg

SEQ ID NO: 1871 - DNA, 2 bp, Artificial Sequence
  Description of Artificial Sequence: Synthetic oligonucleotide
yg

SEQ ID NO: 1872 - DNA, 2 bp, Artificial Sequence
  Description of Artificial Sequence: Synthetic oligonucleotide
yg

SEQ ID NO: 1873 - DNA, 16 bp, Artificial Sequence
  Description of Artificial Sequence: Synthetic oligonucleotide
ygygaggtaggygayg

SEQ ID NO: 1874 - DNA, 53 bp, Artificial Sequence
  Description of Artificial Sequence: Synthetic oligonucleotide
ygtygtaagagaagttgttaagtttygtaggttttgattyggygtttttygyg

SEQ ID NO: 1875 - DNA, 4 bp, Artificial Sequence
  Description of Artificial Sequence: Synthetic oligonucleotide
ygyg

SEQ ID NO: 1876 - DNA, 2 bp, Artificial Sequence
  Description of Artificial Sequence: Synthetic oligonucleotide
yg

SEQ ID NO: 1877 - DNA, 2 bp, Artificial Sequence
  Description of Artificial Sequence: Synthetic oligonucleotide
yg

SEQ ID NO: 1878 - DNA, 2 bp, Artificial Sequence
  Description of Artificial Sequence: Synthetic oligonucleotide
yg

SEQ ID NO: 1879 - DNA, 14 bp, Artificial Sequence
  Description of Artificial Sequence: Synthetic oligonucleotide
ygtaggtggatayg

SEQ ID NO: 1880 - DNA, 186 bp, Artificial Sequence
  Description of Artificial Sequence: Synthetic polynucleotide
ygttatggagaaaattaatggaggaaaaattatagagttattygaaatagttgygttgtttattattyggtgtttgagtttgttttttttgtaattagattatatgtgaggtagttttagttaattgtttgtgttatttatyggggaattttagttttatttgtgaatatttaggttttttygtyg

SEQ ID NO: 1881 - DNA, 79 bp, Artificial Sequence
  Description of Artificial Sequence: Synthetic oligonucleotide
ygygtattttttttatttygatatttattgttatttttatagyggagygaggggtttygtygagggygagygtatttyg

SEQ ID NO: 1882 - DNA, 49 bp, Artificial Sequence
  Description of Artificial Sequence: Synthetic oligonucleotide
ygygggggygtttttygttgtttgtagggagygyggygyggaygyggyg

SEQ ID NO: 1883 - DNA, 17 bp, Artificial Sequence
  Description of Artificial Sequence: Synthetic oligonucleotide
ygygaayggtttattyg

SEQ ID NO: 1884 - DNA, 2 bp, Artificial Sequence
  Description of Artificial Sequence: Synthetic oligonucleotide
yg

SEQ ID NO: 1885 - DNA, 9 bp, Artificial Sequence
  Description of Artificial Sequence: Synthetic oligonucleotide
ygtggttyg

SEQ ID NO: 1886 - DNA, 2 bp, Artificial Sequence
  Description of Artificial Sequence: Synthetic oligonucleotide
yg

SEQ ID NO: 1887 - DNA, 165 bp, Artificial Sequence
  Description of Artificial Sequence: Synthetic polynucleotide
yggggtttggtaggaagtgtagtgtattttttagttttagggtaattaggatagtatgaattttttattttgtggtagaataaayggttagygtttygatgtggygygttygatttttttttatagagtttaaaagttaygtttaattaaattgtagygttttyg

SEQ ID NO: 1888 - DNA, 14 bp, Artificial Sequence
  Description of Artificial Sequence: Synthetic oligonucleotide
ygttgattygygyg

SEQ ID NO: 1889 - DNA, 2 bp, Artificial Sequence
  Description of Artificial Sequence: Synthetic oligonucleotide
yg

SEQ ID NO: 1890 - DNA, 2 bp, Artificial Sequence
  Description of Artificial Sequence: Synthetic oligonucleotide
yg

SEQ ID NO: 1891 - DNA, 97 bp, Artificial Sequence
  Description of Artificial Sequence: Synthetic oligonucleotide
ygtttygtaygttygtaygtttagyggggttygtattgagtatgggygyggyggtygtgygttggtatttgtgygtgttgttggttttgggtatayg

SEQ ID NO: 1892 - DNA, 2 bp, Artificial Sequence
  Description of Artificial Sequence: Synthetic oligonucleotide
yg

SEQ ID NO: 1893 - DNA, 98 bp, Artificial Sequence
  Description of Artificial Sequence: Synthetic oligonucleotide
ygaggtttagtttttggttttaaggaataaattygttggtttgaaagggagttayggtagaagtttaggggtagagyggygggagygygygattygyg

SEQ ID NO: 1894 - DNA, 69 bp, Artificial Sequence
  Description of Artificial Sequence: Synthetic oligonucleotide
ygyggaaggttygygygttttgygtygtygtygtttagtgtygtygttagtatttttttygttttttyg

SEQ ID NO: 1895 - DNA, 2 bp, Artificial Sequence
  Description of Artificial Sequence: Synthetic oligonucleotide
yg

SEQ ID NO: 1896 - DNA, 2 bp, Artificial Sequence
  Description of Artificial Sequence: Synthetic oligonucleotide
yg

SEQ ID NO: 1897 - DNA, 2 bp, Artificial Sequence
  Description of Artificial Sequence: Synthetic oligonucleotide
yg

SEQ ID NO: 1898 - DNA, 2 bp, Artificial Sequence
  Description of Artificial Sequence: Synthetic oligonucleotide
yg

SEQ ID NO: 1899 - DNA, 103 bp, Artificial Sequence
  Description of Artificial Sequence: Synthetic polynucleotide
ygygttygtygttttyggaggagygggttggtygatygttatygygtygtttttyggtygttttygaagtygttttatygyggtttttgtygttttggggtyg

SEQ ID NO: 1900 - DNA, 2 bp, Artificial Sequence
  Description of Artificial Sequence: Synthetic oligonucleotide
yg

SEQ ID NO: 1901 - DNA, 21 bp, Artificial Sequence
  Description of Artificial Sequence: Synthetic oligonucleotide
ygtygtygtygttgagagtyg

SEQ ID NO: 1902 - DNA, 148 bp, Artificial Sequence
  Description of Artificial Sequence: Synthetic polynucleotide
ygygygggygygaggggttgggaygygggagttttttgagtgyggagygyggagttttggtgtttyggygtattgtagttatattttygggtygygygttttygtygttttttattygygtygtagggtttttttttttgaggygtyg

SEQ ID NO: 1903 - DNA, 2 bp, Artificial Sequence
  Description of Artificial Sequence: Synthetic oligonucleotide
yg

SEQ ID NO: 1904 - DNA, 2 bp, Artificial Sequence
  Description of Artificial Sequence: Synthetic oligonucleotide
yg

SEQ ID NO: 1905 - DNA, 26 bp, Artificial Sequence
  Description of Artificial Sequence: Synthetic oligonucleotide
yggttattaygygttgtttttyggyg

SEQ ID NO: 1906 - DNA, 119 bp, Artificial Sequence
  Description of Artificial Sequence: Synthetic polynucleotide
ygttygatgatgaggatgtatttttygtaggtgtagtttttgaagyggtagtaaygtttgtggtttttgagttaggataggaygttatggttgyggtagygygygtatttgggygtgyg

SEQ ID NO: 1907 - DNA, 66 bp, Artificial Sequence
  Description of Artificial Sequence: Synthetic oligonucleotide
ygttttattttgttgaggtygttttyggttttttttgatttaggttgggygggaaaggtygggtyg

SEQ ID NO: 1908 - DNA, 60 bp, Artificial Sequence
  Description of Artificial Sequence: Synthetic oligonucleotide
ygyggttggggtttygygttttttggagygttttttgtttagataygaygatttygttyg

SEQ ID NO: 1909 - DNA, 2 bp, Artificial Sequence
  Description of Artificial Sequence: Synthetic oligonucleotide
yg

SEQ ID NO: 1910 - DNA, 124 bp, Artificial Sequence
  Description of Artificial Sequence: Synthetic polynucleotide
yggyggtaggagaagtttaaggttygagyggttygtagtttttaygtttgtatttttttattttygttagttygatggttygtttygyggygtgtattggagtaagtaggtttygtttygagyg

SEQ ID NO: 1911 - DNA, 2 bp, Artificial Sequence
  Description of Artificial Sequence: Synthetic oligonucleotide
yg

SEQ ID NO: 1912 - DNA, 156 bp, Artificial Sequence
  Description of Artificial Sequence: Synthetic polynucleotide
ygtttyggtttttatygtygygtttttataggttattaggtgtygttygtttagaatgttaattatggygtagataygtagttatttgagattygaggatatttgtaggaggatgattatttgyggggaggyggyggygagygtygyggtgtttyg

SEQ ID NO: 1913 - DNA, 2 bp, Artificial Sequence
  Description of Artificial Sequence: Synthetic oligonucleotide
yg

SEQ ID NO: 1914 - DNA, 91 bp, Artificial Sequence
  Description of Artificial Sequence: Synthetic oligonucleotide
ygttttaggaatgattyggtgatatyggtygatgattttttttatagtttgtyggtgagyggyggyggaggtaaggtttyggyggygygyg

SEQ ID NO: 1915 - DNA, 2 bp, Artificial Sequence
  Description of Artificial Sequence: Synthetic oligonucleotide
yg

SEQ ID NO: 1916 - DNA, 2 bp, Artificial Sequence
  Description of Artificial Sequence: Synthetic oligonucleotide
yg

SEQ ID NO: 1917 - DNA, 89 bp, Artificial Sequence
  Description of Artificial Sequence: Synthetic oligonucleotide
ygtygagttgtaggygygygtttaatygttttgttgggtttaygyggtttgagaggtyggagygtttaattgttggtaygygagtaayg

SEQ ID NO: 1918 - DNA, 13 bp, Artificial Sequence
  Description of Artificial Sequence: Synthetic oligonucleotide
yggattaaagayg

SEQ ID NO: 1919 - DNA, 2 bp, Artificial Sequence
  Description of Artificial Sequence: Synthetic oligonucleotide
yg

SEQ ID NO: 1920 - DNA, 47 bp, Artificial Sequence
  Description of Artificial Sequence: Synthetic oligonucleotide
ygygatgtggtttygtttggttttttgttgttggggtttggygttyg

SEQ ID NO: 1921 - DNA, 2 bp, Artificial Sequence
  Description of Artificial Sequence: Synthetic oligonucleotide
yg

SEQ ID NO: 1922 - DNA, 2 bp, Artificial Sequence
  Description of Artificial Sequence: Synthetic oligonucleotide
yg

SEQ ID NO: 1923 - DNA, 159 bp, Artificial Sequence
  Description of Artificial Sequence: Synthetic polynucleotide
ygtttttygtygaggygtaggggtagttatattgyggggygtttgggygayggygttaaagttagggttataagggtaygggataagyggggyggggggagtaggagattaggatagaggtyggygttygtygygggygtttttaygtygygggtatyg

SEQ ID NO: 1924 - DNA, 2 bp, Artificial Sequence
  Description of Artificial Sequence: Synthetic oligonucleotide
yg

SEQ ID NO: 1925 - DNA, 2 bp, Artificial Sequence
  Description of Artificial Sequence: Synthetic oligonucleotide
yg

SEQ ID NO: 1926 - DNA, 2 bp, Artificial Sequence
  Description of Artificial Sequence: Synthetic oligonucleotide
yg

SEQ ID NO: 1927 - DNA, 78 bp, Artificial Sequence
  Description of Artificial Sequence: Synthetic oligonucleotide
yggtygttttttygaygttygyggttttttattgygtygaggygagygttayggttaaagtttaagtttyggygttyg

SEQ ID NO: 1928 - DNA, 2 bp, Artificial Sequence
  Description of Artificial Sequence: Synthetic oligonucleotide
yg

SEQ ID NO: 1929 - DNA, 48 bp, Artificial Sequence
  Description of Artificial Sequence: Synthetic oligonucleotide
ygygttaattyggtygttgtgtayggtygggtgygaaattttttygyg

SEQ ID NO: 1930 - DNA, 2 bp, Artificial Sequence
  Description of Artificial Sequence: Synthetic oligonucleotide
yg

SEQ ID NO: 1931 - DNA, 2 bp, Artificial Sequence
  Description of Artificial Sequence: Synthetic oligonucleotide
yg

SEQ ID NO: 1932 - DNA, 2 bp, Artificial Sequence
  Description of Artificial Sequence: Synthetic oligonucleotide
yg

SEQ ID NO: 1933 - DNA, 157 bp, Artificial Sequence
  Description of Artificial Sequence: Synthetic polynucleotide
ygtgtttaattggtatttgttattaatatgtttgtttttatttaaatggtttagagtaaggttttgattaaattagtatttttaygttaatatttagtagygtttttggtttttggtagattttttttttagttgttaaagtaaaattatagaagyg

SEQ ID NO: 1934 - DNA, 2 bp, Artificial Sequence
  Description of Artificial Sequence: Synthetic oligonucleotide
yg

SEQ ID NO: 1935 - DNA, 82 bp, Artificial Sequence
  Description of Artificial Sequence: Synthetic oligonucleotide
ygtattygyggggagggyggygagyggggattagtygaagtygggagaggggygtttttayggggygggaaattggygygyg

SEQ ID NO: 1936 - DNA, 23 bp, Artificial Sequence
  Description of Artificial Sequence: Synthetic oligonucleotide
yggttaggtgaggyggttaggyg

SEQ ID NO: 1937 - DNA, 38 bp, Artificial Sequence
  Description of Artificial Sequence: Synthetic oligonucleotide
ygaattygtaaagttgttygtagaygygygggaattyg

SEQ ID NO: 1938 - DNA, 2 bp, Artificial Sequence
  Description of Artificial Sequence: Synthetic oligonucleotide
ct

SEQ ID NO: 1939 - DNA, 165 bp, Artificial Sequence
  Description of Artificial Sequence: Synthetic polynucleotide
ygygggttgtttagygtgttagattttttttttttggaygtgygtaagttgttggtggtyggtaatygtatttagyggattttygaggatttttttattttttayggygatttggtttatttggattttaggaataattygttgygttygttggaggagggtayg

SEQ ID NO: 1940 - DNA, 2 bp, Artificial Sequence
  Description of Artificial Sequence: Synthetic oligonucleotide
yg

SEQ ID NO: 1941 - DNA, 2 bp, Artificial Sequence
  Description of Artificial Sequence: Synthetic oligonucleotide
yg

SEQ ID NO: 1942 - DNA, 2 bp, Artificial Sequence
  Description of Artificial Sequence: Synthetic oligonucleotide
yg

SEQ ID NO: 1943 - DNA, 23 bp, Artificial Sequence
  Description of Artificial Sequence: Synthetic oligonucleotide
ygataggyggttttyggatatyg

SEQ ID NO: 1944 - DNA, 2 bp, Artificial Sequence
  Description of Artificial Sequence: Synthetic oligonucleotide
yg

SEQ ID NO: 1945 - DNA, 66 bp, Artificial Sequence
  Description of Artificial Sequence: Synthetic oligonucleotide
yggygttttyggggttgttgygygttygygtttagagttgtygttttagggagttygttayggtyg

SEQ ID NO: 1946 - DNA, 43 bp, Artificial Sequence
  Description of Artificial Sequence: Synthetic oligonucleotide
ygggygygtagttygttygygyggtttggattttttttgttyg

SEQ ID NO: 1947 - DNA, 2 bp, Artificial Sequence
  Description of Artificial Sequence: Synthetic oligonucleotide
yg

SEQ ID NO: 1948 - DNA, 62 bp, Artificial Sequence
  Description of Artificial Sequence: Synthetic oligonucleotide
ygygttgtaygaggatggttaygaggygtagttggagtygtygtygtygtygtatttgggyg

SEQ ID NO: 1949 - DNA, 2 bp, Artificial Sequence
  Description of Artificial Sequence: Synthetic oligonucleotide
yg

SEQ ID NO: 1950 - DNA, 138 bp, Artificial Sequence
  Description of Artificial Sequence: Synthetic polynucleotide
ygttttygggygtayggaaattatttgttaggaaatttttaaygttttttttygtttatttttttttattttttttttggygygttttttttttttttagaggtaygtagtggagtttttggagtttygaatttttyg

SEQ ID NO: 1951 - DNA, 2 bp, Artificial Sequence
  Description of Artificial Sequence: Synthetic oligonucleotide
yg

SEQ ID NO: 1952 - DNA, 2 bp, Artificial Sequence
  Description of Artificial Sequence: Synthetic oligonucleotide
yg

SEQ ID NO: 1953 - DNA, 2 bp, Artificial Sequence
  Description of Artificial Sequence: Synthetic oligonucleotide
yg

SEQ ID NO: 1954 - DNA, 2 bp, Artificial Sequence
  Description of Artificial Sequence: Synthetic oligonucleotide
yg

SEQ ID NO: 1955 - DNA, 187 bp, Artificial Sequence
  Description of Artificial Sequence: Synthetic polynucleotide
ygagyggttttaatttygtttygtttgttgttgttgttgttggtgttgtttyggttgtagttgttgtygttttaygatttyggggygttgaggtaatagggttttttttttttattttttatttttttyggtttttttatagaagygtygtttttagtaatttttygtgtattttttatttttgtyg

SEQ ID NO: 1956 - DNA, 2 bp, Artificial Sequence
  Description of Artificial Sequence: Synthetic oligonucleotide
yg

SEQ ID NO: 1957 - DNA, 2 bp, Artificial Sequence
  Description of Artificial Sequence: Synthetic oligonucleotide
yg

SEQ ID NO: 1958 - DNA, 110 bp, Artificial Sequence
  Description of Artificial Sequence: Synthetic polynucleotide
ygtaggttaagatttggttttagaattatygttataagttgaagygygttygygttttaggggyggyggagtygtttgatttggtagtattygtygagttgtaygtygyg

SEQ ID NO: 1959 - DNA, 4 bp, Artificial Sequence
  Description of Artificial Sequence: Synthetic oligonucleotide
ygyg

SEQ ID NO: 1960 - DNA, 189 bp, Artificial Sequence
  Description of Artificial Sequence: Synthetic polynucleotide
ygtgttttygttygygtttgggtttygtygtattttagtagaagttattatagagaataaattatttttttgttttygagatgggttttyggggaggaaggtaaattgtttgtttygtgtataataagttaggygtggagagtagygyggaggaggtygyggtagttatygagygggtagagtttttyg

SEQ ID NO: 1961 - DNA, 42 bp, Artificial Sequence
  Description of Artificial Sequence: Synthetic oligonucleotide
ygygagtgtatttaagygttttygttttatttatttttagyg

SEQ ID NO: 1962 - DNA, 33 bp, Artificial Sequence
  Description of Artificial Sequence: Synthetic oligonucleotide
ygtggagygtaaagtgtttgaagttttygygyg

SEQ ID NO: 1963 - DNA, 15 bp, Artificial Sequence
  Description of Artificial Sequence: Synthetic oligonucleotide
ygttyggttggygyg

SEQ ID NO: 1964 - DNA, 51 bp, Artificial Sequence
  Description of Artificial Sequence: Synthetic oligonucleotide
ygtttattayggygatttgyggtagttttagtaggtagttttgttttagyg

SEQ ID NO: 1965 - DNA, 2 bp, Artificial Sequence
  Description of Artificial Sequence: Synthetic oligonucleotide
yg

SEQ ID NO: 1966 - DNA, 268 bp, Artificial Sequence
  Description of Artificial Sequence: Synthetic polynucleotide
ygaagatgggaaayggtygtttgttgagagggggtatttgtagtttttttagaaaaggttggggtaggagagygtgyggttagaggggtgggggtatyggagggggggttttattttttgttttatagtygggtttttttygygaggygttgggaagtatgaggtatgtagtatttaaaatgttttttgaaaaagayggatttgaagtttttttttataaataygttattgtatttattttttatttagagaygggttgygygtttyg

SEQ ID NO: 1967 - DNA, 2 bp, Artificial Sequence
  Description of Artificial Sequence: Synthetic oligonucleotide
yg

SEQ ID NO: 1968 - DNA, 33 bp, Artificial Sequence
  Description of Artificial Sequence: Synthetic oligonucleotide
yggtgatyggtttgattgtttttgggggtttyg

SEQ ID NO: 1969 - DNA, 23 bp, Artificial Sequence
  Description of Artificial Sequence: Synthetic oligonucleotide
ygaaagtttygggttagtgggyg

SEQ ID NO: 1970 - DNA, 40 bp, Artificial Sequence
  Description of Artificial Sequence: Synthetic oligonucleotide
ygaggtatttggtygggyggggaggygtygggtyggggyg

SEQ ID NO: 1971 - DNA, 10 bp, Artificial Sequence
  Description of Artificial Sequence: Synthetic oligonucleotide
yggagtygyg

SEQ ID NO: 1972 - DNA, 181 bp, Artificial Sequence
  Description of Artificial Sequence: Synthetic polynucleotide
ygaaaaygaaatttatttttttgygtttatttttgttagaggtttgtaggaygtgttttaatttggtatttygagtttagaataaaagttaygggggttgyggtatgggtagggggaaggygygyggtggttgaygyggggtaggggttttggygagygygggaggggyggttagtagtyg

SEQ ID NO: 1973 - DNA, 195 bp, Artificial Sequence
  Description of Artificial Sequence: Synthetic polynucleotide
ygttaagtagtaggattatagygttagygtttggtttyggaggaaagataagttggagtaygtaagggygattygttttygggggtttyggttaggtatttgtygtatgtatttttttygtggtggtggtatgagygygygyggggygyggggggtaggygaggggattttggtaggygtygaygttttaggtyg

SEQ ID NO: 1974 - DNA, 2 bp, Artificial Sequence
  Description of Artificial Sequence: Synthetic oligonucleotide
yg

SEQ ID NO: 1975 - DNA, 358 bp, Artificial Sequence
  Description of Artificial Sequence: Synthetic polynucleotide
ygygagttygggtgagagttatyggaatgygggaaygtagtttagtygggaatagggttttygataggggtygttygtggttaggaygyggtygttgaatagaggtygygyggyggtttttgttygagggatttygtgggygggggttatayggaggtygygtayggttttyggggttggygggggtaggtgggaggatttttttygggttygygaatttgatttggtagyggttaggtgtttggaagygtttttaaatgatagggttataaagatatgttggttaggtttgtagttagygtagtaaygtggtttgtaggagygtagaaygaggttagatagggttattyggaygtyg

SEQ ID NO: 1976 - DNA, 13 bp, Artificial Sequence
  Description of Artificial Sequence: Synthetic oligonucleotide
ygttataattgyg

SEQ ID NO: 1977 - DNA, 2 bp, Artificial Sequence
  Description of Artificial Sequence: Synthetic oligonucleotide
yg

SEQ ID NO: 1978 - DNA, 2 bp, Artificial Sequence
  Description of Artificial Sequence: Synthetic oligonucleotide
yg

SEQ ID NO: 1979 - DNA, 95 bp, Artificial Sequence
  Description of Artificial Sequence: Synthetic oligonucleotide
ygggtattygggaygaggygagggygtagaaaatttggagtttaattagtayggagttgagttttygygttttaatttttaggtgatttygtgyg

SEQ ID NO: 1980 - DNA, 45 bp, Artificial Sequence
  Description of Artificial Sequence: Synthetic oligonucleotide
ygtygagagggtaggaygygtayggtgygttttaatttgttgtyg

SEQ ID NO: 1981 - DNA, 104 bp, Artificial Sequence
  Description of Artificial Sequence: Synthetic polynucleotide
ygygagttagggggaggygygtyggaaagygagagtgataagtagtttataagtygaaaagtttttygygggaggygygygtygygtgggtttygatttagtyg

SEQ ID NO: 1982 - DNA, 87 bp, Artificial Sequence
  Description of Artificial Sequence: Synthetic oligonucleotide
ygggagggtggyggaaggtggtgtatygtagygtggttttygtygttgtygtygyggttttgtaaagtgttagygggggygaaagyg

SEQ ID NO: 1983 - DNA, 62 bp, Artificial Sequence
  Description of Artificial Sequence: Synthetic oligonucleotide
ygatattgaataataatygyggggaggagaggttatttgtagtygaggttygtaaattgtyg

SEQ ID NO: 1984 - DNA, 2 bp, Artificial Sequence
  Description of Artificial Sequence: Synthetic oligonucleotide
yg

SEQ ID NO: 1985 - DNA, 2 bp, Artificial Sequence
  Description of Artificial Sequence: Synthetic oligonucleotide
yg

SEQ ID NO: 1986 - DNA, 2 bp, Artificial Sequence
  Description of Artificial Sequence: Synthetic oligonucleotide
yg

SEQ ID NO: 1987 - DNA, 2 bp, Artificial Sequence
  Description of Artificial Sequence: Synthetic oligonucleotide
yg

SEQ ID NO: 1988 - DNA, 2 bp, Artificial Sequence
  Description of Artificial Sequence: Synthetic oligonucleotide
yg

SEQ ID NO: 1989 - DNA, 2 bp, Artificial Sequence
  Description of Artificial Sequence: Synthetic oligonucleotide
yg

SEQ ID NO: 1990 - DNA, 2 bp, Artificial Sequence
  Description of Artificial Sequence: Synthetic oligonucleotide
yg

SEQ ID NO: 1991 - DNA, 2 bp, Artificial Sequence
  Description of Artificial Sequence: Synthetic oligonucleotide
yg

SEQ ID NO: 1992 - DNA, 145 bp, Artificial Sequence
  Description of Artificial Sequence: Synthetic polynucleotide
ygggaatygtaggagaggattggggttttaggtggayggtgttgattgtattggttttgaagattggaagtgggtgtaggaggaatttgygatagttgagattagggygygygggtagatgygttaggtygttagtaaatyggyg

SEQ ID NO: 1993 - DNA, 2 bp, Artificial Sequence
  Description of Artificial Sequence: Synthetic oligonucleotide
yg

SEQ ID NO: 1994 - DNA, 19 bp, Artificial Sequence
  Description of Artificial Sequence: Synthetic oligonucleotide
yggtttttggyggtgggyg

SEQ ID NO: 1995 - DNA, 35 bp, Artificial Sequence
  Description of Artificial Sequence: Synthetic oligonucleotide
yggaggtttygttaatggggtygtygtygtygtyg

SEQ ID NO: 1996 - DNA, 2 bp, Artificial Sequence
  Description of Artificial Sequence: Synthetic oligonucleotide
yg

SEQ ID NO: 1997 - DNA, 2 bp, Artificial Sequence
  Description of Artificial Sequence: Synthetic oligonucleotide
yg

SEQ ID NO: 1998 - DNA, 36 bp, Artificial Sequence
  Description of Artificial Sequence: Synthetic oligonucleotide
yggtttttttgtagttagyggattagygttagttyg

SEQ ID NO: 1999 - DNA, 2 bp, Artificial Sequence
  Description of Artificial Sequence: Synthetic oligonucleotide
yg

SEQ ID NO: 2000 - DNA, 42 bp, Artificial Sequence
  Description of Artificial Sequence: Synthetic oligonucleotide
ygtataatggtaaatgggattaggtaggygaaggtttagtyg

SEQ ID NO: 2001 - DNA, 2 bp, Artificial Sequence
  Description of Artificial Sequence: Synthetic oligonucleotide
yg

SEQ ID NO: 2002 - DNA, 2 bp, Artificial Sequence
  Description of Artificial Sequence: Synthetic oligonucleotide
yg

SEQ ID NO: 2003 - DNA, 18 bp, Artificial Sequence
  Description of Artificial Sequence: Synthetic oligonucleotide
yggygygggygttgygyg

SEQ ID NO: 2004 - DNA, 2 bp, Artificial Sequence
  Description of Artificial Sequence: Synthetic oligonucleotide
yg

SEQ ID NO: 2005 - DNA, 2 bp, Artificial Sequence
  Description of Artificial Sequence: Synthetic oligonucleotide
yg

SEQ ID NO: 2006 - DNA, 2 bp, Artificial Sequence
  Description of Artificial Sequence: Synthetic oligonucleotide
yg

SEQ ID NO: 2007 - DNA, 118 bp, Artificial Sequence
  Description of Artificial Sequence: Synthetic polynucleotide
ygygtygttgttttgttttaggtttyggtgyggttttaagttttagtttagggtttttaggtttttttaggyggyggtggyggtatttatttgggtygyggagtyggggtttggtayg

SEQ ID NO: 2008 - DNA, 22 bp, Artificial Sequence
  Description of Artificial Sequence: Synthetic oligonucleotide
ygttygygtygttygyggttyg

SEQ ID NO: 2009 - DNA, 2 bp, Artificial Sequence
  Description of Artificial Sequence: Synthetic oligonucleotide
yg

SEQ ID NO: 2010 - DNA, 2 bp, Artificial Sequence
  Description of Artificial Sequence: Synthetic oligonucleotide
yg

SEQ ID NO: 2011 - DNA, 2 bp, Artificial Sequence
  Description of Artificial Sequence: Synthetic oligonucleotide
yg

SEQ ID NO: 2012 - DNA, 2 bp, Artificial Sequence
  Description of Artificial Sequence: Synthetic oligonucleotide
yg

SEQ ID NO: 2013 - DNA, 31 bp, Artificial Sequence
  Description of Artificial Sequence: Synthetic oligonucleotide
ygtaatatattttagtatygagtttttgtyg

SEQ ID NO: 2014 - DNA, 2 bp, Artificial Sequence
  Description of Artificial Sequence: Synthetic oligonucleotide
yg

SEQ ID NO: 2015 - DNA, 2 bp, Artificial Sequence
  Description of Artificial Sequence: Synthetic oligonucleotide
yg

SEQ ID NO: 2016 - DNA, 2 bp, Artificial Sequence
  Description of Artificial Sequence: Synthetic oligonucleotide
yg

SEQ ID NO: 2017 - DNA, 2 bp, Artificial Sequence
  Description of Artificial Sequence: Synthetic oligonucleotide
yg

SEQ ID NO: 2018 - DNA, 2 bp, Artificial Sequence
  Description of Artificial Sequence: Synthetic oligonucleotide
yg

SEQ ID NO: 2019 - DNA, 2 bp, Artificial Sequence
  Description of Artificial Sequence: Synthetic oligonucleotide
yg

SEQ ID NO: 2020 - DNA, 2 bp, Artificial Sequence
  Description of Artificial Sequence: Synthetic oligonucleotide
yg

SEQ ID NO: 2021 - DNA, 2 bp, Artificial Sequence
  Description of Artificial Sequence: Synthetic oligonucleotide
yg

SEQ ID NO: 2022 - DNA, 2 bp, Artificial Sequence
  Description of Artificial Sequence: Synthetic oligonucleotide
yg

SEQ ID NO: 2023 - DNA, 69 bp, Artificial Sequence
  Description of Artificial Sequence: Synthetic oligonucleotide
ygtttttyggttygtttttttygagygtygtygataygttagttaaayggtygttggtygtttttagyg

SEQ ID NO: 2024 - DNA, 415 bp, Artificial Sequence
  Description of Artificial Sequence: Synthetic polynucleotide
ygtaygggttgggtttgggaatggggatygygaggttttagtatttygatgttttgaaagttttttygtttyggggatttgtttttgtgttgtagttggtaggggtygtttgaagtgggagtagygtttggagaaggygggaggagttyggttygggggaygggyggygggatagygggatttyggyggygyggtgygttttagggygtagyggyggtygtagatygagtttygggygyggtaagaggyggygggagtyggtggyggttyggtattatgygtygagggygtttgttggagatygttttgggatttatygtgtttttagygttttataygagttatggggyggaygttaatttggaggttgggaaygtgaaggaaattagagttagtygggttaagagaagaggyg

SEQ ID NO: 2025 - DNA, 2 bp, Artificial Sequence
  Description of Artificial Sequence: Synthetic oligonucleotide
yg

SEQ ID NO: 2026 - DNA, 2 bp, Artificial Sequence
  Description of Artificial Sequence: Synthetic oligonucleotide
yg

SEQ ID NO: 2027 - DNA, 2 bp, Artificial Sequence
  Description of Artificial Sequence: Synthetic oligonucleotide
yg

SEQ ID NO: 2028 - DNA, 2 bp, Artificial Sequence
  Description of Artificial Sequence: Synthetic oligonucleotide
yg

SEQ ID NO: 2029 - DNA, 2 bp, Artificial Sequence
  Description of Artificial Sequence: Synthetic oligonucleotide
yg

SEQ ID NO: 2030 - DNA, 62 bp, Artificial Sequence
  Description of Artificial Sequence: Synthetic oligonucleotide
ygtgygtattttaagygygtgygggagtgtgygaggygttgtgygagttagyggygggygyg

SEQ ID NO: 2031 - DNA, 2 bp, Artificial Sequence
  Description of Artificial Sequence: Synthetic oligonucleotide
yg

SEQ ID NO: 2032 - DNA, 2 bp, Artificial Sequence
  Description of Artificial Sequence: Synthetic oligonucleotide
yg

SEQ ID NO: 2033 - DNA, 2 bp, Artificial Sequence
  Description of Artificial Sequence: Synthetic oligonucleotide
yg

SEQ ID NO: 2034 - DNA, 2 bp, Artificial Sequence
  Description of Artificial Sequence: Synthetic oligonucleotide
yg

SEQ ID NO: 2035 - DNA, 20 bp, Artificial Sequence
  Description of Artificial Sequence: Synthetic oligonucleotide
yggaggtttttgygtttgyg

SEQ ID NO: 2036 - DNA, 69 bp, Artificial Sequence
  Description of Artificial Sequence: Synthetic oligonucleotide
ygttgygttttttygtttgttggygtttttgttttagygggattyggtagttaggggttttagggggyg

SEQ ID NO: 2037 - DNA, 2 bp, Artificial Sequence
  Description of Artificial Sequence: Synthetic oligonucleotide
yg

SEQ ID NO: 2038 - DNA, 318 bp, Artificial Sequence
  Description of Artificial Sequence: Synthetic polynucleotide
ygagaygyggtagatttttagagyggtttatttatttatygaagyggattttgggyggtttygggttgattygygttgttagggygyggattttatttygggygtattgttaggagaaggggtttttyggggyggygygtttygattttgggttttyggtgttygtagagggyggagattygyggygttttaggttatttattygtattttttygagttaaatttttagygtttattyggattygayggtttaagtattgatttttaggtaagagtygttttttttggtttttagggaattgatattatygygggayg

SEQ ID NO: 2039 - DNA, 27 bp, Artificial Sequence
  Description of Artificial Sequence: Synthetic oligonucleotide
ygygttttygttyggggagttattayg

SEQ ID NO: 2040 - DNA, 2 bp, Artificial Sequence
  Description of Artificial Sequence: Synthetic oligonucleotide
yg

SEQ ID NO: 2041 - DNA, 13 bp, Artificial Sequence
  Description of Artificial Sequence: Synthetic oligonucleotide
ygyggggagttyg

SEQ ID NO: 2042 - DNA, 189 bp, Artificial Sequence
  Description of Artificial Sequence: Synthetic polynucleotide
ygtaatttttagttaaagttatygygggyggattatggtttagggygttagaggggttagaggtaygggaagaggaaaagayggttaattgggaaaaaaagagaaaaygaaagaaaagttaaaygatgagtttttataaggaggayggagtgaatagtttgtgttagaaggttttgtatatygttatyg

SEQ ID NO: 2043 - DNA, 2 bp, Artificial Sequence
  Description of Artificial Sequence: Synthetic oligonucleotide
yg

SEQ ID NO: 2044 - DNA, 2 bp, Artificial Sequence
  Description of Artificial Sequence: Synthetic oligonucleotide
yg

SEQ ID NO: 2045 - DNA, 13 bp, Artificial Sequence
  Description of Artificial Sequence: Synthetic oligonucleotide
ygtttagttttyg

SEQ ID NO: 2046 - DNA, 51 bp, Artificial Sequence
  Description of Artificial Sequence: Synthetic oligonucleotide
ygaaggygaggtygtttagttygtattttattttaygtayggtataygtyg

SEQ ID NO: 2047 - DNA, 289 bp, Artificial Sequence
  Description of Artificial Sequence: Synthetic polynucleotide
yggtagtgtttttttaagaaggggtaaaaaaatttgtttatggttatttttttttygttttattttttttttttttgatagtttyggttttggttgttygagtygggggtgtgttttyggttttttttagatttgggyggggggygggaggagtgagygatttgggaagtttygggggtggagagggggygtttyggggtttgggggygaygtggatattttttttggagtayggyggtgygtttgggatttgaaggaagggtygaaggaagyggggtgygggygggyg

SEQ ID NO: 2048 - DNA, 2 bp, Artificial Sequence
  Description of Artificial Sequence: Synthetic oligonucleotide
yg

SEQ ID NO: 2049 - DNA, 165 bp, Artificial Sequence
  Description of Artificial Sequence: Synthetic polynucleotide
ygttttgggaagygtagaggygggggtgttgttygygttggggagtaygtgaggggatatttagggattgttygygygaatggtttttaaygtatgygttttattttatattttatagtygttatgaygatygggaggttygtaayggttgyggggataagttyg

SEQ ID NO: 2050 - DNA, 21 bp, Artificial Sequence
  Description of Artificial Sequence: Synthetic oligonucleotide
ygaagtggtgtaggggyggyg

SEQ ID NO: 2051 - DNA, 2 bp, Artificial Sequence
  Description of Artificial Sequence: Synthetic oligonucleotide
yg

SEQ ID NO: 2052 - DNA, 2 bp, Artificial Sequence
  Description of Artificial Sequence: Synthetic oligonucleotide
yg

SEQ ID NO: 2053 - DNA, 2 bp, Artificial Sequence
  Description of Artificial Sequence: Synthetic oligonucleotide
yg

SEQ ID NO: 2054 - DNA, 159 bp, Artificial Sequence
  Description of Artificial Sequence: Synthetic polynucleotide
ygtgttygtggatgygtagygttaygyggttgtttattatttagygatataygyggtttayggagaaggtgaggtygtagygggtygatttgtygyggtttaggyggtygtygtyggygttgtttatgttgtagagggatagtgyggttagygtagtyg

SEQ ID NO: 2055 - DNA, 2 bp, Artificial Sequence
  Description of Artificial Sequence: Synthetic oligonucleotide
yg

SEQ ID NO: 2056 - DNA, 129 bp, Artificial Sequence
  Description of Artificial Sequence: Synthetic polynucleotide
ygtgygttygagtggggtatttgttygaggtyggggattgtgaatygaaagattttatttagttttgttgtttttttggtattgygatttgggggygggttattttatttttttgaatttygtttttyg

SEQ ID NO: 2057 - DNA, 2 bp, Artificial Sequence
  Description of Artificial Sequence: Synthetic oligonucleotide
yg

SEQ ID NO: 2058 - DNA, 120 bp, Artificial Sequence
  Description of Artificial Sequence: Synthetic polynucleotide
ygttttttttttttttttttttttttttttttttttttttttttttttttttttttggtattatagagttgttttgaaaatagaagatagagggagtttyggagttygttatttttagyg

SEQ ID NO: 2059 - DNA, 2 bp, Artificial Sequence
  Description of Artificial Sequence: Synthetic oligonucleotide
yg

SEQ ID NO: 2060 - DNA, 171 bp, Artificial Sequence
  Description of Artificial Sequence: Synthetic polynucleotide
ygttyggttgttgtatttgttagtgttgggtttaggttgagaggygatttttagtttttataataatgtttygggttttttggtttgggttttygtagygttygattgatygttagygataygaygagaaygaggatttgtyggaygtggaggagatygttagygttygyg

SEQ ID NO: 2061 - DNA, 2 bp, Artificial Sequence
  Description of Artificial Sequence: Synthetic oligonucleotide
yg

SEQ ID NO: 2062 - DNA, 2 bp, Artificial Sequence
  Description of Artificial Sequence: Synthetic oligonucleotide
yg

SEQ ID NO: 2063 - DNA, 2 bp, Artificial Sequence
  Description of Artificial Sequence: Synthetic oligonucleotide
yg

SEQ ID NO: 2064 - DNA, 64 bp, Artificial Sequence
  Description of Artificial Sequence: Synthetic oligonucleotide
yggggaaagttgggygygygagtygaggttgttgtttatttgtagtygygtygtttatttgtyg

SEQ ID NO: 2065 - DNA, 2 bp, Artificial Sequence
  Description of Artificial Sequence: Synthetic oligonucleotide
yg

SEQ ID NO: 2066 - DNA, 2 bp, Artificial Sequence
  Description of Artificial Sequence: Synthetic oligonucleotide
yg

SEQ ID NO: 2067 - DNA, 2 bp, Artificial Sequence
  Description of Artificial Sequence: Synthetic oligonucleotide
yg

SEQ ID NO: 2068 - DNA, 2 bp, Artificial Sequence
  Description of Artificial Sequence: Synthetic oligonucleotide
yg

SEQ ID NO: 2069 - DNA, 16 bp, Artificial Sequence
  Description of Artificial Sequence: Synthetic oligonucleotide
ygagttttgyggagyg

SEQ ID NO: 2070 - DNA, 2 bp, Artificial Sequence
  Description of Artificial Sequence: Synthetic oligonucleotide
yg

SEQ ID NO: 2071 - DNA, 2 bp, Artificial Sequence
  Description of Artificial Sequence: Synthetic oligonucleotide
yg

SEQ ID NO: 2072 - DNA, 2 bp, Artificial Sequence
  Description of Artificial Sequence: Synthetic oligonucleotide
yg

SEQ ID NO: 2073 - DNA, 18 bp, Artificial Sequence
  Description of Artificial Sequence: Synthetic oligonucleotide
ygyggtygagggaatgyg

SEQ ID NO: 2074 - DNA, 118 bp, Artificial Sequence
  Description of Artificial Sequence: Synthetic polynucleotide
ygygtttttgtttttgggtagatttttttatttgtgtattttggtttttttatttagtaaagagatgtgygaagtgtgygtttggagaygagtygtttyggtgatttttattygttyg

SEQ ID NO: 2075 - DNA, 2 bp, Artificial Sequence
  Description of Artificial Sequence: Synthetic oligonucleotide
yg

SEQ ID NO: 2076 - DNA, 2 bp, Artificial Sequence
  Description of Artificial Sequence: Synthetic oligonucleotide
yg

SEQ ID NO: 2077 - DNA, 2 bp, Artificial Sequence
  Description of Artificial Sequence: Synthetic oligonucleotide
yg

SEQ ID NO: 2078 - DNA, 2 bp, Artificial Sequence
  Description of Artificial Sequence: Synthetic oligonucleotide
yg

SEQ ID NO: 2079 - DNA, 2 bp, Artificial Sequence
  Description of Artificial Sequence: Synthetic oligonucleotide
yg

SEQ ID NO: 2080 - DNA, 22 bp, Artificial Sequence
  Description of Artificial Sequence: Synthetic oligonucleotide
yggatttttttggggyggygyg

SEQ ID NO: 2081 - DNA, 112 bp, Artificial Sequence
  Description of Artificial Sequence: Synthetic polynucleotide
ygaggtagggaggygttttygtagtttttgattttataattygygygygtgtgtatygagtygygggtatatygygaatatatatatatatatatatattygtgygttttyg

SEQ ID NO: 2082 - DNA, 109 bp, Artificial Sequence
  Description of Artificial Sequence: Synthetic polynucleotide
ygtggaggagtggggttaggtggttattattagtatgtttattygttaygttygtaygtagtttttgagttttatttagaaygtaagtgggtttagtttaggtagagyg

SEQ ID NO: 2083 - DNA, 2 bp, Artificial Sequence
  Description of Artificial Sequence: Synthetic oligonucleotide
yg

SEQ ID NO: 2084 - DNA, 2 bp, Artificial Sequence
  Description of Artificial Sequence: Synthetic oligonucleotide
yg

SEQ ID NO: 2085 - DNA, 2 bp, Artificial Sequence
  Description of Artificial Sequence: Synthetic oligonucleotide
yg

SEQ ID NO: 2086 - DNA, 431 bp, Artificial Sequence
  Description of Artificial Sequence: Synthetic polynucleotide
ygtgtttttttataggttttatttgtaattgagaygaatgattatagtggggygggaaggagtagttgtttattaattaatttttaattaaaagtgtttttygttttygggtgattaaagagaaatatygttygttgggygatattgattyggatggaatttatttgttaaygttyggaggaatggttttttygtttatygygyggtygggattgttttggtttttttyggtttgagtygtyggygagtgatyggygagtttgyggttaggtygggttgygygaggtggggttgaygttagagtttttttygttttaagtygygtatatttgatttgaygggttygygygattygtttttttttttttttttttygtaaaatatgtatttttgtygtygttgygaggtygttyggttttagagttttttyg

SEQ ID NO: 2087 - DNA, 2 bp, Artificial Sequence
  Description of Artificial Sequence: Synthetic oligonucleotide
yg

SEQ ID NO: 2088 - DNA, 40 bp, Artificial Sequence
  Description of Artificial Sequence: Synthetic oligonucleotide
ygtttttatttttttagyggagttatagyggggygyggyg

SEQ ID NO: 2089 - DNA, 2 bp, Artificial Sequence
  Description of Artificial Sequence: Synthetic oligonucleotide
yg

SEQ ID NO: 2090 - DNA, 22 bp, Artificial Sequence
  Description of Artificial Sequence: Synthetic oligonucleotide
ygtggttttgaatttgttggyg

SEQ ID NO: 2091 - DNA, 2 bp, Artificial Sequence
  Description of Artificial Sequence: Synthetic oligonucleotide
yg

SEQ ID NO: 2092 - DNA, 47 bp, Artificial Sequence
  Description of Artificial Sequence: Synthetic oligonucleotide
ygagttggagaattatagtatgtattgygtgtaatgtaagatgttyg

SEQ ID NO: 2093 - DNA, 24 bp, Artificial Sequence
  Description of Artificial Sequence: Synthetic oligonucleotide
ygtgttagaagttttttaayggyg

SEQ ID NO: 2094 - DNA, 2 bp, Artificial Sequence
  Description of Artificial Sequence: Synthetic oligonucleotide
yg

SEQ ID NO: 2095 - DNA, 45 bp, Artificial Sequence
  Description of Artificial Sequence: Synthetic oligonucleotide
ygagggttttagttaattagtttgttgggtgggtttggagtttyg

SEQ ID NO: 2096 - DNA, 2 bp, Artificial Sequence
  Description of Artificial Sequence: Synthetic oligonucleotide
yg

SEQ ID NO: 2097 - DNA, 258 bp, Artificial Sequence
  Description of Artificial Sequence: Synthetic polynucleotide
ygygtatttgtttaggygttgyggtttagygygttttaatttttagttygggyggagagygggggygggattgaagtatygtgttttttaaagtattttttygtygtyggtagttttggtttygtaaatgttttagygygtttaggygtaygtagagattggygyggtagttttygggttaayggtaygygagtaaagttggttggygatttgggataygtagtagaagttgaggttgtatygattttygtygtttyg

SEQ ID NO: 2098 - DNA, 45 bp, Artificial Sequence
  Description of Artificial Sequence: Synthetic oligonucleotide
ygygatygtaagttygagtttaggtttttyggagtygttagggyg

SEQ ID NO: 2099 - DNA, 7 bp, Artificial Sequence
  Description of Artificial Sequence: Synthetic oligonucleotide
ygtygyg

SEQ ID NO: 2100 - DNA, 4 bp, Artificial Sequence
  Description of Artificial Sequence: Synthetic oligonucleotide
ygyg

SEQ ID NO: 2101 - DNA, 67 bp, Artificial Sequence
  Description of Artificial Sequence: Synthetic oligonucleotide
ygaggtygtttygttggttggtgtaagaattagtttgtaatttaagttttgagttgttggygtttyg

SEQ ID NO: 2102 - DNA, 43 bp, Artificial Sequence
  Description of Artificial Sequence: Synthetic oligonucleotide
ygttygagttttygttgttgtygttgtygttgygggttagtyg

SEQ ID NO: 2103 - DNA, 2 bp, Artificial Sequence
  Description of Artificial Sequence: Synthetic oligonucleotide
yg

SEQ ID NO: 2104 - DNA, 2 bp, Artificial Sequence
  Description of Artificial Sequence: Synthetic oligonucleotide
yg

SEQ ID NO: 2105 - DNA, 113 bp, Artificial Sequence
  Description of Artificial Sequence: Synthetic polynucleotide
ygttygagattygggagagattaggggttygtaaagtagaagagtagatttagaaagaaaaaaaaaaaagygagaagtgygagaaaaatatattgaatttagttaaatatayg

SEQ ID NO: 2106 - DNA, 4 bp, Artificial Sequence
  Description of Artificial Sequence: Synthetic oligonucleotide
ygyg

SEQ ID NO: 2107 - DNA, 2 bp, Artificial Sequence
  Description of Artificial Sequence: Synthetic oligonucleotide
yg

SEQ ID NO: 2108 - DNA, 84 bp, Artificial Sequence
  Description of Artificial Sequence: Synthetic oligonucleotide
ygggttttggggygttggtgttygygtagttttagtygttttygtagttatygtygttyggtttygyggaggyggygygtagyg

SEQ ID NO: 2109 - DNA, 2 bp, Artificial Sequence
  Description of Artificial Sequence: Synthetic oligonucleotide
yg

SEQ ID NO: 2110 - DNA, 48 bp, Artificial Sequence
  Description of Artificial Sequence: Synthetic oligonucleotide
ygtaggttaagatttggttttagaattatygttataagatgaagygyg

SEQ ID NO: 2111 - DNA, 228 bp, Artificial Sequence
  Description of Artificial Sequence: Synthetic polynucleotide
ygtygttattaygtygygygtygtatttygygttaagaatggggyggttaagttgtttaagtygttygtygtygtygtygtygtygyggtygaggygttyggygtyggygygggtatggagygttygtagagtygttttagtttgttygtttttttygaggygttygttatttatttttygtgtatgaattttttygaygaygaggaygtaggtaagygygyggttyg

SEQ ID NO: 2112 - DNA, 47 bp, Artificial Sequence
  Description of Artificial Sequence: Synthetic oligonucleotide
ygttggtgygtggyggygtggagygygtttgttayggttaaggtgyg

SEQ ID NO: 2113 - DNA, 185 bp, Artificial Sequence
  Description of Artificial Sequence: Synthetic polynucleotide
ygtygtttttyggtttagagtttttattttyggtttgtgagtttgyggygttggtggagttyggttttaggaagaggagtttattyggttttttttgattggatagtagygaggttttatygggygttttygyggtttaaaatygaagygggggygagggggaggtagagttygttttttgygyg

SEQ ID NO: 2114 - DNA, 216 bp, Artificial Sequence
  Description of Artificial Sequence: Synthetic polynucleotide
yggygttttatttattggygtttayggttygtaggtaaagygtggaaggagttgaaygyggyggagaagyggtttttygtggaggaagtygaayggttgygygtgtagtatttgygygattattttaattataagtatyggtygygtygtaagaagtaggygygtaaggttyggyggttggagttyggttttttgttttygggattagygttttyg

SEQ ID NO: 2115 - DNA, 344 bp, Artificial Sequence
  Description of Artificial Sequence: Synthetic polynucleotide
ygaataatagaaattgttaattttaataatttagagtaggttaaygaggttttgttttttygattygaattaaaggtttttygtttygtgygttgttaygagyggtgttttttggggttttaatgtagygagttgtgttygaggggttyggaaggygtaagttgggtagygatatggggaaygyggagygggtttyggggtttyggagttttgggttagtatttaygttgttgttgttygtygyggygttattggtygtgtyggaygtattygggygttttttygaggaggaygaggagttagtggtgtyggagttggagygygtttygggataygggattayg

SEQ ID NO: 2116 - DNA, 28 bp, Artificial Sequence
  Description of Artificial Sequence: Synthetic oligonucleotide
ygtttyggtttggttgttaaatagaayg

SEQ ID NO: 2117 - DNA, 124 bp, Artificial Sequence
  Description of Artificial Sequence: Synthetic polynucleotide
yggygygtayggttaaggtaygygygttggtataygygggygyggataygygyggatatataygtgygggataygttttttttygayggyggygttaatttttyggtaagtttagygttttayg

SEQ ID NO: 2118 - DNA, 80 bp, Artificial Sequence
  Description of Artificial Sequence: Synthetic oligonucleotide
ygaggtgtaggyggygygggygtttatygtgagygtygtgttgttggygttygttgygtttttygtgattttggygggyg

SEQ ID NO: 2119 - DNA, 62 bp, Artificial Sequence
  Description of Artificial Sequence: Synthetic oligonucleotide
ygaggygtggaggggtagtygyggyggggygatttttatttgtttattgyggggtttgttyg

SEQ ID NO: 2120 - DNA, 165 bp, Artificial Sequence
  Description of Artificial Sequence: Synthetic polynucleotide
ygttatttgatttygttattaagtttaaggtgttttggatttayggtaagtatagygtygttgtagttggtygtgygtttttattatygtygttaggtttygaggtygygtttagttttagtaagaggaaayggaygtttagygataaatyggygtatayggtyg

SEQ ID NO: 2121 - DNA, 43 bp, Artificial Sequence
  Description of Artificial Sequence: Synthetic oligonucleotide
ygygtttygaggaagygtyggaattattagaagtatagggayg

SEQ ID NO: 2122 - DNA, 86 bp, Artificial Sequence
  Description of Artificial Sequence: Synthetic oligonucleotide
ygttatttttaattagttgtaagtygagttgtttatttgggatygggtyggttyggygggtttggttttyggygaaggyggyggyg

SEQ ID NO: 2123 - DNA, 23 bp, Artificial Sequence
  Description of Artificial Sequence: Synthetic oligonucleotide
ygtttttttattttaygggttyg

SEQ ID NO: 2124 - DNA, 2 bp, Artificial Sequence
  Description of Artificial Sequence: Synthetic oligonucleotide
yg

SEQ ID NO: 2125 - DNA, 99 bp, Artificial Sequence
  Description of Artificial Sequence: Synthetic oligonucleotide
yggtaggagtagtttatagttaggagygttttttygtttttaaygtygygtttttttttttaaaayggtttaaaaaaatttattaattgtatggtygyg

SEQ ID NO: 2126 - DNA, 73 bp, Artificial Sequence
  Description of Artificial Sequence: Synthetic oligonucleotide
ygattatttttgtgtttttaggagtttattttgggyggtagggaggygttgygtggggtttaygagttttayg

SEQ ID NO: 2127 - DNA, 2 bp, Artificial Sequence
  Description of Artificial Sequence: Synthetic oligonucleotide
yg

SEQ ID NO: 2128 - DNA, 52 bp, Artificial Sequence
  Description of Artificial Sequence: Synthetic oligonucleotide
ygtttttaggattttygttygtttttttttgattyggtttttgttygtttyg

SEQ ID NO: 2129 - DNA, 50 bp, Artificial Sequence
  Description of Artificial Sequence: Synthetic oligonucleotide
ygtagtygtygygttygtatttgattatggagtgygtttttttgttygyg

SEQ ID NO: 2130 - DNA, 50 bp, Artificial Sequence
  Description of Artificial Sequence: Synthetic oligonucleotide
ygaaygtagagtttataygtggattttygygtttgtgatgtttygattyg

SEQ ID NO: 2131 - DNA, 2 bp, Artificial Sequence
  Description of Artificial Sequence: Synthetic oligonucleotide
yg

SEQ ID NO: 2132 - DNA, 2 bp, Artificial Sequence
  Description of Artificial Sequence: Synthetic oligonucleotide
yg

SEQ ID NO: 2133 - DNA, 52 bp, Artificial Sequence
  Description of Artificial Sequence: Synthetic oligonucleotide
ygtttggggtttaygygagtygygagtttttgtttgtttttgygttatttyg

SEQ ID NO: 2134 - DNA, 2 bp, Artificial Sequence
  Description of Artificial Sequence: Synthetic oligonucleotide
yg

SEQ ID NO: 2135 - DNA, 2 bp, Artificial Sequence
  Description of Artificial Sequence: Synthetic oligonucleotide
yg

SEQ ID NO: 2136 - DNA, 2 bp, Artificial Sequence
  Description of Artificial Sequence: Synthetic oligonucleotide
yg

SEQ ID NO: 2137 - DNA, 138 bp, Artificial Sequence
  Description of Artificial Sequence: Synthetic polynucleotide
ygyggygtttttagttgttttttattygtttygttygttagtttttttttygygygatggtttyggygttgagttatgtttttaagtttaagtttttygtgattttgttygttatttygtttttgttgttgttattyg

SEQ ID NO: 2138 - DNA, 2 bp, Artificial Sequence
  Description of Artificial Sequence: Synthetic oligonucleotide
yg

SEQ ID NO: 2139 - DNA, 2 bp, Artificial Sequence
  Description of Artificial Sequence: Synthetic oligonucleotide
yg

SEQ ID NO: 2140 - DNA, 2 bp, Artificial Sequence
  Description of Artificial Sequence: Synthetic oligonucleotide
yg

SEQ ID NO: 2141 - DNA, 1017 bp, Artificial Sequence
  Description of Artificial Sequence: Synthetic polynucleotide
cgtttatttgagttttaaaagttgttgaatttatatggttacgtttcggggagcggggttttagatttggttcgtttaggttatttgcgcggcgttcgcgttcgttcgttttcgtttcgcggcgtcggttttcggttttcggttcgtcgtttttcgtcgttcgtcggtcgcggggcgtatagcgagttagagcgcggtcgcgcggggttttatgtcggtcggcgcgtcgtcgtcgttggggcgtatggtttaggttgggcggttcgcgggggcgtatatttttcggtcggggcgcggggttcgcggtttttttcgtcggcggtatagcgaaggcggtagcgaggcggggcgtgtttcggcgttgtcgcggcgtagtaaagggttggggagtcgcggtttcgtttttcggggcggcgaggagggaggtcggcggcgttgtcgtttacggtgcgtgtttttcggcgcgcggtttttgtttttagtcggagtttcgcgtcgatggggcggcgttgtttagggtttggggtgacgcgacgcggacggacgcgagtttttttcgcgttgtcgggtcggggggttttgttagaggtttcgtcgtcgatcggcgttatttaagttgttcgggggtttcgtttgagcgttcgttttgtagacggtcgcggttcggagattggtaggaggcgggtacgagaggcgcgcggggcgagggcgtcgtggagcgcggggcgtggggacgcgcggcggcggcgtcgcgcggaggaggcgcgcggggatttcggggtttcgtcgttcgcgtttatcgcgttcgtcgtagagtcgttcgcgttgtttagtcgttttttttttcgcgtttgttttttcgcgcgttcgttttcgtttttcggagtcggttttaatttcgttcgttcggttcggtttacgttattcgtttttttcgtttttcgaacgggagttcgagtttttggtttggtttcggtttttgttcgtcgttttattttgcgggggtcggggtcgtcg

SEQ ID NO: 2142 - DNA, 166 bp, Artificial Sequence
  Description of Artificial Sequence: Synthetic polynucleotide
cgcgcgttgagggtgcggtgagttgagtgcggggttaagtatgttttggcgtcgatttcgtttaggggtttaggatttggcgtttaaggggttttttggcgacggagattttcgacgtagtagcgattcgcggttgtttaagttgatttcgttcgcgtttcgagcg

SEQ ID NO: 2143 - DNA, 2 bp, Artificial Sequence
  Description of Artificial Sequence: Synthetic oligonucleotide
cg

SEQ ID NO: 2144 - DNA, 2 bp, Artificial Sequence
  Description of Artificial Sequence: Synthetic oligonucleotide
cg

SEQ ID NO: 2145 - DNA, 2 bp, Artificial Sequence
  Description of Artificial Sequence: Synthetic oligonucleotide
cg

SEQ ID NO: 2146 - DNA, 2 bp, Artificial Sequence
  Description of Artificial Sequence: Synthetic oligonucleotide
cg

SEQ ID NO: 2147 - DNA, 2 bp, Artificial Sequence
  Description of Artificial Sequence: Synthetic oligonucleotide
cg

SEQ ID NO: 2148 - DNA, 2 bp, Artificial Sequence
  Description of Artificial Sequence: Synthetic oligonucleotide
cg

SEQ ID NO: 2149 - DNA, 14 bp, Artificial Sequence
  Description of Artificial Sequence: Synthetic oligonucleotide
cgcgttgagacgcg

SEQ ID NO: 2150 - DNA, 2 bp, Artificial Sequence
  Description of Artificial Sequence: Synthetic oligonucleotide
cg

SEQ ID NO: 2151 - DNA, 2 bp, Artificial Sequence
  Description of Artificial Sequence: Synthetic oligonucleotide
cg

SEQ ID NO: 2152 - DNA, 2 bp, Artificial Sequence
  Description of Artificial Sequence: Synthetic oligonucleotide
cg

SEQ ID NO: 2153 - DNA, 125 bp, Artificial Sequence
  Description of Artificial Sequence: Synthetic polynucleotide
cgtttcgcgttttcgtttcgttatgtttttgttgttggggttgtgtttggggttgtttttgtgtgtggggtcgtaggaagaggcgtagagttggggttatttttcggagtaggtaagtggagtcg

SEQ ID NO: 2154 - DNA, 2 bp, Artificial Sequence
  Description of Artificial Sequence: Synthetic oligonucleotide
cg

SEQ ID NO: 2155 - DNA, 131 bp, Artificial Sequence
  Description of Artificial Sequence: Synthetic polynucleotide
cgtgcgtagtttagtttttttcggacgttttcgttttcgttcgggtatatcgtgtttcgtatcgaggtagagaggggtacgcggattttagtttttgcgagtttttttgttcgtcgttattttatatttcg

SEQ ID NO: 2156 - DNA, 94 bp, Artificial Sequence
  Description of Artificial Sequence: Synthetic oligonucleotide
cgggtcgcgtgggtttgggcgcgtcgtggtgggtaagcggggttagcggagcgggaattcgtatatttttcgagcggagtcgaggataggttcg

SEQ ID NO: 2157 - DNA, 2 bp, Artificial Sequence
  Description of Artificial Sequence: Synthetic oligonucleotide
cg

SEQ ID NO: 2158 - DNA, 2 bp, Artificial Sequence
  Description of Artificial Sequence: Synthetic oligonucleotide
cg

SEQ ID NO: 2159 - DNA, 27 bp, Artificial Sequence
  Description of Artificial Sequence: Synthetic oligonucleotide
cgcgtaagtatttttttttttatcgcg

SEQ ID NO: 2160 - DNA, 164 bp, Artificial Sequence
  Description of Artificial Sequence: Synthetic polynucleotide
cgcgatttttttcgggaggtgtttgcgaaggcggttttgtcgcggtgggggtggggaggttagggtttcggatcgttggagttggggtcgtagttagtttttggcgagtgttttttggttgttgtcgtaggggtttgttttttcggattttttttttaatttcg

SEQ ID NO: 2161 - DNA, 2 bp, Artificial Sequence
  Description of Artificial Sequence: Synthetic oligonucleotide
cg

SEQ ID NO: 2162 - DNA, 2 bp, Artificial Sequence
  Description of Artificial Sequence: Synthetic oligonucleotide
cg

SEQ ID NO: 2163 - DNA, 68 bp, Artificial Sequence
  Description of Artificial Sequence: Synthetic oligonucleotide
cgtatttgaaaatttcgtcgtagttattttttttttatgggaaagtttcgatttcggcgggtttagcg

SEQ ID NO: 2164 - DNA, 508 bp, Artificial Sequence
  Description of Artificial Sequence: Synthetic polynucleotide
cgtaatttgggcgcgttagtataaattcggttttcggtttttttgaagttagttaagttcgtatagggtttttagcgtttggaaatttgagaggcgtggaagggtggggagtttcgcgaagtttttagtttttgggtgtttttcggtttcgcgggggagcgggtttggagttaaatcggtcggtcgtaggttggagtagcgggcgtcggagcgcgcggtggggatgttcgaaaaggagttagaggtttagtcggagagttcgagaatacgagggatgtttattttgtaatatggttttaagtttttttttgtttacgcggaagcgtttttcgttttatttcgggttgtgtagggtcgtttcggcgattaagtcgttttcggagtcgggtattggggagtcggtgttgcgttcgttgttggagtcggggttcgattgcgtcgttaggtagtcgggttttttttgggcggttatggtgggcgcgtagcgttcgggttttcgttgtcgtcg

SEQ ID NO: 2165 - DNA, 2 bp, Artificial Sequence
  Description of Artificial Sequence: Synthetic oligonucleotide
cg

SEQ ID NO: 2166 - DNA, 2 bp, Artificial Sequence
  Description of Artificial Sequence: Synthetic oligonucleotide
cg

SEQ ID NO: 2167 - DNA, 2 bp, Artificial Sequence
  Description of Artificial Sequence: Synthetic oligonucleotide
cg

SEQ ID NO: 2168 - DNA, 2 bp, Artificial Sequence
  Description of Artificial Sequence: Synthetic oligonucleotide
cg

SEQ ID NO: 2169 - DNA, 4 bp, Artificial Sequence
  Description of Artificial Sequence: Synthetic oligonucleotide
cgcg

SEQ ID NO: 2170 - DNA, 2 bp, Artificial Sequence
  Description of Artificial Sequence: Synthetic oligonucleotide
cg

SEQ ID NO: 2171 - DNA, 2 bp, Artificial Sequence
  Description of Artificial Sequence: Synthetic oligonucleotide
cg

SEQ ID NO: 2172 - DNA, 9 bp, Artificial Sequence
  Description of Artificial Sequence: Synthetic oligonucleotide
cgttgtacg

SEQ ID NO: 2173 - DNA, 2 bp, Artificial Sequence
  Description of Artificial Sequence: Synthetic oligonucleotide
cg

SEQ ID NO: 2174 - DNA, 2 bp, Artificial Sequence
  Description of Artificial Sequence: Synthetic oligonucleotide
cg

SEQ ID NO: 2175 - DNA, 396 bp, Artificial Sequence
  Description of Artificial Sequence: Synthetic polynucleotide
cgggcggcggcggttcgttgtatatatttcggcgtatttcgttaggtcgcgtatagcgtttcgagtttaggcgttttttcgtttttttttcgcgttttgcggcggcggcggcggcggtagtagtagtagtaatatggttgttgatgggtgtttggggtggcgttggcggcgggaggagttttttcgagtttttgcgtcggttgttcgttgttagttatggtaaatggtggcggcggcggcggcggtagtagcggcggcggcggcggcggcggaggtagtagttttagaatgagtagtaatatttacgcgaattattttagtttagacgcgttttttttttttttttttttttttttttttttttttttttttttttttttttttttttcgtttttg

SEQ ID NO: 2176 - DNA, 2 bp, Artificial Sequence
  Description of Artificial Sequence: Synthetic oligonucleotide
cg

SEQ ID NO: 2177 - DNA, 70 bp, Artificial Sequence
  Description of Artificial Sequence: Synthetic oligonucleotide
cgtgatttttttatttagagattatttagggagatgttttggatgggataagtagataaatggcggttcg

SEQ ID NO: 2178 - DNA, 2 bp, Artificial Sequence
  Description of Artificial Sequence: Synthetic oligonucleotide
cg

SEQ ID NO: 2179 - DNA, 68 bp, Artificial Sequence
  Description of Artificial Sequence: Synthetic oligonucleotide
cgggagttcggtcgcgttttttagtttcggtattcgcgtttagcgcgtcgcgtttcgcgtttttcgcg

SEQ ID NO: 2180 - DNA, 88 bp, Artificial Sequence
  Description of Artificial Sequence: Synthetic oligonucleotide
cgtttcgcgtatcgttttcgttttagtttttagtggcgcggcgttttttcgcgatattcgcgggtttttaggagcgagtcgattttcg

SEQ ID NO: 2181 - DNA, 2 bp, Artificial Sequence
  Description of Artificial Sequence: Synthetic oligonucleotide
cg

SEQ ID NO: 2182 - DNA, 2 bp, Artificial Sequence
  Description of Artificial Sequence: Synthetic oligonucleotide
cg

SEQ ID NO: 2183 - DNA, 87 bp, Artificial Sequence
  Description of Artificial Sequence: Synthetic oligonucleotide
cgggggttttttaggtcgcggcgtttttcgtttttttttatttttcgattttttttcgtttttaaaatgaggaaacggagtaattcg

SEQ ID NO: 2184 - DNA, 45 bp, Artificial Sequence
  Description of Artificial Sequence: Synthetic oligonucleotide
cgtggtaaattcgggtttcgacgatagaggtagcgtagaagttcg

SEQ ID NO: 2185 - DNA, 2 bp, Artificial Sequence
  Description of Artificial Sequence: Synthetic oligonucleotide
cg

SEQ ID NO: 2186 - DNA, 173 bp, Artificial Sequence
  Description of Artificial Sequence: Synthetic polynucleotide
cgggtcgtggttgatatcgcggagaagttaggatttttatagtttttgttagatttgaaagtaagttggaaatcgatagttgttttagttgttttagattttaatttggtttgggttttttttttttttatttgaaaatagatttagggtaatgtttaagagaattttaatcg

SEQ ID NO: 2187 - DNA, 2 bp, Artificial Sequence
  Description of Artificial Sequence: Synthetic oligonucleotide
cg

SEQ ID NO: 2188 - DNA, 48 bp, Artificial Sequence
  Description of Artificial Sequence: Synthetic oligonucleotide
cggggtttttgtttttggttgtagttggagttttgcgtttcgttttcg

SEQ ID NO: 2189 - DNA, 2 bp, Artificial Sequence
  Description of Artificial Sequence: Synthetic oligonucleotide
cg

SEQ ID NO: 2190 - DNA, 2 bp, Artificial Sequence
  Description of Artificial Sequence: Synthetic oligonucleotide
cg

SEQ ID NO: 2191 - DNA, 36 bp, Artificial Sequence
  Description of Artificial Sequence: Synthetic oligonucleotide
cggggtagagggggcgggaagttggcgttacggtcg

SEQ ID NO: 2192 - DNA, 2 bp, Artificial Sequence
  Description of Artificial Sequence: Synthetic oligonucleotide
cg

SEQ ID NO: 2193 - DNA, 2 bp, Artificial Sequence
  Description of Artificial Sequence: Synthetic oligonucleotide
cg

SEQ ID NO: 2194 - DNA, 2 bp, Artificial Sequence
  Description of Artificial Sequence: Synthetic oligonucleotide
cg

SEQ ID NO: 2195 - DNA, 2 bp, Artificial Sequence
  Description of Artificial Sequence: Synthetic oligonucleotide
cg

SEQ ID NO: 2196 - DNA, 2 bp, Artificial Sequence
  Description of Artificial Sequence: Synthetic oligonucleotide
cg

SEQ ID NO: 2197 - DNA, 97 bp, Artificial Sequence
  Description of Artificial Sequence: Synthetic oligonucleotide
cgattcgggagggaaaatttttgttttttttcggggtttgttttgttcgttttttaaattcgttttatatttttttcgattttcgtttttgtaagcg

SEQ ID NO: 2198 - DNA, 2 bp, Artificial Sequence
  Description of Artificial Sequence: Synthetic oligonucleotide
cg

SEQ ID NO: 2199 - DNA, 2 bp, Artificial Sequence
  Description of Artificial Sequence: Synthetic oligonucleotide
cg

SEQ ID NO: 2200 - DNA, 67 bp, Artificial Sequence
  Description of Artificial Sequence: Synthetic oligonucleotide
cgatgtttgtgtttgtggttttttgaggtagtgggagtggcgtgtgaaggattgtgagagtttggcg

SEQ ID NO: 2201 - DNA, 2 bp, Artificial Sequence
  Description of Artificial Sequence: Synthetic oligonucleotide
cg

SEQ ID NO: 2202 - DNA, 29 bp, Artificial Sequence
  Description of Artificial Sequence: Synthetic oligonucleotide
cgggtgattgttgattttttgttttgtcg

SEQ ID NO: 2203 - DNA, 49 bp, Artificial Sequence
  Description of Artificial Sequence: Synthetic oligonucleotide
cgaggtttcgcgtattttcgttcgcgttttagttatttaggttcggtcg

SEQ ID NO: 2204 - DNA, 188 bp, Artificial Sequence
  Description of Artificial Sequence: Synthetic polynucleotide
cgtttattgaaaatttttagttggtgttggagcggcggcgtgtggttaacgttaaggagcgtgagcgggtgagggatttttagggtcgacgttcgttttttttttttttgttttattattaaatatttggttaatattcgggggttcgtttatcgtttattttcgttcgaggcgatttcgagttttcg

SEQ ID NO: 2205 - DNA, 4 bp, Artificial Sequence
  Description of Artificial Sequence: Synthetic oligonucleotide
cgcg

SEQ ID NO: 2206 - DNA, 4 bp, Artificial Sequence
  Description of Artificial Sequence: Synthetic oligonucleotide
cgcg

SEQ ID NO: 2207 - DNA, 113 bp, Artificial Sequence
  Description of Artificial Sequence: Synthetic polynucleotide
cgcgggtgaaggcggagtcgtagggttggtttttaaagggatgttttcgttcgagcggcgagattagtttcgttcgtttttcgtcgcggtcgcgtcgtagtcgtttacggtcg

SEQ ID NO: 2208 - DNA, 208 bp, Artificial Sequence
  Description of Artificial Sequence: Synthetic polynucleotide
cgcgttcgttatagtagcgcgttaggcggacgtcgcgggaatttgacgttcgaggttcgcggtttttaatgagagttttagaatatttttcgtttttgacggttagcggtagcgtcgtcgtttttcgtagagcgttcgttttttcgtttttagagttttagttttttttcgagcgatttcgtagtttttttttcgtttttattcgtcg

SEQ ID NO: 2209 - DNA, 96 bp, Artificial Sequence
  Description of Artificial Sequence: Synthetic oligonucleotide
cgtattttttcgtattcggcgtcgtcgtttcgtcgttttttttcgtttgtagggtcgtttcgggtattttagggttgttgaggggcgggcgggtcg

SEQ ID NO: 2210 - DNA, 236 bp, Artificial Sequence
  Description of Artificial Sequence: Synthetic polynucleotide
cgcgtggaggttgcgcgtaggggttcgggacgcgggatagggatttcgcgtagtttaggcgtcggggaatcggggttggagtcggggatttgagtttagcggacgtttttttcgtttggaggttcggtacggatcgggatattagggcgttcgtggtcgtggttcggtttttggttgttgcgggtcgcggtttttagtgggtttttaggatttttttttacggcgggtatttatcg

SEQ ID NO: 2211 - DNA, 211 bp, Artificial Sequence
  Description of Artificial Sequence: Synthetic polynucleotide
cgtcgttcgcgttttttgttttttattttttaatttttgcgtggttttagggtttatatttttggagtttttttttttagtaaatagtgttgttttttatttaatagtagaggcgtttaggagtttaggcgatgtgtttaaggtcgaatagagggatagtagtgagttgtttaatttttttagttgcgtagttaggatacggttgggggcg

SEQ ID NO: 2212 - DNA, 193 bp, Artificial Sequence
  Description of Artificial Sequence: Synthetic polynucleotide
cgcgggggattttaggtcgggacggagttttttttggttcgttgtgcgcgtacgtttggaaaggcgggatttaaggtagcgatgttgcgggaggttttgtagtgttaacgagttttcgaacggtttcgttttattttttttttgtgtgtttcgtaagtttttgtttagtaaatcgttatagtttcggcgcgcg

SEQ ID NO: 2213 - DNA, 4 bp, Artificial Sequence
  Description of Artificial Sequence: Synthetic oligonucleotide
cgcg

SEQ ID NO: 2214 - DNA, 199 bp, Artificial Sequence
  Description of Artificial Sequence: Synthetic polynucleotide
cgtaataaattttcgtagatatcgtatttttaatgcggtgtttttttgtgttagtgtttcggcggtttttgtagggtgttaatgttacggttgtatatcgttttttttttttattatttttatttgaatagatttggaggaggcggaaatggaaattagggtatgtttataagttggattcgttagatttttttgttcg

SEQ ID NO: 2215 - DNA, 87 bp, Artificial Sequence
  Description of Artificial Sequence: Synthetic oligonucleotide
cgcggtcgttacgtttcgttttttgtatttagtttttttggcgttttcgttgtagtatttaagattaggcgtcgtttttgttagtcg

SEQ ID NO: 2216 - DNA, 68 bp, Artificial Sequence
  Description of Artificial Sequence: Synthetic oligonucleotide
cgtaaattgattatgaaatatacgatgttaattcggagttgtattttttagttgggtattttcgcgcg

SEQ ID NO: 2217 - DNA, 61 bp, Artificial Sequence
  Description of Artificial Sequence: Synthetic oligonucleotide
cggtgaaaattagtttgtggtgtattgagatttgtaaattattttttgaatgttaggggcg

SEQ ID NO: 2218 - DNA, 40 bp, Artificial Sequence
  Description of Artificial Sequence: Synthetic oligonucleotide
cggatcggcggtagtagaagcggtagcggtaaagtattcg

SEQ ID NO: 2219 - DNA, 647 bp, Artificial Sequence
  Description of Artificial Sequence: Synthetic polynucleotide
cggttgttgttattgttttgtcgttgtcgagtcggttatttgggtattcgcggagtcgcgtcgttgttatcgtttcggcggtttttcggagtgcgcggagggggcggcggaggagcgagatatttatagtaatcgaggatgcgaggggcgtttagtagtagcgagtgtttgggagttaggaggaggttttcgcgcgtcggtaatttttagtgttaggcgttttgtagttttcgcgcgtcgcgtttgggttcgtatcgttttcgtagtgagggttcgttcgagcggtaagtttttttcggcggttaagtcgatatttttttttcgtttcgtcgtttatttcgggtagtagtcgcggaataatggagagcgtagttagtagttttggagacggcgttcgggggaggacgcgtcgtcgtcgtcgtcgttgtcgttagggtaggcgcgcgtcgcgtggagtcgggcgggtgcgagggcgcgcggcggggggtggggggtacgcgtcgcgcggggggcgggggtagtggggggcgcgcgcgcgggttcggggagttcgcggggagagttcggcgttcggcgtagcgcggcgcggttaagtttcgcgtttttttcgttttttttcggcgcgttcgttttcgtttcgtcgttcg

SEQ ID NO: 2220 - DNA, 327 bp, Artificial Sequence
  Description of Artificial Sequence: Synthetic polynucleotide
cgaggcgcgggttgagtttttagtatttggtttgagcggcgtgggtagtagtttgtatcgcggatatttttaattttgtcgcgtttgcgtcgtattttggtcgtggtagcgatttttcgggtatttttgaggtcgtttttagttttataagtatttagtcgtttattttagagtagcggcgtcgatcgttttaagaggagttagttttcgatatcgttttttatttatttttttatatttttatcgttggagggggtgagtgtcgtggataggcgttttcgttcggggatagtttagcggcggtagttagttcgattttttttcgcg

SEQ ID NO: 2221 - DNA, 2 bp, Artificial Sequence
  Description of Artificial Sequence: Synthetic oligonucleotide
cg

SEQ ID NO: 2222 - DNA, 324 bp, Artificial Sequence
  Description of Artificial Sequence: Synthetic polynucleotide
cgtaagggtaattattggacgttggattcggtttgcgaagatatgttcgagaagggtaattatcggcgtcgtcgtcgtatgaagaggttttttcggtcgtcgttcgcgtatttttagttcggtaaggggtttttcggggtcggaggcgtcgtaggcgggtgcggcgtggcgggcgtcggggtcgacggttacggttatttggcgttttttaagtatttgtagtttggtttttttaataattcgtggtcgttatcgtagttttttttatttatgttttatgttttttgttagatggcggtagtcgtagcggttgtagtagttgcg

SEQ ID NO: 2223 - DNA, 77 bp, Artificial Sequence
  Description of Artificial Sequence: Synthetic oligonucleotide
cgtttcgtcgtgttcgatgggtgcgtttttagcgttgtcgtcgcggcgttcggtttcgggttttcgtcgttgcgtcg

SEQ ID NO: 2224 - DNA, 158 bp, Artificial Sequence
  Description of Artificial Sequence: Synthetic polynucleotide
cgtttttatttcggtatagatagtttttaaagttgttcgtattttttagatttcgttttttgtttagttttcggatttcgtttaggggttgagttgacgttcgcgggtggatttttttggttcgttgcgtagggaattgatttcgggaatttagggcg

SEQ ID NO: 2225 - DNA, 79 bp, Artificial Sequence
  Description of Artificial Sequence: Synthetic oligonucleotide
cgcgcgtttcgcgtttttggcggtcgtagcgttgtttattaattgatttttttattgatttatttaatttttaggagcg

SEQ ID NO: 2226 - DNA, 137 bp, Artificial Sequence
  Description of Artificial Sequence: Synthetic polynucleotide
cgttttggagcggtgggaggacgcggagcgtcgttttttggttttcgatattttgttcgttttttttagtgggtttgtggttgcgttttttcgaaggaagtaataaatttttttgattttgggggttagaggagacg

SEQ ID NO: 2227 - DNA, 112 bp, Artificial Sequence
  Description of Artificial Sequence: Synthetic polynucleotide
cgttgcggtatttagcggtttatcggggttgtattgttgtagcggttttttgtgttatttgtagtttaggaggttgagtatagtgagtattagtagtagtgtatagttcgcg

SEQ ID NO: 2228 - DNA, 2 bp, Artificial Sequence
  Description of Artificial Sequence: Synthetic oligonucleotide
cg

SEQ ID NO: 2229 - DNA, 2 bp, Artificial Sequence
  Description of Artificial Sequence: Synthetic oligonucleotide
cg

SEQ ID NO: 2230 - DNA, 282 bp, Artificial Sequence
  Description of Artificial Sequence: Synthetic polynucleotide
cggttttttagttttagttgtgcgttttcgttcgggcgaggtggggttgatcgcggtcgtttgtatacgttttttttggttcgcgttttcggtttgggagggcggattcgtttattttacgatggtttcggttttggaagggattgttttcgtgattcgtttttttaatagtcgttaataattttttttaacgttttttgcgcggttcgtttttgagaattttggttcgggagagcgacgcggggttttcggggttgcgtaggttgcggcgttttgtttacg

SEQ ID NO: 2231 - DNA, 81 bp, Artificial Sequence
  Description of Artificial Sequence: Synthetic oligonucleotide
cggcgcggcggcggggggcgtttcgtaagttcgcggttttgagcggttattcgcgtagtaagttgggcgagttggtagtcg

SEQ ID NO: 2232 - DNA, 53 bp, Artificial Sequence
  Description of Artificial Sequence: Synthetic oligonucleotide
cgcggtttttgttttttgcgttagcgtgagttcggttagggtttttacggtcg

SEQ ID NO: 2233 - DNA, 40 bp, Artificial Sequence
  Description of Artificial Sequence: Synthetic oligonucleotide
cggcgttagtttacgttttcgttggcgttttttcggcgcg

SEQ ID NO: 2234 - DNA, 206 bp, Artificial Sequence
  Description of Artificial Sequence: Synthetic polynucleotide
cggtcgatttatttggtgtcgcgtgcgttggcggttcgcgcggtagttaagttaaaggtcgaggtcgaggtcgagcgcggcgtttagtagtacggcgggggttagtagggcgggcgtcggtcgtagcgcgtttcgttttagtagtagtcgcgcgtcgtttttgtaggtcgtttcgtcgcgggttattcggggcgtttaggttgtcg

SEQ ID NO: 2235 - DNA, 38 bp, Artificial Sequence
  Description of Artificial Sequence: Synthetic oligonucleotide
cgttgttgttgcgcggggcggcggtcgtcgtgttttcg

SEQ ID NO: 2236 - DNA, 5 bp, Artificial Sequence
  Description of Artificial Sequence: Synthetic oligonucleotide
cgtcg

SEQ ID NO: 2237 - DNA, 25 bp, Artificial Sequence
  Description of Artificial Sequence: Synthetic oligonucleotide
cgtgtgtacgcgttgtattcgttcg

SEQ ID NO: 2238 - DNA, 79 bp, Artificial Sequence
  Description of Artificial Sequence: Synthetic oligonucleotide
cgttttttttttttttttttttttattaaatattatttgggaattgtttaaattttttttttaaaaaaagagagaggcg

SEQ ID NO: 2239 - DNA, 33 bp, Artificial Sequence
  Description of Artificial Sequence: Synthetic oligonucleotide
cggtttcgcgtggcgtttcggtcgttgttttcg

SEQ ID NO: 2240 - DNA, 132 bp, Artificial Sequence
  Description of Artificial Sequence: Synthetic polynucleotide
cggcgggcggcggcggcgcggagttgtatacggagaagacggagtgcgggcgttacggagagtattcgtttaagtaggacgttcgcggggaggtggttatggttagttcggtttacgatcgtttggtttgcg

SEQ ID NO: 2241 - DNA, 32 bp, Artificial Sequence
  Description of Artificial Sequence: Synthetic oligonucleotide
cgtttggtatttttttttttgtttcgagggcg

SEQ ID NO: 2242 - DNA, 2 bp, Artificial Sequence
  Description of Artificial Sequence: Synthetic oligonucleotide
cg

SEQ ID NO: 2243 - DNA, 2 bp, Artificial Sequence
  Description of Artificial Sequence: Synthetic oligonucleotide
cg

SEQ ID NO: 2244 - DNA, 20 bp, Artificial Sequence
  Description of Artificial Sequence: Synthetic oligonucleotide
cgagtatgttagcggcgtcg

SEQ ID NO: 2245 - DNA, 85 bp, Artificial Sequence
  Description of Artificial Sequence: Synthetic oligonucleotide
cggtacgttttttttttcggtcgtttttttttatataagcgtaggtagagggcgcgttagttatgttttgtttttgcgttcgtcg

SEQ ID NO: 2246 - DNA, 230 bp, Artificial Sequence
  Description of Artificial Sequence: Synthetic polynucleotide
cggtttcgcgaaattcggttttttagttcgcgggacgcgttgtttgttaggcgggttcggcggtatttcgggggcgggaggggtcggtcgtagggtttttagtttggcgttcgcggggcgttcgtagcgaaggggtgggtgtcgttcgtgaacgtagtagggattagtttagttcgcgttcgtttttgggtttcggttatcgttttttcgttattttttcggtttttgcg

SEQ ID NO: 2247 - DNA, 84 bp, Artificial Sequence
  Description of Artificial Sequence: Synthetic oligonucleotide
cgggtcgttagttttagggtgtcgggttttaattaaggtttcgaagtttttacgtatttgagggtattttgattagtttttgcg

SEQ ID NO: 2248 - DNA, 42 bp, Artificial Sequence
  Description of Artificial Sequence: Synthetic oligonucleotide
cgcgatttttttttgatttagttaaacggaaaagttcgcgcg

SEQ ID NO: 2249 - DNA, 45 bp, Artificial Sequence
  Description of Artificial Sequence: Synthetic oligonucleotide
cgtcgtgttttttttcgttttcgaaagggtagaaagagtcgttcg

SEQ ID NO: 2250 - DNA, 26 bp, Artificial Sequence
  Description of Artificial Sequence: Synthetic oligonucleotide
cgttcgttagtattttttgtttcgcg

SEQ ID NO: 2251 - DNA, 50 bp, Artificial Sequence
  Description of Artificial Sequence: Synthetic oligonucleotide
cgaggtttaggtggaggttgaggttgtcgcgcgtcgcgggaggagtttcg

SEQ ID NO: 2252 - DNA, 56 bp, Artificial Sequence
  Description of Artificial Sequence: Synthetic oligonucleotide
cgtttttgagttagggacgcgcgtggggggtgggcgtgtacgcgggtgggttagcg

SEQ ID NO: 2253 - DNA, 44 bp, Artificial Sequence
  Description of Artificial Sequence: Synthetic oligonucleotide
cgtttttatcgcgtacgcgtttttttcgcgcgcgtatacgttcg

SEQ ID NO: 2254 - DNA, 2 bp, Artificial Sequence
  Description of Artificial Sequence: Synthetic oligonucleotide
cg

SEQ ID NO: 2255 - DNA, 9 bp, Artificial Sequence
  Description of Artificial Sequence: Synthetic oligonucleotide
cgtttttcg

SEQ ID NO: 2256 - DNA, 58 bp, Artificial Sequence
  Description of Artificial Sequence: Synthetic oligonucleotide
cgcggggtagttgtttaagtggatcgatattatcgtttgtttggcgggtaggcgggcg

SEQ ID NO: 2257 - DNA, 151 bp, Artificial Sequence
  Description of Artificial Sequence: Synthetic polynucleotide
cggtagaagatagcgtttttaggattagcgattttgtggtttattcggttattgggtttcggcgtaaattttttttaggtagtgcgggcgatgttgattgtagacgtcgggtagggttttcgtgcgggcgggagcgggggaagttagtgcg

SEQ ID NO: 2258 - DNA, 17 bp, Artificial Sequence
  Description of Artificial Sequence: Synthetic oligonucleotide
cggattttttaggatcg

SEQ ID NO: 2259 - DNA, 70 bp, Artificial Sequence
  Description of Artificial Sequence: Synthetic oligonucleotide
cgttcgttgtttttcgttgcgtttagggatggagggttttattatttatggaattgttggtttttttgcg

SEQ ID NO: 2260 - DNA, 59 bp, Artificial Sequence
  Description of Artificial Sequence: Synthetic oligonucleotide
cgtttttgagatttcgttgagaaatttttagcgggttagcgtttgggcgttgggcgtcg

SEQ ID NO: 2261 - DNA, 25 bp, Artificial Sequence
  Description of Artificial Sequence: Synthetic oligonucleotide
cgttgggtaatttttattcgagtcg

SEQ ID NO: 2262 - DNA, 57 bp, Artificial Sequence
  Description of Artificial Sequence: Synthetic oligonucleotide
cggcgttgacgttttggttttgggggttgtttggttggtgttaggtagcggaagacg

SEQ ID NO: 2263 - DNA, 111 bp, Artificial Sequence
  Description of Artificial Sequence: Synthetic polynucleotide
cgagtagttttacgttttgttaaggacggtaggtgtaagggtcgggggattttttgacggggtcgttttttcgggtacggggaggtttttatcgagttttaattttgaacg

SEQ ID NO: 2264 - DNA, 211 bp, Artificial Sequence
  Description of Artificial Sequence: Synthetic polynucleotide
cgggtcgttgtttttgttgtattatgtaaaggtggttgggaaagcgcgttgatttatatttatatagtttattttttttttatagtatgtgattaatacgtatttcggggaggagggagcgcggttgggggtgttaatcggaagggaatagatagtgagtgttattttgttgggaggttttagaagtaaagcgttaacgacgatagtagcg

SEQ ID NO: 2265 - DNA, 75 bp, Artificial Sequence
  Description of Artificial Sequence: Synthetic oligonucleotide
cgtttttacgcgcgttgtcggtatttgttcgttttgttgtaatttgttgtagtgtttgaaagagtagtaggagcg

SEQ ID NO: 2266 - DNA, 2 bp, Artificial Sequence
  Description of Artificial Sequence: Synthetic oligonucleotide
cg

SEQ ID NO: 2267 - DNA, 66 bp, Artificial Sequence
  Description of Artificial Sequence: Synthetic oligonucleotide
cgggcgttggagaaggcgtttggcgcgaagttgggcggcgtttcgagggcggaggataggtggtcg

SEQ ID NO: 2268 - DNA, 2 bp, Artificial Sequence
  Description of Artificial Sequence: Synthetic oligonucleotide
cg

SEQ ID NO: 2269 - DNA, 163 bp, Artificial Sequence
  Description of Artificial Sequence: Synthetic polynucleotide
cggggcggcgggcgtatgcgcgtgcgcggtgcggttttagttttggttgtcgtcgtttgtcgtcgtcgtcgcgatgtttattttagttaaagcggttgcgggtttggggattcggttcgggtagcggagttttcggattcgtcgattcgtcgaggagcgcgcg

SEQ ID NO: 2270 - DNA, 99 bp, Artificial Sequence
  Description of Artificial Sequence: Synthetic oligonucleotide
cggagtaaagttagcgcgtttcgcggttcggaatttagttggttcgttatttttttatttttgcgattttattttcgatcgcgttttagggtagaagcg

SEQ ID NO: 2271 - DNA, 96 bp, Artificial Sequence
  Description of Artificial Sequence: Synthetic oligonucleotide
cggcggcggcggtagttttagtcgcgttcgttatatatatttttattcgttcggtgtatacgtcgcgtcgcgggtagtgtcgtttgcggaggcgcg

SEQ ID NO: 2272 - DNA, 4 bp, Artificial Sequence
  Description of Artificial Sequence: Synthetic oligonucleotide
cgcg

SEQ ID NO: 2273 - DNA, 16 bp, Artificial Sequence
  Description of Artificial Sequence: Synthetic oligonucleotide
cgtgttaatttcgtcg

SEQ ID NO: 2274 - DNA, 2 bp, Artificial Sequence
  Description of Artificial Sequence: Synthetic oligonucleotide
cg

SEQ ID NO: 2275 - DNA, 141 bp, Artificial Sequence
  Description of Artificial Sequence: Synthetic polynucleotide
cgtttattttgtagtcgagtatataaggttcgtcgaagttatcgagtaggttttgtagttgtaggtagttttcgtcgtcgcgttttattacgtcgtggaaggtaggtacgtagtcgcgtagcgcgttagttattagtcgcg

SEQ ID NO: 2276 - DNA, 2 bp, Artificial Sequence
  Description of Artificial Sequence: Synthetic oligonucleotide
cg

SEQ ID NO: 2277 - DNA, 37 bp, Artificial Sequence; identical to SEQ ID NO: 565
  Description of Artificial Sequence: Synthetic oligonucleotide

SEQ ID NO: 2278 - DNA, 52 bp, Artificial Sequence
  Description of Artificial Sequence: Synthetic oligonucleotide
cgaggcgttttcgttttcgttatttatatagggcgttaagtgtttcgattcg

SEQ ID NO: 2279 - DNA, 2 bp, Artificial Sequence
  Description of Artificial Sequence: Synthetic oligonucleotide
cg

SEQ ID NO: 2280 - DNA, 7 bp, Artificial Sequence
  Description of Artificial Sequence: Synthetic oligonucleotide
cgtttcg

SEQ ID NO: 2281 - DNA, 2 bp, Artificial Sequence
  Description of Artificial Sequence: Synthetic oligonucleotide
cg

SEQ ID NO: 2282 - DNA, 4 bp, Artificial Sequence
  Description of Artificial Sequence: Synthetic oligonucleotide
cgcg

SEQ ID NO: 2283 - DNA, 17 bp, Artificial Sequence
  Description of Artificial Sequence: Synthetic oligonucleotide
cgtttcgttttaattcg

SEQ ID NO: 2284 - DNA, 136 bp, Artificial Sequence
  Description of Artificial Sequence: Synthetic polynucleotide
cgcggggggaggtttttggttcgtcgttttcgttgtcgtttgatcgtatttttggagggtttcgtattttgttaggtttttggaggtaaatatatattttcgatttataattggttttcgcgttaggggattcgcg

SEQ ID NO: 2285 - DNA, 31 bp, Artificial Sequence
  Description of Artificial Sequence: Synthetic oligonucleotide
cggttagggagtgagcggggcgttgggcgcg

SEQ ID NO: 2286 - DNA, 25 bp, Artificial Sequence
  Description of Artificial Sequence: Synthetic oligonucleotide
cgttaattagattttagggtgtacg

SEQ ID NO: 2287 - DNA, 12 bp, Artificial Sequence
  Description of Artificial Sequence: Synthetic oligonucleotide
cgttcgttaacg

SEQ ID NO: 2288 - DNA, 6 bp, Artificial Sequence
  Description of Artificial Sequence: Synthetic oligonucleotide
cgtacg

SEQ ID NO: 2289 - DNA, 199 bp, Artificial Sequence
  Description of Artificial Sequence: Synthetic polynucleotide
cgtagcgtgtagtcgcggaatagcgtttttagttttgggtaagcgaatttttcgtcgtacgttcggagttcgcgtcggcggtttgtttcggtcgttcgttcggcgttttcgggttcgttcgcgtcgttttcgtcgtcgttttcgtcgcgcggcgttttcgttattttagcgttatgtagcggtcgcggtcgcgggcgcg

SEQ ID NO: 2290 - DNA, 91 bp, Artificial Sequence
  Description of Artificial Sequence: Synthetic oligonucleotide
cgtgggggcgcggcgcgggcgatacgtgcgggtcgttaggagggggagggggacgcgcgtcgtcgggttcgttattttgtattcggggtcg

SEQ ID NO: 2291 - DNA, 108 bp, Artificial Sequence
  Description of Artificial Sequence: Synthetic polynucleotide
cgttttttttatggattttttagtatttgtaggttataggataatagaagttatagtagagttatcgaggaattttaggaacggaggagatggaatagtggagacgcg

SEQ ID NO: 2292 - DNA, 13 bp, Artificial Sequence
  Description of Artificial Sequence: Synthetic oligonucleotide
cgaaatcggtgcg

SEQ ID NO: 2293 - DNA, 176 bp, Artificial Sequence
  Description of Artificial Sequence: Synthetic polynucleotide
cgggggcggcggggtgatagttttcgtgtatgaattagttattttttaggtttcgtttcggcgggggtcggtcggacgttcgtttcgtataaagcgggtattcgggtcgtttggagtagaaagtcgcgtattttttttcgttaggcgttttttcggacgttttgtttagcgggtcg

SEQ ID NO: 2294 - DNA, 2 bp, Artificial Sequence
  Description of Artificial Sequence: Synthetic oligonucleotide
cg

SEQ ID NO: 2295 - DNA, 157 bp, Artificial Sequence
  Description of Artificial Sequence: Synthetic polynucleotide
cgggcgtttttttaggtttggtcgaggggcgtcgcgtagaggcggcggcggcgtacggaggcggtagacgacgcgttttcggcgttcgtagtttcggtttcgcgttttcgcggtttaaagtaattttgggagtcgtcgtttttcgcggaatttttcg

SEQ ID NO: 2296 - DNA, 66 bp, Artificial Sequence
  Description of Artificial Sequence: Synthetic oligonucleotide
cggtcgcggcgggagggatagggggtttgggtgggaagggagcgcgagggtttttagcggttcgcg

SEQ ID NO: 2297 - DNA, 498 bp, Artificial Sequence
  Description of Artificial Sequence: Synthetic polynucleotide
cgtgcgttaggcggaaatgttttagtaggttttcgcgtatcgggtcgttcggggggtagtaggggtaggcggcggcgggtaggtcgagcgcgtcgggcggtggcgtagcggggtacgagtattttttgtgcgttaggtaggtttcgaggttgtggaagtttacgcggtaggtcgtgtattcgtggtagtcggttagcgtcggtgtcggggtttcggggagcgggcgtcgcggttttttgtttaggtcgatggggtcgtcggtcgcggggtcgggcgagcgcgtaggggcgaggtcggggtcgttttcgttttcgttttcgggtcgcggcgattcgggcgcgggggcgtggtcgggcggcggggggggcggggcgtcggtcgcgtgtagttcgtagagtttgcggcgtttgcgcgtgcgtataggcgcggcgggagagggggtcgggggcgcggtcggtttagggggtttcgggggcgcggtcggtcggcgcggcggcg

SEQ ID NO: 2298 - DNA, 27 bp, Artificial Sequence
  Description of Artificial Sequence: Synthetic oligonucleotide
cgagcgcgaagggcgttcggattcgcg

SEQ ID NO: 2299 - DNA, 2 bp, Artificial Sequence
  Description of Artificial Sequence: Synthetic oligonucleotide
cg

SEQ ID NO: 2300 - DNA, 2 bp, Artificial Sequence
  Description of Artificial Sequence: Synthetic oligonucleotide
cg

SEQ ID NO: 2301 - DNA, 16 bp, Artificial Sequence
  Description of Artificial Sequence: Synthetic oligonucleotide
cgcgaggtaggcgacg

SEQ ID NO: 2302 - DNA, 53 bp, Artificial Sequence
  Description of Artificial Sequence: Synthetic oligonucleotide
cgtcgtaagagaagttgttaagtttcgtaggttttgattcggcgtttttcgcg

SEQ ID NO: 2303 - DNA, 4 bp, Artificial Sequence
  Description of Artificial Sequence: Synthetic oligonucleotide
cgcg

SEQ ID NO: 2304 - DNA, 2 bp, Artificial Sequence
  Description of Artificial Sequence: Synthetic oligonucleotide
cg

SEQ ID NO: 2305 - DNA, 2 bp, Artificial Sequence
  Description of Artificial Sequence: Synthetic oligonucleotide
cg

SEQ ID NO: 2306 - DNA, 2 bp, Artificial Sequence
  Description of Artificial Sequence: Synthetic oligonucleotide
cg

SEQ ID NO: 2307 - DNA, 14 bp, Artificial Sequence
  Description of Artificial Sequence: Synthetic oligonucleotide
cgtaggtggatacg

SEQ ID NO: 2308 - DNA, 186 bp, Artificial Sequence
  Description of Artificial Sequence: Synthetic polynucleotide
cgttatggagaaaattaatggaggaaaaattatagagttattcgaaatagttgcgttgtttattattcggtgtttgagtttgttttttttgtaattagattatatgtgaggtagttttagttaattgtttgtgttatttatcggggaattttagttttatttgtgaatatttaggttttttcgtcg

SEQ ID NO: 2309 - DNA, 79 bp, Artificial Sequence
  Description of Artificial Sequence: Synthetic oligonucleotide
cgcgtattttttttatttcgatatttattgttatttttatagcggagcgaggggtttcgtcgagggcgagcgtatttcg

SEQ ID NO: 2310 - DNA, 49 bp, Artificial Sequence
  Description of Artificial Sequence: Synthetic oligonucleotide
cgcgggggcgtttttcgttgtttgtagggagcgcggcgcggacgcggcg

SEQ ID NO: 2311 - DNA, 17 bp, Artificial Sequence
  Description of Artificial Sequence: Synthetic oligonucleotide
cgcgaacggtttattcg

SEQ ID NO: 2312 - DNA, 2 bp, Artificial Sequence
  Description of Artificial Sequence: Synthetic oligonucleotide
cg

SEQ ID NO: 2313 - DNA, 9 bp, Artificial Sequence
  Description of Artificial Sequence: Synthetic oligonucleotide
cgtggttcg

SEQ ID NO: 2314 - DNA, 2 bp, Artificial Sequence
  Description of Artificial Sequence: Synthetic oligonucleotide
cg

SEQ ID NO: 2315 - DNA, 165 bp, Artificial Sequence
  Description of Artificial Sequence: Synthetic polynucleotide
cggggtttggtaggaagtgtagtgtattttttagttttagggtaattaggatagtatgaattttttattttgtggtagaataaacggttagcgtttcgatgtggcgcgttcgatttttttttatagagtttaaaagttacgtttaattaaattgtagcgttttcg

SEQ ID NO: 2316 - DNA, 14 bp, Artificial Sequence
  Description of Artificial Sequence: Synthetic oligonucleotide
cgttgattcgcgcg

SEQ ID NO: 2317 - DNA, 2 bp, Artificial Sequence
  Description of Artificial Sequence: Synthetic oligonucleotide
cg

SEQ ID NO: 2318 - DNA, 2 bp, Artificial Sequence
  Description of Artificial Sequence: Synthetic oligonucleotide
cg

SEQ ID NO: 2319 - DNA, 97 bp, Artificial Sequence
  Description of Artificial Sequence: Synthetic oligonucleotide
cgtttcgtacgttcgtacgtttagcggggttcgtattgagtatgggcgcggcggtcgtgcgttggtatttgtgcgtgttgttggttttgggtatacg

SEQ ID NO: 2320 - DNA, 2 bp, Artificial Sequence
  Description of Artificial Sequence: Synthetic oligonucleotide
cg

SEQ ID NO: 2321 - DNA, 98 bp, Artificial Sequence
  Description of Artificial Sequence: Synthetic oligonucleotide
cgaggtttagtttttggttttaaggaataaattcgttggtttgaaagggagttacggtagaagtttaggggtagagcggcgggagcgcgcgattcgcg

SEQ ID NO: 2322 - DNA, 69 bp, Artificial Sequence
  Description of Artificial Sequence: Synthetic oligonucleotide
cgcggaaggttcgcgcgttttgcgtcgtcgtcgtttagtgtcgtcgttagtatttttttcgttttttcg

SEQ ID NO: 2323 - DNA, 2 bp, Artificial Sequence
  Description of Artificial Sequence: Synthetic oligonucleotide
cg

SEQ ID NO: 2324 - DNA, 2 bp, Artificial Sequence
  Description of Artificial Sequence: Synthetic oligonucleotide
cg

SEQ ID NO: 2325 - DNA, 2 bp, Artificial Sequence
  Description of Artificial Sequence: Synthetic oligonucleotide
cg

SEQ ID NO: 2326 - DNA, 2 bp, Artificial Sequence
  Description of Artificial Sequence: Synthetic oligonucleotide
cg

SEQ ID NO: 2327 - DNA, 103 bp, Artificial Sequence
  Description of Artificial Sequence: Synthetic polynucleotide
cgcgttcgtcgttttcggaggagcgggttggtcgatcgttatcgcgtcgtttttcggtcgttttcgaagtcgttttatcgcggtttttgtcgttttggggtcg

SEQ ID NO: 2328 - DNA, 2 bp, Artificial Sequence
  Description of Artificial Sequence: Synthetic oligonucleotide
cg

SEQ ID NO: 2329 - DNA, 21 bp, Artificial Sequence
  Description of Artificial Sequence: Synthetic oligonucleotide
cgtcgtcgtcgttgagagtcg

SEQ ID NO: 2330 - DNA, 148 bp, Artificial Sequence
  Description of Artificial Sequence: Synthetic polynucleotide
cgcgcgggcgcgaggggttgggacgcgggagttttttgagtgcggagcgcggagttttggtgtttcggcgtattgtagttatattttcgggtcgcgcgttttcgtcgttttttattcgcgtcgtagggtttttttttttgaggcgtcg

SEQ ID NO: 2331 - DNA, 2 bp, Artificial Sequence
  Description of Artificial Sequence: Synthetic oligonucleotide
cg

SEQ ID NO: 2332 - DNA, 2 bp, Artificial Sequence
  Description of Artificial Sequence: Synthetic oligonucleotide
cg

SEQ ID NO: 2333 - DNA, 26 bp, Artificial Sequence
  Description of Artificial Sequence: Synthetic oligonucleotide
cggttattacgcgttgtttttcggcg

SEQ ID NO: 2334 - DNA, 119 bp, Artificial Sequence
  Description of Artificial Sequence: Synthetic polynucleotide
cgttcgatgatgaggatgtatttttcgtaggtgtagtttttgaagcggtagtaacgtttgtggtttttgagttaggataggacgttatggttgcggtagcgcgcgtatttgggcgtgcg

SEQ ID NO: 2335 - DNA, 66 bp, Artificial Sequence
  Description of Artificial Sequence: Synthetic oligonucleotide
cgttttattttgttgaggtcgttttcggttttttttgatttaggttgggcgggaaaggtcgggtcg

SEQ ID NO: 2336 - DNA, 60 bp, Artificial Sequence
  Description of Artificial Sequence: Synthetic oligonucleotide
cgcggttggggtttcgcgttttttggagcgttttttgtttagatacgacgatttcgttcg

SEQ ID NO: 2337 - DNA, 2 bp, Artificial Sequence
  Description of Artificial Sequence: Synthetic oligonucleotide
cg

SEQ ID NO: 2338 - DNA, 124 bp, Artificial Sequence
  Description of Artificial Sequence: Synthetic polynucleotide
cggcggtaggagaagtttaaggttcgagcggttcgtagtttttacgtttgtatttttttattttcgttagttcgatggttcgtttcgcggcgtgtattggagtaagtaggtttcgtttcgagcg

SEQ ID NO: 2339 - DNA, 2 bp, Artificial Sequence
  Description of Artificial Sequence: Synthetic oligonucleotide
cg

SEQ ID NO: 2340 - DNA, 156 bp, Artificial Sequence
  Description of Artificial Sequence: Synthetic polynucleotide
cgtttcggtttttatcgtcgcgtttttataggttattaggtgtcgttcgtttagaatgttaattatggcgtagatacgtagttatttgagattcgaggatatttgtaggaggatgattatttgcggggaggcggcggcgagcgtcgcggtgtttcg

SEQ ID NO: 2341 - DNA, 2 bp, Artificial Sequence
  Description of Artificial Sequence: Synthetic oligonucleotide
cg

SEQ ID NO: 2342 - DNA, 91 bp, Artificial Sequence
  Description of Artificial Sequence: Synthetic oligonucleotide
cgttttaggaatgattcggtgatatcggtcgatgattttttttatagtttgtcggtgagcggcggcggaggtaaggtttcggcggcgcgcg

SEQ ID NO: 2343 - DNA, 2 bp, Artificial Sequence
  Description of Artificial Sequence: Synthetic oligonucleotide
cg

SEQ ID NO: 2344 - DNA, 2 bp, Artificial Sequence
  Description of Artificial Sequence: Synthetic oligonucleotide
cg

SEQ ID NO: 2345 - DNA, 89 bp, Artificial Sequence
  Description of Artificial Sequence: Synthetic oligonucleotide
cgtcgagttgtaggcgcgcgtttaatcgttttgttgggtttacgcggtttgagaggtcggagcgtttaattgttggtacgcgagtaacg

SEQ ID NO: 2346 - DNA, 13 bp, Artificial Sequence
  Description of Artificial Sequence: Synthetic oligonucleotide
cggattaaagacg

SEQ ID NO: 2347 - DNA, 2 bp, Artificial Sequence
  Description of Artificial Sequence: Synthetic oligonucleotide
cg

SEQ ID NO: 2348 - DNA, 47 bp, Artificial Sequence
  Description of Artificial Sequence: Synthetic oligonucleotide
cgcgatgtggtttcgtttggttttttgttgttggggtttggcgttcg

SEQ ID NO: 2349 - DNA, 2 bp, Artificial Sequence
  Description of Artificial Sequence: Synthetic oligonucleotide
cg

SEQ ID NO: 2350 - DNA, 2 bp, Artificial Sequence
  Description of Artificial Sequence: Synthetic oligonucleotide
cg

SEQ ID NO: 2351 - DNA, 159 bp, Artificial Sequence
  Description of Artificial Sequence: Synthetic polynucleotide
cgtttttcgtcgaggcgtaggggtagttatattgcggggcgtttgggcgacggcgttaaagttagggttataagggtacgggataagcggggcggggggagtaggagattaggatagaggtcggcgttcgtcgcgggcgtttttacgtcgcgggtatcg

SEQ ID NO: 2352 - DNA, 2 bp, Artificial Sequence
  Description of Artificial Sequence: Synthetic oligonucleotide
cg

SEQ ID NO: 2353 - DNA, 2 bp, Artificial Sequence
  Description of Artificial Sequence: Synthetic oligonucleotide
cg

SEQ ID NO: 2354 - DNA, 2 bp, Artificial Sequence
  Description of Artificial Sequence: Synthetic oligonucleotide
cg

SEQ ID NO: 2355 - DNA, 78 bp, Artificial Sequence
  Description of Artificial Sequence: Synthetic oligonucleotide
cggtcgttttttcgacgttcgcggttttttattgcgtcgaggcgagcgttacggttaaagtttaagtttcggcgttcg

SEQ ID NO: 2356 - DNA, 2 bp, Artificial Sequence
  Description of Artificial Sequence: Synthetic oligonucleotide
cg

SEQ ID NO: 2357 - DNA, 48 bp, Artificial Sequence
  Description of Artificial Sequence: Synthetic oligonucleotide
cgcgttaattcggtcgttgtgtacggtcgggtgcgaaattttttcgcg

SEQ ID NO: 2358 - DNA, 2 bp, Artificial Sequence
  Description of Artificial Sequence: Synthetic oligonucleotide
cg

SEQ ID NO: 2359 - DNA, 2 bp, Artificial Sequence
  Description of Artificial Sequence: Synthetic oligonucleotide
cg

SEQ ID NO: 2360 - DNA, 2 bp, Artificial Sequence
  Description of Artificial Sequence: Synthetic oligonucleotide
cg

SEQ ID NO: 2361 - DNA, 157 bp, Artificial Sequence
  Description of Artificial Sequence: Synthetic polynucleotide
cgtgtttaattggtatttgttattaatatgtttgtttttatttaaatggtttagagtaaggttttgattaaattagtatttttacgttaatatttagtagcgtttttggtttttggtagattttttttttagttgttaaagtaaaattatagaagcg

SEQ ID NO: 2362 - DNA, 2 bp, Artificial Sequence
  Description of Artificial Sequence: Synthetic oligonucleotide
cg

SEQ ID NO: 2363 - DNA, 82 bp, Artificial Sequence
  Description of Artificial Sequence: Synthetic oligonucleotide
cgtattcgcggggagggcggcgagcggggattagtcgaagtcgggagaggggcgtttttacggggcgggaaattggcgcgcg

SEQ ID NO: 2364 - DNA, 23 bp, Artificial Sequence
  Description of Artificial Sequence: Synthetic oligonucleotide
cggttaggtgaggcggttaggcg

SEQ ID NO: 2365 - DNA, 38 bp, Artificial Sequence
  Description of Artificial Sequence: Synthetic oligonucleotide
cgaattcgtaaagttgttcgtagacgcgcgggaattcg

SEQ ID NO: 2366 - DNA, 2 bp, Artificial Sequence
  Description of Artificial Sequence: Synthetic oligonucleotide
ct

SEQ ID NO: 2367 - DNA, 165 bp, Artificial Sequence
  Description of Artificial Sequence: Synthetic polynucleotide
cgcgggttgtttagcgtgttagattttttttttttggacgtgcgtaagttgttggtggtcggtaatcgtatttagcggattttcgaggatttttttattttttacggcgatttggtttatttggattttaggaataattcgttgcgttcgttggaggagggtacg

SEQ ID NO: 2368 - DNA, 2 bp, Artificial Sequence
  Description of Artificial Sequence: Synthetic oligonucleotide
cg

SEQ ID NO: 2369 - DNA, 2 bp, Artificial Sequence
  Description of Artificial Sequence: Synthetic oligonucleotide
cg

SEQ ID NO: 2370 - DNA, 2 bp, Artificial Sequence
  Description of Artificial Sequence: Synthetic oligonucleotide
cg

SEQ ID NO: 2371 - DNA, 23 bp, Artificial Sequence
  Description of Artificial Sequence: Synthetic oligonucleotide
cgataggcggttttcggatatcg

SEQ ID NO: 2372 - DNA, 2 bp, Artificial Sequence
  Description of Artificial Sequence: Synthetic oligonucleotide
cg

SEQ ID NO: 2373 - DNA, 66 bp, Artificial Sequence
  Description of Artificial Sequence: Synthetic oligonucleotide
cggcgttttcggggttgttgcgcgttcgcgtttagagttgtcgttttagggagttcgttacggtcg

SEQ ID NO: 2374 - DNA, 43 bp, Artificial Sequence
  Description of Artificial Sequence: Synthetic oligonucleotide
cgggcgcgtagttcgttcgcgcggtttggattttttttgttcg

SEQ ID NO: 2375 - DNA, 2 bp, Artificial Sequence
  Description of Artificial Sequence: Synthetic oligonucleotide
cg

SEQ ID NO: 2376 - DNA, 62 bp, Artificial Sequence
  Description of Artificial Sequence: Synthetic oligonucleotide
cgcgttgtacgaggatggttacgaggcgtagttggagtcgtcgtcgtcgtcgtatttgggcg

SEQ ID NO: 2377 - DNA, 2 bp, Artificial Sequence
  Description of Artificial Sequence: Synthetic oligonucleotide
cg

SEQ ID NO: 2378 - DNA, 138 bp, Artificial Sequence
  Description of Artificial Sequence: Synthetic polynucleotide
cgttttcgggcgtacggaaattatttgttaggaaatttttaacgttttttttcgtttatttttttttattttttttttggcgcgttttttttttttttagaggtacgtagtggagtttttggagtttcgaatttttcg

SEQ ID NO: 2379 - DNA, 2 bp, Artificial Sequence
  Description of Artificial Sequence: Synthetic oligonucleotide
cg

SEQ ID NO: 2380 - DNA, 2 bp, Artificial Sequence
  Description of Artificial Sequence: Synthetic oligonucleotide
cg

SEQ ID NO: 2381 - DNA, 2 bp, Artificial Sequence
  Description of Artificial Sequence: Synthetic oligonucleotide
cg

SEQ ID NO: 2382 - DNA, 2 bp, Artificial Sequence
  Description of Artificial Sequence: Synthetic oligonucleotide
cg

SEQ ID NO: 2383 - DNA, 187 bp, Artificial Sequence
  Description of Artificial Sequence: Synthetic polynucleotide
cgagcggttttaatttcgtttcgtttgttgttgttgttgttggtgttgtttcggttgtagttgttgtcgttttacgatttcggggcgttgaggtaatagggttttttttttttattttttatttttttcggtttttttatagaagcgtcgtttttagtaatttttcgtgtattttttatttttgtcg

SEQ ID NO: 2384 - DNA, 2 bp, Artificial Sequence
  Description of Artificial Sequence: Synthetic oligonucleotide
cg

SEQ ID NO: 2385 - DNA, 2 bp, Artificial Sequence
  Description of Artificial Sequence: Synthetic oligonucleotide
cg

SEQ ID NO: 2386 - DNA, 110 bp, Artificial Sequence
  Description of Artificial Sequence: Synthetic polynucleotide
cgtaggttaagatttggttttagaattatcgttataagttgaagcgcgttcgcgttttaggggcggcggagtcgtttgatttggtagtattcgtcgagttgtacgtcgcg

SEQ ID NO: 2387 - DNA, 4 bp, Artificial Sequence
  Description of Artificial Sequence: Synthetic oligonucleotide
cgcg

SEQ ID NO: 2388 - DNA, 189 bp, Artificial Sequence
  Description of Artificial Sequence: Synthetic polynucleotide
cgtgttttcgttcgcgtttgggtttcgtcgtattttagtagaagttattatagagaataaattatttttttgttttcgagatgggttttcggggaggaaggtaaattgtttgtttcgtgtataataagttaggcgtggagagtagcgcggaggaggtcgcggtagttatcgagcgggtagagtttttcg

SEQ ID NO: 2389 - DNA, 42 bp, Artificial Sequence
  Description of Artificial Sequence: Synthetic oligonucleotide
cgcgagtgtatttaagcgttttcgttttatttatttttagcg

SEQ ID NO: 2390 - DNA, 33 bp, Artificial Sequence
  Description of Artificial Sequence: Synthetic oligonucleotide
cgtggagcgtaaagtgtttgaagttttcgcgcg

SEQ ID NO: 2391 - DNA, 15 bp, Artificial Sequence
  Description of Artificial Sequence: Synthetic oligonucleotide
cgttcggttggcgcg

SEQ ID NO: 2392 - DNA, 51 bp, Artificial Sequence
  Description of Artificial Sequence: Synthetic oligonucleotide
cgtttattacggcgatttgcggtagttttagtaggtagttttgttttagcg

SEQ ID NO: 2393 - DNA, 2 bp, Artificial Sequence
  Description of Artificial Sequence: Synthetic oligonucleotide
cg

SEQ ID NO: 2394 - DNA, 268 bp, Artificial Sequence
  Description of Artificial Sequence: Synthetic polynucleotide
cgaagatgggaaacggtcgtttgttgagagggggtatttgtagtttttttagaaaaggttggggtaggagagcgtgcggttagaggggtgggggtatcggagggggggttttattttttgttttatagtcgggtttttttcgcgaggcgttgggaagtatgaggtatgtagtatttaaaatgttttttgaaaaagacggatttgaagtttttttttataaatacgttattgtatttattttttatttagagacgggttgcgcgtttcg

SEQ ID NO: 2395 - DNA, 2 bp, Artificial Sequence
  Description of Artificial Sequence: Synthetic oligonucleotide
cg

SEQ ID NO: 2396 - DNA, 33 bp, Artificial Sequence
  Description of Artificial Sequence: Synthetic oligonucleotide
cggtgatcggtttgattgtttttgggggtttcg

SEQ ID NO: 2397 - DNA, 23 bp, Artificial Sequence
  Description of Artificial Sequence: Synthetic oligonucleotide
cgaaagtttcgggttagtgggcg

SEQ ID NO: 2398 - DNA, 40 bp, Artificial Sequence
  Description of Artificial Sequence: Synthetic oligonucleotide
cgaggtatttggtcgggcggggaggcgtcgggtcggggcg

SEQ ID NO: 2399 - DNA, 10 bp, Artificial Sequence
  Description of Artificial Sequence: Synthetic oligonucleotide
cggagtcgcg

SEQ ID NO: 2400 - DNA, 181 bp, Artificial Sequence
  Description of Artificial Sequence: Synthetic polynucleotide
cgaaaacgaaatttatttttttgcgtttatttttgttagaggtttgtaggacgtgttttaatttggtatttcgagtttagaataaaagttacgggggttgcggtatgggtagggggaaggcgcgcggtggttgacgcggggtaggggttttggcgagcgcgggaggggcggttagtagtcg

SEQ ID NO: 2401 - DNA, 195 bp, Artificial Sequence
  Description of Artificial Sequence: Synthetic polynucleotide
cgttaagtagtaggattatagcgttagcgtttggtttcggaggaaagataagttggagtacgtaagggcgattcgttttcgggggtttcggttaggtatttgtcgtatgtatttttttcgtggtggtggtatgagcgcgcgcggggcgcggggggtaggcgaggggattttggtaggcgtcgacgttttaggtcg

SEQ ID NO: 2402 - DNA, 2 bp, Artificial Sequence
  Description of Artificial Sequence: Synthetic oligonucleotide
cg

SEQ ID NO: 2403 - DNA, 358 bp, Artificial Sequence
  Description of Artificial Sequence: Synthetic polynucleotide
cgcgagttcgggtgagagttatcggaatgcgggaacgtagtttagtcgggaatagggttttcgataggggtcgttcgtggttaggacgcggtcgttgaatagaggtcgcgcggcggtttttgttcgagggatttcgtgggcgggggttatacggaggtcgcgtacggttttcggggttggcgggggtaggtgggaggatttttttcgggttcgcgaatttgatttggtagcggttaggtgtttggaagcgtttttaaatgatagggttataaagatatgttggttaggtttgtagttagcgtagtaacgtggtttgtaggagcgtagaacgaggttagatagggttattcggacgtcg

SEQ ID NO: 2404 - DNA, 13 bp, Artificial Sequence
  Description of Artificial Sequence: Synthetic oligonucleotide
cgttataattgcg

SEQ ID NO: 2405 - DNA, 2 bp, Artificial Sequence
  Description of Artificial Sequence: Synthetic oligonucleotide
cg

SEQ ID NO: 2406 - DNA, 2 bp, Artificial Sequence
  Description of Artificial Sequence: Synthetic oligonucleotide
cg

SEQ ID NO: 2407 - DNA, 95 bp, Artificial Sequence
  Description of Artificial Sequence: Synthetic oligonucleotide
cgggtattcgggacgaggcgagggcgtagaaaatttggagtttaattagtacggagttgagttttcgcgttttaatttttaggtgatttcgtgcg

SEQ ID NO: 2408 - DNA, 45 bp, Artificial Sequence
  Description of Artificial Sequence: Synthetic oligonucleotide
cgtcgagagggtaggacgcgtacggtgcgttttaatttgttgtcg

SEQ ID NO: 2409 - DNA, 104 bp, Artificial Sequence
  Description of Artificial Sequence: Synthetic polynucleotide
cgcgagttagggggaggcgcgtcggaaagcgagagtgataagtagtttataagtcgaaaagtttttcgcgggaggcgcgcgtcgcgtgggtttcgatttagtcg

SEQ ID NO: 2410 - DNA, 87 bp, Artificial Sequence
  Description of Artificial Sequence: Synthetic oligonucleotide
cgggagggtggcggaaggtggtgtatcgtagcgtggttttcgtcgttgtcgtcgcggttttgtaaagtgttagcgggggcgaaagcg

SEQ ID NO: 2411 - DNA, 62 bp, Artificial Sequence
  Description of Artificial Sequence: Synthetic oligonucleotide
cgatattgaataataatcgcggggaggagaggttatttgtagtcgaggttcgtaaattgtcg

SEQ ID NO: 2412 - DNA, 2 bp, Artificial Sequence
  Description of Artificial Sequence: Synthetic oligonucleotide
cg

SEQ ID NO: 2413 - DNA, 2 bp, Artificial Sequence
  Description of Artificial Sequence: Synthetic oligonucleotide
cg

SEQ ID NO: 2414 - DNA, 2 bp, Artificial Sequence
  Description of Artificial Sequence: Synthetic oligonucleotide
cg

SEQ ID NO: 2415 - DNA, 2 bp, Artificial Sequence
  Description of Artificial Sequence: Synthetic oligonucleotide
cg

SEQ ID NO: 2416 - DNA, 2 bp, Artificial Sequence
  Description of Artificial Sequence: Synthetic oligonucleotide
cg

SEQ ID NO: 2417 - DNA, 2 bp, Artificial Sequence
  Description of Artificial Sequence: Synthetic oligonucleotide
cg

SEQ ID NO: 2418 - DNA, 2 bp, Artificial Sequence
  Description of Artificial Sequence: Synthetic oligonucleotide
cg

SEQ ID NO: 2419 - DNA, 2 bp, Artificial Sequence
  Description of Artificial Sequence: Synthetic oligonucleotide
cg

SEQ ID NO: 2420 - DNA, 145 bp, Artificial Sequence
  Description of Artificial Sequence: Synthetic polynucleotide
cgggaatcgtaggagaggattggggttttaggtggacggtgttgattgtattggttttgaagattggaagtgggtgtaggaggaatttgcgatagttgagattagggcgcgcgggtagatgcgttaggtcgttagtaaatcggcg

SEQ ID NO: 2421 - DNA, 2 bp, Artificial Sequence
  Description of Artificial Sequence: Synthetic oligonucleotide
cg

SEQ ID NO: 2422 - DNA, 19 bp, Artificial Sequence
  Description of Artificial Sequence: Synthetic oligonucleotide
cggtttttggcggtgggcg

SEQ ID NO: 2423 - DNA, 35 bp, Artificial Sequence
  Description of Artificial Sequence: Synthetic oligonucleotide
cggaggtttcgttaatggggtcgtcgtcgtcgtcg

SEQ ID NO: 2424 - DNA, 2 bp, Artificial Sequence
  Description of Artificial Sequence: Synthetic oligonucleotide
cg

SEQ ID NO: 2425 - DNA, 2 bp, Artificial Sequence
  Description of Artificial Sequence: Synthetic oligonucleotide
cg

SEQ ID NO: 2426 - DNA, 36 bp, Artificial Sequence
  Description of Artificial Sequence: Synthetic oligonucleotide
cggtttttttgtagttagcggattagcgttagttcg

SEQ ID NO: 2427 - DNA, 2 bp, Artificial Sequence
  Description of Artificial Sequence: Synthetic oligonucleotide
cg

SEQ ID NO: 2428 - DNA, 42 bp, Artificial Sequence
  Description of Artificial Sequence: Synthetic oligonucleotide
cgtataatggtaaatgggattaggtaggcgaaggtttagtcg

SEQ ID NO: 2429 - DNA, 2 bp, Artificial Sequence
  Description of Artificial Sequence: Synthetic oligonucleotide
cg

SEQ ID NO: 2430 - DNA, 2 bp, Artificial Sequence
  Description of Artificial Sequence: Synthetic oligonucleotide
cg

SEQ ID NO: 2431 - DNA, 18 bp, Artificial Sequence
  Description of Artificial Sequence: Synthetic oligonucleotide
cggcgcgggcgttgcgcg

SEQ ID NO: 2432 - DNA, 2 bp, Artificial Sequence
  Description of Artificial Sequence: Synthetic oligonucleotide
cg

SEQ ID NO: 2433 - DNA, 2 bp, Artificial Sequence
  Description of Artificial Sequence: Synthetic oligonucleotide
cg

SEQ ID NO: 2434 - DNA, 2 bp, Artificial Sequence
  Description of Artificial Sequence: Synthetic oligonucleotide
cg

SEQ ID NO: 2435 - DNA, 118 bp, Artificial Sequence
  Description of Artificial Sequence: Synthetic polynucleotide
cgcgtcgttgttttgttttaggtttcggtgcggttttaagttttagtttagggtttttaggtttttttaggcggcggtggcggtatttatttgggtcgcggagtcggggtttggtacg

SEQ ID NO: 2436 - DNA, 22 bp, Artificial Sequence
  Description of Artificial Sequence: Synthetic oligonucleotide
cgttcgcgtcgttcgcggttcg

SEQ ID NO: 2437 - DNA, 2 bp, Artificial Sequence
  Description of Artificial Sequence: Synthetic oligonucleotide
cg

SEQ ID NO: 2438 - DNA, 2 bp, Artificial Sequence
  Description of Artificial Sequence: Synthetic oligonucleotide
cg

SEQ ID NO: 2439 - DNA, 2 bp, Artificial Sequence
  Description of Artificial Sequence: Synthetic oligonucleotide
cg

SEQ ID NO: 2440 - DNA, 2 bp, Artificial Sequence
  Description of Artificial Sequence: Synthetic oligonucleotide
cg

SEQ ID NO: 2441 - DNA, 31 bp, Artificial Sequence
  Description of Artificial Sequence: Synthetic oligonucleotide
cgtaatatattttagtatcgagtttttgtcg

SEQ ID NO: 2442 - DNA, 2 bp, Artificial Sequence
  Description of Artificial Sequence: Synthetic oligonucleotide
cg

SEQ ID NO: 2443 - DNA, 2 bp, Artificial Sequence
  Description of Artificial Sequence: Synthetic oligonucleotide
cg

SEQ ID NO: 2444 - DNA, 2 bp, Artificial Sequence
  Description of Artificial Sequence: Synthetic oligonucleotide
cg

SEQ ID NO: 2445 - DNA, 2 bp, Artificial Sequence
  Description of Artificial Sequence: Synthetic oligonucleotide
cg

SEQ ID NO: 2446 - DNA, 2 bp, Artificial Sequence
  Description of Artificial Sequence: Synthetic oligonucleotide
cg

SEQ ID NO: 2447 - DNA, 2 bp, Artificial Sequence
  Description of Artificial Sequence: Synthetic oligonucleotide
cg

SEQ ID NO: 2448 - DNA, 2 bp, Artificial Sequence
  Description of Artificial Sequence: Synthetic oligonucleotide
cg

SEQ ID NO: 2449 - DNA, 2 bp, Artificial Sequence
  Description of Artificial Sequence: Synthetic oligonucleotide
cg

SEQ ID NO: 2450 - DNA, 2 bp, Artificial Sequence
  Description of Artificial Sequence: Synthetic oligonucleotide
cg

SEQ ID NO: 2451 - DNA, 69 bp, Artificial Sequence
  Description of Artificial Sequence: Synthetic oligonucleotide
cgtttttcggttcgtttttttcgagcgtcgtcgatacgttagttaaacggtcgttggtcgtttttagcg

SEQ ID NO: 2452 - DNA, 415 bp, Artificial Sequence
  Description of Artificial Sequence: Synthetic polynucleotide
cgtacgggttgggtttgggaatggggatcgcgaggttttagtatttcgatgttttgaaagttttttcgtttcggggatttgtttttgtgttgtagttggtaggggtcgtttgaagtgggagtagcgtttggagaaggcgggaggagttcggttcgggggacgggcggcgggatagcgggatttcggcggcgcggtgcgttttagggcgtagcggcggtcgtagatcgagtttcgggcgcggtaagaggcggcgggagtcggtggcggttcggtattatgcgtcgagggcgtttgttggagatcgttttgggatttatcgtgtttttagcgttttatacgagttatggggcggacgttaatttggaggttgggaacgtgaaggaaattagagttagtcgggttaagagaagaggcg

SEQ ID NO: 2453 - DNA, 2 bp, Artificial Sequence
  Description of Artificial Sequence: Synthetic oligonucleotide
cg

SEQ ID NO: 2454 - DNA, 2 bp, Artificial Sequence
  Description of Artificial Sequence: Synthetic oligonucleotide
cg

SEQ ID NO: 2455 - DNA, 2 bp, Artificial Sequence
  Description of Artificial Sequence: Synthetic oligonucleotide
cg

SEQ ID NO: 2456 - DNA, 2 bp, Artificial Sequence
  Description of Artificial Sequence: Synthetic oligonucleotide
cg

SEQ ID NO: 2457 - DNA, 2 bp, Artificial Sequence
  Description of Artificial Sequence: Synthetic oligonucleotide
cg

SEQ ID NO: 2458 - DNA, 62 bp, Artificial Sequence
  Description of Artificial Sequence: Synthetic oligonucleotide
cgtgcgtattttaagcgcgtgcgggagtgtgcgaggcgttgtgcgagttagcggcgggcgcg

SEQ ID NO: 2459 - DNA, 2 bp, Artificial Sequence
  Description of Artificial Sequence: Synthetic oligonucleotide
cg

SEQ ID NO: 2460 - DNA, 2 bp, Artificial Sequence
  Description of Artificial Sequence: Synthetic oligonucleotide
cg

SEQ ID NO: 2461 - DNA, 2 bp, Artificial Sequence
  Description of Artificial Sequence: Synthetic oligonucleotide
cg

SEQ ID NO: 2462 - DNA, 2 bp, Artificial Sequence
  Description of Artificial Sequence: Synthetic oligonucleotide
cg

SEQ ID NO: 2463 - DNA, 20 bp, Artificial Sequence
  Description of Artificial Sequence: Synthetic oligonucleotide
cggaggtttttgcgtttgcg

SEQ ID NO: 2464 - DNA, 69 bp, Artificial Sequence
  Description of Artificial Sequence: Synthetic oligonucleotide
cgttgcgttttttcgtttgttggcgtttttgttttagcgggattcggtagttaggggttttagggggcg

SEQ ID NO: 2465 - DNA, 2 bp, Artificial Sequence
  Description of Artificial Sequence: Synthetic oligonucleotide
cg

SEQ ID NO: 2466 - DNA, 318 bp, Artificial Sequence
  Description of Artificial Sequence: Synthetic polynucleotide
cgagacgcggtagatttttagagcggtttatttatttatcgaagcggattttgggcggtttcgggttgattcgcgttgttagggcgcggattttatttcgggcgtattgttaggagaaggggtttttcggggcggcgcgtttcgattttgggttttcggtgttcgtagagggcggagattcgcggcgttttaggttatttattcgtattttttcgagttaaatttttagcgtttattcggattcgacggtttaagtattgatttttaggtaagagtcgttttttttggtttttagggaattgatattatcgcgggacg

SEQ ID NO: 2467 - DNA, 27 bp, Artificial Sequence
  Description of Artificial Sequence: Synthetic oligonucleotide
cgcgttttcgttcggggagttattacg

SEQ ID NO: 2468 - DNA, 2 bp, Artificial Sequence
  Description of Artificial Sequence: Synthetic oligonucleotide
cg

SEQ ID NO: 2469 - DNA, 13 bp, Artificial Sequence
  Description of Artificial Sequence: Synthetic oligonucleotide
cgcggggagttcg

SEQ ID NO: 2470 - DNA, 189 bp, Artificial Sequence
  Description of Artificial Sequence: Synthetic polynucleotide
cgtaatttttagttaaagttatcgcgggcggattatggtttagggcgttagaggggttagaggtacgggaagaggaaaagacggttaattgggaaaaaaagagaaaacgaaagaaaagttaaacgatgagtttttataaggaggacggagtgaatagtttgtgttagaaggttttgtatatcgttatcg

SEQ ID NO: 2471 - DNA, 2 bp, Artificial Sequence
  Description of Artificial Sequence: Synthetic oligonucleotide
cg

SEQ ID NO: 2472 - DNA, 2 bp, Artificial Sequence
  Description of Artificial Sequence: Synthetic oligonucleotide
cg

SEQ ID NO: 2473 - DNA, 13 bp, Artificial Sequence
  Description of Artificial Sequence: Synthetic oligonucleotide
cgtttagttttcg

SEQ ID NO: 2474 - DNA, 51 bp, Artificial Sequence
  Description of Artificial Sequence: Synthetic oligonucleotide
cgaaggcgaggtcgtttagttcgtattttattttacgtacggtatacgtcg

SEQ ID NO: 2475 - DNA, 289 bp, Artificial Sequence
  Description of Artificial Sequence: Synthetic polynucleotide
cggtagtgtttttttaagaaggggtaaaaaaatttgtttatggttatttttttttcgttttattttttttttttttgatagtttcggttttggttgttcgagtcgggggtgtgttttcggttttttttagatttgggcggggggcgggaggagtgagcgatttgggaagtttcgggggtggagagggggcgtttcggggtttgggggcgacgtggatattttttttggagtacggcggtgcgtttgggatttgaaggaagggtcgaaggaagcggggtgcgggcgggcg

SEQ ID NO: 2476 - DNA, 2 bp, Artificial Sequence
  Description of Artificial Sequence: Synthetic oligonucleotide
cg

SEQ ID NO: 2477 - DNA, 165 bp, Artificial Sequence
  Description of Artificial Sequence: Synthetic polynucleotide
cgttttgggaagcgtagaggcgggggtgttgttcgcgttggggagtacgtgaggggatatttagggattgttcgcgcgaatggtttttaacgtatgcgttttattttatattttatagtcgttatgacgatcgggaggttcgtaacggttgcggggataagttcg

SEQ ID NO: 2478 - DNA, 21 bp, Artificial Sequence
  Description of Artificial Sequence: Synthetic oligonucleotide
cgaagtggtgtaggggcggcg

SEQ ID NO: 2479 - DNA, 2 bp, Artificial Sequence
  Description of Artificial Sequence: Synthetic oligonucleotide
cg

SEQ ID NO: 2480 - DNA, 2 bp, Artificial Sequence
  Description of Artificial Sequence: Synthetic oligonucleotide
cg

SEQ ID NO: 2481 - DNA, 2 bp, Artificial Sequence
  Description of Artificial Sequence: Synthetic oligonucleotide
cg

SEQ ID NO: 2482 - DNA, 159 bp, Artificial Sequence
  Description of Artificial Sequence: Synthetic polynucleotide
cgtgttcgtggatgcgtagcgttacgcggttgtttattatttagcgatatacgcggtttacggagaaggtgaggtcgtagcgggtcgatttgtcgcggtttaggcggtcgtcgtcggcgttgtttatgttgtagagggatagtgcggttagcgtagtcg

SEQ ID NO: 2483 - DNA, 2 bp, Artificial Sequence
  Description of Artificial Sequence: Synthetic oligonucleotide
cg

SEQ ID NO: 2484 - DNA, 129 bp, Artificial Sequence
  Description of Artificial Sequence: Synthetic polynucleotide
cgtgcgttcgagtggggtatttgttcgaggtcggggattgtgaatcgaaagattttatttagttttgttgtttttttggtattgcgatttgggggcgggttattttatttttttgaatttcgtttttcg

SEQ ID NO: 2485 - DNA, 2 bp, Artificial Sequence
  Description of Artificial Sequence: Synthetic oligonucleotide
cg

SEQ ID NO: 2486 - DNA, 120 bp, Artificial Sequence
  Description of Artificial Sequence: Synthetic polynucleotide
cgttttttttttttttttttttttttttttttttttttttttttttttttttttttggtattatagagttgttttgaaaatagaagatagagggagtttcggagttcgttatttttagcg

SEQ ID NO: 2487 - DNA, 2 bp, Artificial Sequence
  Description of Artificial Sequence: Synthetic oligonucleotide
cg

SEQ ID NO: 2488 - DNA, 171 bp, Artificial Sequence
  Description of Artificial Sequence: Synthetic polynucleotide
cgttcggttgttgtatttgttagtgttgggtttaggttgagaggcgatttttagtttttataataatgtttcgggttttttggtttgggttttcgtagcgttcgattgatcgttagcgatacgacgagaacgaggatttgtcggacgtggaggagatcgttagcgttcgcg

SEQ ID NO: 2489 - DNA, 2 bp, Artificial Sequence
  Description of Artificial Sequence: Synthetic oligonucleotide
cg

SEQ ID NO: 2490 - DNA, 2 bp, Artificial Sequence
  Description of Artificial Sequence: Synthetic oligonucleotide
cg

SEQ ID NO: 2491 - DNA, 2 bp, Artificial Sequence
  Description of Artificial Sequence: Synthetic oligonucleotide
cg

SEQ ID NO: 2492 - DNA, 64 bp, Artificial Sequence
  Description of Artificial Sequence: Synthetic oligonucleotide
cggggaaagttgggcgcgcgagtcgaggttgttgtttatttgtagtcgcgtcgtttatttgtcg

SEQ ID NO: 2493 - DNA, 2 bp, Artificial Sequence
  Description of Artificial Sequence: Synthetic oligonucleotide
cg

SEQ ID NO: 2494 - DNA, 2 bp, Artificial Sequence
  Description of Artificial Sequence: Synthetic oligonucleotide
cg

SEQ ID NO: 2495 - DNA, 2 bp, Artificial Sequence
  Description of Artificial Sequence: Synthetic oligonucleotide
cg

SEQ ID NO: 2496 - DNA, 2 bp, Artificial Sequence
  Description of Artificial Sequence: Synthetic oligonucleotide
cg

SEQ ID NO: 2497 - DNA, 16 bp, Artificial Sequence
  Description of Artificial Sequence: Synthetic oligonucleotide
cgagttttgcggagcg

SEQ ID NO: 2498 - DNA, 2 bp, Artificial Sequence
  Description of Artificial Sequence: Synthetic oligonucleotide
cg

SEQ ID NO: 2499 - DNA, 2 bp, Artificial Sequence
  Description of Artificial Sequence: Synthetic oligonucleotide
cg

SEQ ID NO: 2500 - DNA, 2 bp, Artificial Sequence
  Description of Artificial Sequence: Synthetic oligonucleotide
cg

SEQ ID NO: 2501 - DNA, 18 bp, Artificial Sequence
  Description of Artificial Sequence: Synthetic oligonucleotide
cgcggtcgagggaatgcg

SEQ ID NO: 2502 - DNA, 118 bp, Artificial Sequence
  Description of Artificial Sequence: Synthetic polynucleotide
cgcgtttttgtttttgggtagatttttttatttgtgtattttggtttttttatttagtaaagagatgtgcgaagtgtgcgtttggagacgagtcgtttcggtgatttttattcgttcg

SEQ ID NO: 2503 - DNA, 2 bp, Artificial Sequence
  Description of Artificial Sequence: Synthetic oligonucleotide
cg

SEQ ID NO: 2504 - DNA, 2 bp, Artificial Sequence
  Description of Artificial Sequence: Synthetic oligonucleotide
cg

SEQ ID NO: 2505 - DNA, 2 bp, Artificial Sequence
  Description of Artificial Sequence: Synthetic oligonucleotide
cg

SEQ ID NO: 2506 - DNA, 2 bp, Artificial Sequence
  Description of Artificial Sequence: Synthetic oligonucleotide
cg

SEQ ID NO: 2507 - DNA, 2 bp, Artificial Sequence
  Description of Artificial Sequence: Synthetic oligonucleotide
cg

SEQ ID NO: 2508 - DNA, 22 bp, Artificial Sequence
  Description of Artificial Sequence: Synthetic oligonucleotide
cggatttttttggggcggcgcg

SEQ ID NO: 2509 - DNA, 112 bp, Artificial Sequence
  Description of Artificial Sequence: Synthetic polynucleotide
cgaggtagggaggcgttttcgtagtttttgattttataattcgcgcgcgtgtgtatcgagtcgcgggtatatcgcgaatatatatatatatatatatattcgtgcgttttcg

SEQ ID NO: 2510 - DNA, 109 bp, Artificial Sequence
  Description of Artificial Sequence: Synthetic polynucleotide
cgtggaggagtggggttaggtggttattattagtatgtttattcgttacgttcgtacgtagtttttgagttttatttagaacgtaagtgggtttagtttaggtagagcg

SEQ ID NO: 2511 - DNA, 2 bp, Artificial Sequence
  Description of Artificial Sequence: Synthetic oligonucleotide
cg

SEQ ID NO: 2512 - DNA, 2 bp, Artificial Sequence
  Description of Artificial Sequence: Synthetic oligonucleotide
cg

SEQ ID NO: 2513 - DNA, 2 bp, Artificial Sequence
  Description of Artificial Sequence: Synthetic oligonucleotide
cg

SEQ ID NO: 2514 - DNA, 431 bp, Artificial Sequence
  Description of Artificial Sequence: Synthetic polynucleotide
cgtgtttttttataggttttatttgtaattgagacgaatgattatagtggggcgggaaggagtagttgtttattaattaatttttaattaaaagtgtttttcgttttcgggtgattaaagagaaatatcgttcgttgggcgatattgattcggatggaatttatttgttaacgttcggaggaatggttttttcgtttatcgcgcggtcgggattgttttggtttttttcggtttgagtcgtcggcgagtgatcggcgagtttgcggttaggtcgggttgcgcgaggtggggttgacgttagagtttttttcgttttaagtcgcgtatatttgatttgacgggttcgcgcgattcgtttttttttttttttttttcgtaaaatatgtatttttgtcgtcgttgcgaggtcgttcggttttagagttttttcg

SEQ ID NO: 2515 - DNA, 2 bp, Artificial Sequence
  Description of Artificial Sequence: Synthetic oligonucleotide
cg

SEQ ID NO: 2516 - DNA, 40 bp, Artificial Sequence
  Description of Artificial Sequence: Synthetic oligonucleotide
cgtttttatttttttagcggagttatagcggggcgcggcg

SEQ ID NO: 2517 - DNA, 2 bp, Artificial Sequence
  Description of Artificial Sequence: Synthetic oligonucleotide
cg

SEQ ID NO: 2518 - DNA, 22 bp, Artificial Sequence
  Description of Artificial Sequence: Synthetic oligonucleotide
cgtggttttgaatttgttggcg

SEQ ID NO: 2519 - DNA, 2 bp, Artificial Sequence
  Description of Artificial Sequence: Synthetic oligonucleotide
cg

SEQ ID NO: 2520 - DNA, 47 bp, Artificial Sequence
  Description of Artificial Sequence: Synthetic oligonucleotide
cgagttggagaattatagtatgtattgcgtgtaatgtaagatgttcg

SEQ ID NO: 2521 - DNA, 24 bp, Artificial Sequence
  Description of Artificial Sequence: Synthetic oligonucleotide
cgtgttagaagttttttaacggcg

SEQ ID NO: 2522 - DNA, 2 bp, Artificial Sequence
  Description of Artificial Sequence: Synthetic oligonucleotide
cg

SEQ ID NO: 2523 - DNA, 45 bp, Artificial Sequence
  Description of Artificial Sequence: Synthetic oligonucleotide
cgagggttttagttaattagtttgttgggtgggtttggagtttcg

SEQ ID NO: 2524 - DNA, 2 bp, Artificial Sequence
  Description of Artificial Sequence: Synthetic oligonucleotide
cg

SEQ ID NO: 2525 - DNA, 258 bp, Artificial Sequence
  Description of Artificial Sequence: Synthetic polynucleotide
cgcgtatttgtttaggcgttgcggtttagcgcgttttaatttttagttcgggcggagagcgggggcgggattgaagtatcgtgttttttaaagtattttttcgtcgtcggtagttttggtttcgtaaatgttttagcgcgtttaggcgtacgtagagattggcgcggtagttttcgggttaacggtacgcgagtaaagttggttggcgatttgggatacgtagtagaagttgaggttgtatcgattttcgtcgtttcg

SEQ ID NO: 2526 - DNA, 45 bp, Artificial Sequence
  Description of Artificial Sequence: Synthetic oligonucleotide
cgcgatcgtaagttcgagtttaggtttttcggagtcgttagggcg

SEQ ID NO: 2527 - DNA, 7 bp, Artificial Sequence
  Description of Artificial Sequence: Synthetic oligonucleotide
cgtcgcg

SEQ ID NO: 2528 - DNA, 4 bp, Artificial Sequence
  Description of Artificial Sequence: Synthetic oligonucleotide
cgcg

SEQ ID NO: 2529 - DNA, 67 bp, Artificial Sequence
  Description of Artificial Sequence: Synthetic oligonucleotide
cgaggtcgtttcgttggttggtgtaagaattagtttgtaatttaagttttgagttgttggcgtttcg

SEQ ID NO: 2530 - DNA, 43 bp, Artificial Sequence
  Description of Artificial Sequence: Synthetic oligonucleotide
cgttcgagttttcgttgttgtcgttgtcgttgcgggttagtcg

SEQ ID NO: 2531 - DNA, 2 bp, Artificial Sequence
  Description of Artificial Sequence: Synthetic oligonucleotide
cg

SEQ ID NO: 2532 - DNA, 2 bp, Artificial Sequence
  Description of Artificial Sequence: Synthetic oligonucleotide
cg

SEQ ID NO: 2533 - DNA, 113 bp, Artificial Sequence
  Description of Artificial Sequence: Synthetic polynucleotide
cgttcgagattcgggagagattaggggttcgtaaagtagaagagtagatttagaaagaaaaaaaaaaaagcgagaagtgcgagaaaaatatattgaatttagttaaatatacg

SEQ ID NO: 2534 - DNA, 4 bp, Artificial Sequence
  Description of Artificial Sequence: Synthetic oligonucleotide
cgcg

SEQ ID NO: 2535 - DNA, 2 bp, Artificial Sequence
  Description of Artificial Sequence: Synthetic oligonucleotide
cg

SEQ ID NO: 2536 - DNA, 84 bp, Artificial Sequence
  Description of Artificial Sequence: Synthetic oligonucleotide
cgggttttggggcgttggtgttcgcgtagttttagtcgttttcgtagttatcgtcgttcggtttcgcggaggcggcgcgtagcg

SEQ ID NO: 2537 - DNA, 2 bp, Artificial Sequence
  Description of Artificial Sequence: Synthetic oligonucleotide
cg

SEQ ID NO: 2538 - DNA, 48 bp, Artificial Sequence
  Description of Artificial Sequence: Synthetic oligonucleotide
cgtaggttaagatttggttttagaattatcgttataagatgaagcgcg

SEQ ID NO: 2539 - DNA, 228 bp, Artificial Sequence
  Description of Artificial Sequence: Synthetic polynucleotide
cgtcgttattacgtcgcgcgtcgtatttcgcgttaagaatggggcggttaagttgtttaagtcgttcgtcgtcgtcgtcgtcgtcgcggtcgaggcgttcggcgtcggcgcgggtatggagcgttcgtagagtcgttttagtttgttcgtttttttcgaggcgttcgttatttatttttcgtgtatgaattttttcgacgacgaggacgtaggtaagcgcgcggttcg

SEQ ID NO: 2540 - DNA, 47 bp, Artificial Sequence
  Description of Artificial Sequence: Synthetic oligonucleotide
cgttggtgcgtggcggcgtggagcgcgtttgttacggttaaggtgcg

SEQ ID NO: 2541 - DNA, 185 bp, Artificial Sequence
  Description of Artificial Sequence: Synthetic polynucleotide
cgtcgtttttcggtttagagtttttattttcggtttgtgagtttgcggcgttggtggagttcggttttaggaagaggagtttattcggttttttttgattggatagtagcgaggttttatcgggcgttttcgcggtttaaaatcgaagcgggggcgagggggaggtagagttcgttttttgcgcg

SEQ ID NO: 2542 - DNA, 216 bp, Artificial Sequence
  Description of Artificial Sequence: Synthetic polynucleotide
cggcgttttatttattggcgtttacggttcgtaggtaaagcgtggaaggagttgaacgcggcggagaagcggtttttcgtggaggaagtcgaacggttgcgcgtgtagtatttgcgcgattattttaattataagtatcggtcgcgtcgtaagaagtaggcgcgtaaggttcggcggttggagttcggttttttgttttcgggattagcgttttcg

SEQ ID NO: 2543 - DNA, 344 bp, Artificial Sequence
  Description of Artificial Sequence: Synthetic polynucleotide
cgaataatagaaattgttaattttaataatttagagtaggttaacgaggttttgttttttcgattcgaattaaaggtttttcgtttcgtgcgttgttacgagcggtgttttttggggttttaatgtagcgagttgtgttcgaggggttcggaaggcgtaagttgggtagcgatatggggaacgcggagcgggtttcggggtttcggagttttgggttagtatttacgttgttgttgttcgtcgcggcgttattggtcgtgtcggacgtattcgggcgttttttcgaggaggacgaggagttagtggtgtcggagttggagcgcgtttcgggatacgggattacg

SEQ ID NO: 2544 - DNA, 28 bp, Artificial Sequence
  Description of Artificial Sequence: Synthetic oligonucleotide
cgtttcggtttggttgttaaatagaacg

SEQ ID NO: 2545 - DNA, 124 bp, Artificial Sequence
  Description of Artificial Sequence: Synthetic polynucleotide
cggcgcgtacggttaaggtacgcgcgttggtatacgcgggcgcggatacgcgcggatatatacgtgcgggatacgttttttttcgacggcggcgttaatttttcggtaagtttagcgttttacg

SEQ ID NO: 2546 - DNA, 80 bp, Artificial Sequence
  Description of Artificial Sequence: Synthetic oligonucleotide
cgaggtgtaggcggcgcgggcgtttatcgtgagcgtcgtgttgttggcgttcgttgcgtttttcgtgattttggcgggcg

SEQ ID NO: 2547 - DNA, 62 bp, Artificial Sequence
  Description of Artificial Sequence: Synthetic oligonucleotide
cgaggcgtggaggggtagtcgcggcggggcgatttttatttgtttattgcggggtttgttcg

SEQ ID NO: 2548 - DNA, 165 bp, Artificial Sequence
  Description of Artificial Sequence: Synthetic polynucleotide
cgttatttgatttcgttattaagtttaaggtgttttggatttacggtaagtatagcgtcgttgtagttggtcgtgcgtttttattatcgtcgttaggtttcgaggtcgcgtttagttttagtaagaggaaacggacgtttagcgataaatcggcgtatacggtcg

SEQ ID NO: 2549 - DNA, 43 bp, Artificial Sequence
  Description of Artificial Sequence: Synthetic oligonucleotide
cgcgtttcgaggaagcgtcggaattattagaagtatagggacg

SEQ ID NO: 2550 - DNA, 86 bp, Artificial Sequence
  Description of Artificial Sequence: Synthetic oligonucleotide
cgttatttttaattagttgtaagtcgagttgtttatttgggatcgggtcggttcggcgggtttggttttcggcgaaggcggcggcg

SEQ ID NO: 2551 - DNA, 23 bp, Artificial Sequence
  Description of Artificial Sequence: Synthetic oligonucleotide
cgtttttttattttacgggttcg

SEQ ID NO: 2552 - DNA, 2 bp, Artificial Sequence
  Description of Artificial Sequence: Synthetic oligonucleotide
cg

SEQ ID NO: 2553 - DNA, 99 bp, Artificial Sequence
  Description of Artificial Sequence: Synthetic oligonucleotide
cggtaggagtagtttatagttaggagcgttttttcgtttttaacgtcgcgtttttttttttaaaacggtttaaaaaaatttattaattgtatggtcgcg

SEQ ID NO: 2554 - DNA, 73 bp, Artificial Sequence
  Description of Artificial Sequence: Synthetic oligonucleotide
cgattatttttgtgtttttaggagtttattttgggcggtagggaggcgttgcgtggggtttacgagttttacg

SEQ ID NO: 2555 - DNA, 2 bp, Artificial Sequence
  Description of Artificial Sequence: Synthetic oligonucleotide
cg

SEQ ID NO: 2556 - DNA, 52 bp, Artificial Sequence
  Description of Artificial Sequence: Synthetic oligonucleotide
cgtttttaggattttcgttcgtttttttttgattcggtttttgttcgtttcg

SEQ ID NO: 2557 - DNA, 50 bp, Artificial Sequence
  Description of Artificial Sequence: Synthetic oligonucleotide
cgtagtcgtcgcgttcgtatttgattatggagtgcgtttttttgttcgcg

SEQ ID NO: 2558 - DNA, 50 bp, Artificial Sequence
  Description of Artificial Sequence: Synthetic oligonucleotide
cgaacgtagagtttatacgtggattttcgcgtttgtgatgtttcgattcg

SEQ ID NO: 2559 - DNA, 2 bp, Artificial Sequence
  Description of Artificial Sequence: Synthetic oligonucleotide
cg

SEQ ID NO: 2560 - DNA, 2 bp, Artificial Sequence
  Description of Artificial Sequence: Synthetic oligonucleotide
cg

SEQ ID NO: 2561 - DNA, 52 bp, Artificial Sequence
  Description of Artificial Sequence: Synthetic oligonucleotide
cgtttggggtttacgcgagtcgcgagtttttgtttgtttttgcgttatttcg

SEQ ID NO: 2562 - DNA, 2 bp, Artificial Sequence
  Description of Artificial Sequence: Synthetic oligonucleotide
cg

SEQ ID NO: 2563 - DNA, 2 bp, Artificial Sequence
  Description of Artificial Sequence: Synthetic oligonucleotide
cg

SEQ ID NO: 2564 - DNA, 2 bp, Artificial Sequence
  Description of Artificial Sequence: Synthetic oligonucleotide
cg

SEQ ID NO: 2565 - DNA, 138 bp, Artificial Sequence
  Description of Artificial Sequence: Synthetic polynucleotide
cgcggcgtttttagttgttttttattcgtttcgttcgttagtttttttttcgcgcgatggtttcggcgttgagttatgtttttaagtttaagtttttcgtgattttgttcgttatttcgtttttgttgttgttattcg

SEQ ID NO: 2566 - DNA, 2 bp, Artificial Sequence
  Description of Artificial Sequence: Synthetic oligonucleotide
cg

SEQ ID NO: 2567 - DNA, 2 bp, Artificial Sequence
  Description of Artificial Sequence: Synthetic oligonucleotide
cg

SEQ ID NO: 2568 - DNA, 2 bp, Artificial Sequence
  Description of Artificial Sequence: Synthetic oligonucleotide
cg

SEQ ID NO: 2569 - DNA, 1216 bp, Homo sapiens
caaggtggggaccgggacgcgaccggggatggggaagggggctgcaggaggccccgcctgcgctgtcgcccctgctgggcacagcgccccccaccacccgcggcgaccccggcccccgcaaggtggggcggcgagcaggagccggggccaggccaggggctcgagctcccgttcgaggggcggggaaggcgggtgacgtgagccgggccgggcgggcggagttgggaccggctccgggaggcgggggcgagcgcgcggagaggcagacgcgaggagggaggcggctgagcagcgcgggcggctctgcggcgggcgcggtgggcgcgggcggcggggccccgggatccccgcgcgcctcctccgcgcggcgccgccgccgcgcgtccccacgccccgcgctccacggcgccctcgccccgcgcgcctctcgtgcccgcctcctgccagtctccgggccgcggccgtctgcagagcgagcgctcagacggagcccccgggcaacttgagtggcgccgatcggcggcggagcctctggcagagccccccgacccggcagcgcggaggggactcgcgtccgtccgcgtcgcgtcaccccaaaccctaagcagcgccgccccatcggcgcggagctccggctggaggcaagagccgcgcgccgggagacacgcaccgtgagcggcagcgccgccggcctccctcctcgccgccccggagggcgaagccgcggctccccagccctttgctgcgccgcgacagcgccggaacacgccccgcctcgctgccgccttcgctgtgccgccggcggagggggccgcgagccccgcgccccggccggaggatgtgcgcccccgcgggccgcccagcctgagccatgcgccccaacggcggcggcgcgccggccggcatggagccccgcgcggccgcgctctgactcgctgtgcgccccgcggccggcgggcggcgggaggcggcggaccgagagccggagaccggcgccgcgggacggaagcgagcgggcgcgggcgccgcgcagatggcctgggcgagccaggtctgaggccccgctccccgaaacgtgaccatgtggattcaacagcttttaggactcaggtgagcgacccggccggcgccgggtgcgtgtgggcgcgtgggtgccaggctgggcggaagcggcgctttcctctatgttgcaaatcaagggacccctcttcgcttc

SEQ ID NO: 2570 - DNA, 365 bp, Homo sapiens
ggcgtccgacgcccaccccgggcttggcgtccccttccggccaccacgcggcgccgccccccgggatcctccagtccccggagccccgcgcgcccagagccgctcggagcgcgggcggggtcagcttgggcagccgcgggtcgctgctgcgtcggaagtctccgtcgccagggagccccttgggcgccaggtcctgggcccctgggcgaagtcgacgccagaacatgcttggccccgcactcagctcaccgcaccctcagcgcgcgtgggtggggggcgccggctgaggtggggagggcatagtccagccccaggccatagtgccccgggcggggcagcgcggtgcggggtgaacgccaccggcc

SEQ ID NO: 2571 - DNA, 201 bp, Homo sapiens
tggcgtgacggcttgtggggcctgcggggtgcgctgcccccggacctgcggggggaggcggctgagctggcggcgctcgcgggcccagtggtgagtgcggcgtcctcacgcccagcccgacgcctccggagcggccgccgcgcaggggtgggcgcgggcttccaggagggagggcggctgtgaacgcgccttgctttccgc

SEQ ID NO: 2572 - DNA, 201 bp, Homo sapiens
atcacgtcgcccgtgctcatcatccacggcacggaggacgaggtgatcgacttctcgcacgggctggcgctctacgagcgctgccccaaggcggtggagccgctgtgggtggagggcgccgggcacaacgacatcgagctctacagccagtacctggagcgcctgcgtcgcttcatctcccaggagctgcccagccagcgc

SEQ ID NO: 2573 - DNA, 201 bp, Homo sapiens
gggcgcggcgggcgaggggtccgggctgagctgcgggccggcccggatggcgggcggcgcgggctggtcgggcgcccccgcggctctgctgcgctccgtgcgccgcctgcgcgaggtgttcgaggtgtgcggccgcgaccccgacggcttcctgcgcgtggagcgcgtcgcggcgctcggactgcgcttcggccagggcga

SEQ ID NO: 2574 - DNA, 201 bp, Homo sapiens
ggcgctctcccctcgcccctggcccaggcccggctcgcgggtgtagctcttcctagggccccctcccctttccgggccgcgcgtccgccccgcatcgcggcggctcctcggcagtgtttgtttttattggacgcacagtgaccgtgacgggcacggggcgcgagctctcatcaccacaatgggtgtgcatggcgcggggcg

SEQ ID NO: 2575 - DNA, 201 bp, Homo sapiens
cccccccttaattgacctaactttctaaccctagctcttcgcttctggcaccggtcccctcccaagtctccagaccctaaccctggctcccgacccgccccgctacagcttgggaagcgggagaagcagcgcgcgcccttctgcggaccccctcccagggaagattgtggtgttagctgcctagggggaccagggggccac

SEQ ID NO: 2576 - DNA, 201 bp, Homo sapiens
agcccaggggtagggggctcagggcagccagacctccctaggctcaggaagagtagtcttcagcgctcggctgtcaggcaatccggtccccggttccccacggcggtctcctcggtgtgccccaccaagagcgacagggctggtgacccgaggggcgcgtgcgcggtcgtcagcctgggatttgcacggacccccttctcc

SEQ ID NO: 2577 - DNA, 213 bp, Homo sapiens
gcctcttgcctgaaccaaagtggccaggcactcagtttgtaagatgaacaaatgaaggaaagaaggaacgaatgaataagggctcatcttgcagagcgttcgcgtctcagcgcgcaccaggcacatcagtgccaaaggtgctgggggtcgggcccagcgcccggcgcggctggaatgggggcggcgaggagctcctcctagccagccgcaggg

SEQ ID NO: 2578 - DNA, 201 bp, Homo sapiens
gggaggcggcaggcagggggcgctgcggggcgaggcaagtgcagtccgccgctgcctgcctgcgagtctggggctgcgcgccgctccccacctagctgcgcgacccgagcgccgcgcccaccgcgctccgtgggctcccgcgcctcgaagggtcgggatccggtctgagcctctcctggctctcggtgcaagccgctgggc

SEQ ID NO: 2579 - DNA, 201 bp, Homo sapiens
cggggcactcggccgtgccgccgccgccgccccagctgccgcctttgcccccgctcccgcgaccgctgtcagagcgcatcacccgcgaggaggtggagggcgaaagcctggacctgtgcctgcagcagctctacaaatagttaagtagctgggcttggctggtggtgggcccgcggtccccaccgcgccggcctcggacgc

SEQ ID NO: 2580 - DNA, 201 bp, Homo sapiens
aaggggggcctggctcgttagcgcaggggatccgagctgggcaggacatgtgagatagtcacagttttccagagatcacgacaagatctaaccagtcgcgcgtggtccccggcgccggagcgggccagctcagcccggcccagcccggccccgcgcagagcccccgccgcccccgcgcacagagccgggtgccccttgcgg

SEQ ID NO: 2581 - DNA, 324 bp, Homo sapiens
ggtgggggcctgggagacggtcgaagggggcccgggcagaagctccgcggccgggccggcggagggaagggggcggccgcgcccgggacccggctcccctcggctccacttacctgctccgaagagtggccccagctctgcgcctcttcctgcgaccccacacacagggacagccccaggcacagccccagcagcaggagcatggcggggcgagggcgcgggacgctcggggacccggcgggacacgctttgcagcgcccagggctccagccactgcgggacgctctcggggccgcccaccccgcggtcccagcccggaccccg

SEQ ID NO: 2582 - DNA, 201 bp, Homo sapiens
ccgcggtgctgccgcgccaagcgaaggaggaggagggctcggcgaccctggggacgaacgtcttggacgcttcgcccgcgtccttctctcgcgtccgccgcgcgcctgtctgctcggcctcttcttcgccttctctccggccgcccgggtcaaaacccaaggccaggttcttgagggtccgggtcctccagccgccccctc

SEQ ID NO: 2583 - DNA, 330 bp, Homo sapiens
ggactctggcgcccctccaggctgctgcgcgcgggctggggaccgtgcaccgctttgcgcgccagacgatgcatcttctggaacggcagctgaggcaatgcggggtgtgaagtggcggcgggcagaggggctcgcaggggctgggatccgcgtgcccctctctgcctcggtgcggagcacgatgtgcccgggcgggggcgaggacgtccgggaggggctgggctgcgcacgctcgcggggccgtcgcagatgggcggtttggaggcgctgcagtccctgggaaatgggagcctccgtcctgttctctctgctgcttggctgggctgggct

SEQ ID NO: 2584 - DNA, 293 bp, Homo sapiens
ttcagcatctcagcttttaagcctccctgagccggggctgcgttctcgttgtctccttcggccgccgcttcctggcgccagagggaccccgcggcccgcacgggcctgtcctcggctccgctcggagggtgtgcgggttcccgctccgctggccccgcttgcccaccacggcgcgcccaaacccacgcggcccgcggccccttgcgtgctctgccgaccccgggccgcaggaggggttagcctcgccggtccccacgcggggtctgcgccggcagcgccacgggctggaacgc

SEQ ID NO: 2585 - DNA, 201 bp, Homo sapiens
cgtccccgccccggtcctccgtcggcctggcgggcggcgacgtggggaggggccgctcagaagccggggtcgcccgggccggggaacttcctcgcgccgacgcccactccccacgggccgcactcgccgaggggccgaaaggggctccagtggaggacgcggtgggagctgggtcccgctctagctgccgacgccggcggt

SEQ ID NO: 2586 - DNA, 201 bp, Homo sapiens
tatcccgctaaagccggacaaagcgtggccagagtgcggcccagcctctcagcctgcggcccggggaggagggcagcgcgggcgcgggctgggggtggcgcggggcggcgctcaggatttcggtgcaggcgagagtgcggcggatttgctccaagaggagagcgaggcggatttgctccaagaggagagcgtggggcgccg

SEQ ID NO: 2587 - DNA, 226 bp, Homo sapiens
atggcgatgcctccactctcctcggcaggttttttcaattaaaaagttggaaacgggaatccgtaaacaacgacttagggcttcaaactacttgcaaagacgcgatggggaggggaatacttgcgcgcttcaaaaccccaacctcgaggtctccagccgcgcctgacccgggagccgggtgcgcccccagtgtccgcgcacgaacccggcgccctggcagccccga

SEQ ID NO: 2588 - DNA, 363 bp, Homo sapiens
ttgcaagggaccacagttacaatttactaggtaaccacacccaccgcattgcagaagccatgaacttggcgggcgtgggggggaaggggaagaagtccggcgagattagaggggaaatccgaaaaagcaagcccctgcggcagcagccaggaaacactcgccaggaactggctgcgaccccaactccagcggtccgaagccctagcctccccacccccaccgcggcagagccgccttcgcagacacctcccgaggagaatcgcggccccgagggcgccaggtgagtcgcgccgccccgagcccccgggccacggcaggccgacccaggcgcccccggcccgcccgtgctcccgcgcccgggtg

SEQ ID NO: 2589 - DNA, 201 bp, Homo sapiens
cggcccggtgggggtcccggcgagcgggagggcggttggggaccccggccgcgccgggcgcggggctcgggattcgggagaccgcgcggcgccgaagccacgcgtcagccccactgtcccgcgcgcctcgccccaggcctcgggctcttcctccgcacctcgtaaagccgagaccccctcgcagtcccccactccgagagg

SEQ ID NO: 2590 - DNA, 201 bp, Homo sapiens
ccgcgcttccccgccagccgccggccaggagctccccggcttctgagcaggacgcgccaaagggagttgggaggctcagcagcccccagcgtcgccttctcgggtgacgtgacgctctctctggagcgcgggcccgcctccgccaagcctccaccgcaggtccttacagccgagccacgggaagatgcaacgccgggcgag

SEQ ID NO: 2591 - DNA, 267 bp, Homo sapiens
cgcggggtgggggcgcgggagccgccccctgcccgccccgcgcgcatgctcccgccgcacctgcctcgctcagtgttccacaccccggggagccgggtggcgctgggcccgccgaggtcggggctttcccatgggagggaggtggctgcggcggaattttcagatgcgtccttctctgtattcgttccctgggaaggattcccccaaatcttggctacttcctgcctgccagcttgctccctggcagcgaagtcccagtagctcacc

SEQ ID NO: 2592 - DNA, 707 bp, Homo sapiens
gcggtggcgtcggcggctgcagggggacgagctagcgccgcggcgctgggagccagttgagcccggccggcgagcggaggcggcagcgcaggcagagcggcggcggcagcgggagcccgagcgctgcgcgcccaccatggccgcccagggagagcccggctacctggcggcgcagtcggaccccggctccaacagcgagcgcagcaccgactccccagtgcccggctccgaggacgacttggtcgccggggcgaccctgcacagcccggagtggagcgaggagcgcttccgcgtggacaggaagaaacttgaggccatgttacaaggtaggcatccctcgtgttctcggactctccgactgagcctctaactccttttcggacatccccaccgcgcgctccggcgcccgctactccagcctacggccggccggtttagctccaggcccgctcccccgcggagccggaggacacccagggactggagacttcgcgggactccccacccttccacgcctctcagatttccaggcgctgggggccctgtgcgaacttgactggcttcagaaaagccgaaggccgagtttgtactggcgcgcccaagttgcgttctggactttggagatgccaactttagcccggacacctgggctgtgccatccggaccactcgggccgcacagagtatgcgtgaccctccccattccct

SEQ ID NO: 2593 - DNA, 201 bp, Homo sapiens
ggacccaggaccctgtgcccgcgcccctggagccgctggagttcggacttctgcaactgttggcactttgggggcttggcttagcgctctgctgtttacccgtctctcctcgctgcctcggaaccaaagctcccggccccctccgccctcgcgcgcccacccaccgccgccggggagcggcccggcccgcactcagcacca

SEQ ID NO: 2594 - DNA, 201 bp, Homo sapiens
caggctccgcgcctgaccctccagcctgcgcagcgggcactcggccgggaagaacctctccagcaggcggctcagcactacgttcacgcgcccgcgcccgcgcccgcgcccgtggccgcgcgggccccagctccacgcagcgctcacagaccgtgagcccgcagggcagtgtcaccggcttgtgcagcagccccgggcagc

SEQ ID NO: 2595 - DNA, 201 bp, Homo sapiens
cactgggacccccacatacgagctggcacacactagtcacacacggctaattccagagggctggccctttgtcctgggacgctcccaggttttcgggccgcggtgcggagaactcaggtgggtgcccggcaagttacctaccaggggctgttcccccgcgaccctcgccataagcgcagggacccgggggccgcgctggct

SEQ ID NO: 2596 - DNA, 201 bp, Homo sapiens
gaaaactgcaaaacctgggagttatcctgcctcaccctcctgctgcctggggacaccccccgcgagcttgctcggccccgaagaaggagcagaggggacccgcaatccagcccctagagccccgccaggaaaggcgcgagagacctactggccccggcaaccctgccccggcgcccggacggagcccgatgcctgcgcagc

SEQ ID NO: 2597 - DNA, 203 bp, Homo sapiens
agcctagagtgcgccgagcaccgccccggcaggtggaggggctgcgggaaataaaataacttgggcaggaacttgattggtagcaggttcatctttggtccgcggtagggaatctaatggagatgaagaatggtggggaagggggggcggtgtctccttgggagcctaacgtacgcttctttattttgtcattctttggagat

SEQ ID NO: 2598 - DNA, 201 bp, Homo sapiens
cgcgcgtttccccgcgcgtctcccggacccgcgcctgcccacccctccggctctgctgcggtcgaggccccaagtcggttatcccgtgtccaggcaaccgcgggggcggcggcggcggcgtgaggagcgggcggctgctgctccggggcctcctggctcgagcccttagcccccgactcccggcgtttcggcgcccgatca

SEQ ID NO: 2599 - DNA, 201 bp, Homo sapiens
gggcttccagcctggcctttaggcgcggtggcggcggtgggacacgcgccaggcgcccagagaaggacatgggacaatggcccagcccgaggacgccagacgccgccgcccgacccggggaaggaagctcctgcagccggtccgggaacccgaggcggggagggaggccagctctggaggtgcgctgccgctttaaaataa

SEQ ID NO: 2600 - DNA, 208 bp, Homo sapiens
gcgccgcgccgccgcccggcctcccgaagtcgccccctgtcggcgcgtcggccgcttgcgccacggcgggcgccacttaccccgggcagagtcttctgctcgtgcagcgcgctctgggccttcagcgctgactcacgctcgcagtaggtgaggaaggcgcagcctggggaggaaagcaagcgccaagaagggtcagtggggcgccccc

SEQ ID NO: 2601 - DNA, 201 bp, Homo sapiens
gtaggggggctttatccaccaagctatgctctattagggcgccaggcgggcgaagcaaaggcagggatggcgggcggggcggcggcggaggtggaatgggcgcttttttcttccatctggctttatttatttatttagactagaaaagcgagccggcttggagggagtccgcccggggatccgagcgcgcattcatcagtg

SEQ ID NO: 2602 - DNA, 201 bp, Homo sapiens
gcgctccgcctcccgccccggcggctcccgcagccccgccgccgcccgcgcccgcgccccggagccgcgccacaaagggcccgcgcgcagccgccgccgccgccgccgcgcgaggagccaggatggtcctggtccacgtcggctatctcgtgcttccagtgtttggctctgtgcgaaacagaggtatcgctttttcctttc

SEQ ID NO: 2603 - DNA, 595 bp, Homo sapiens
aggaggccaggaaagcccaccacatgcgttggccccggctgtcgcacggcacctccatggtcaccgggatgatgagcgcatccatcttgggctcgtggaccgaggacgaggaggaagaggaggaggaagaagaagaagaggaagaggaggaggaggaggaggaggacgcgtctaggctgagatggttcgcgtggatattgctactcattctaagactgctgcctccgccgccgccgccgccgccgctgctgccgccgccgccgccgccaccatttgccatagctagcaacgggcagccggcgcaggggctcgggggagctcctcccgccgccagcgccaccccaaacacccatcaacagccatattgctgctactgctgccgccgccgccgccgccgcggagcgcgggaggggggcggggaggcgcctgggctcggggcgctgtgcgcgacctggcggggtgcgccgagatatatacagcgagccgccgccgcccgcccgggggggagggggatggagtgcgcgggcagctccccctccccggcccgcgccccgctcgccccgggctgcgctggccccgagcgccgagagccagg

SEQ ID NO: 2604 - DNA, 201 bp, Homo sapiens
caccgccggcgccgaggcggcgttcatgtctaaccgccgccgccaccgccgccgcctgctcctgcgcccgctcccgcgcctgctgcctccccgccgccgccgccgccgccgccactacagatccgcagacacacagccaagatccctgactcttaacaccaactctcttctccggggaggggaggggacggagggaagggg

SEQ ID NO: 2605 - DNA, 269 bp, Homo sapiens
ggtgtgatgtttccggtggataatgtctcccgttccctgccccggggcccagacagttggtgcttaagcgtctacaatgtagagtttcctgcattttcctcgggccgccatttgtctacttgtcccatccaggacatctccctaaataatctctaagtggaaaaatcacggtcctctaggagatttatccgggaacgaacgtgcgtggggcagttcaaattcctgagctcagatttcgtttcccgcggtcagatggtgcggtcggtggg

SEQ ID NO: 2606 - DNA, 201 bp, Homo sapiens
tcagcttgtcaccgcacggcggccgggaccgcagcccctgggtgcgcagtgcgcctctcgctgcgccctcctagagcgcgggtcccgtgcctgtgcccggcgcgacgcgatctccctgctagtcgggctccgcgtgctccccgcgcttcccgcagcctccgcgcagcccgcagcgccctccagccccgcctcgcggccgcg

SEQ ID NO: 2607 - DNA, 267 bp, Homo sapiens
gcaggagccccggcggcctgcaggggcggtggcgcggcgctgggcgcgcggccgctagatggcagcgcagccccggcccggcccgcgggaggcggccacgcgcgggggacgcggggcgcggcgcgctgagcgcgggtgccgaggctggagggcgcggccgggctcccgagtcctccctccgcggcatccttgtctccaccctcaaatgtcctgcaagccaggagcctccgtaggaaccgctgcatttttattttcctctaaatttca

SEQ ID NO: 2608 - DNA, 287 bp, Homo sapiens
ggcggtgtgcagagtggggcctgggcctcctgcccccaagggcagctgggtgggctccgtgctccctccgagtggacttggccccggctccaaacccagccgagggtcggctcgctcctggggacccgcggatgtcgcgagggggcgccgcgccactgaaggctgggacgggggcggtgcgcggggcggcgccggagtccgggatgccggctccagagacgccgcgctccgccccgaggaggccgccggccgggtaagcggagcccggagctcgcggagtctggacc

SEQ ID NO: 2609 - DNA, 201 bp, Homo sapiens
ggcctgccccgagcgcggcgggggcgccgggggcgccggcctccactttgcagggcaccggcggcgggaggaggggccggcgcccacgggttctcgccctcgcggcgccgcggaccaggagctggaactgctgcgggagtgcctgggagccgccgtgcctgcccggctgcgcaaggtggcctccgcgctggtgccaggtcg

SEQ ID NO: 2610 - DNA, 201 bp, Homo sapiens
gcgcctgctcgcgctctgcccaggtggccccggcggcctcggcgatcccctgcgagcgctgctgctcctgaaggcgctgcagggcctgcgcgtggagtggcgcgggcgggatccgcgcgggccgggtcgggcacagcgcagcgcgggggccaccgccgccgacgggccgtgcgcgctgcgcgagctcagcgtagacctccg

SEQ ID NO: 2611 - DNA, 286 bp, Homo sapiens
ctcagggggcgcccccgagccgcgccccgcgcccgcccccaggagggcctccgcgagccggctgcacaccccgaggcggtcccggctgcacaacttggagcgagttgctccgtttcctcattttgggggcgaagaagggtcggggagtgggggaaagcgggaggcgccgcggcctgggaggcccccgcgggtcctagcgccggccgcactgcggtctcctccgcgcgccgccgccgccgccggcccctccccgccccgcctccgcggcccccggcgcctcccgcgc

SEQ ID NO: 2612 - DNA, 244 bp, Homo sapiens
tagtagaccctggcgtggggcacctgagatctccgccactgaaaaggcgctatagaaatgcaaggaattatgattttaataaaattgtctcatttaggagcgagcttctgcgctgcctctgtcgtcggagcccgggtttgccacggcaaagtctgtaatcagagaaaaataccagctttgttgagggttagaatatatcattggctaatgtgtgtggttttctttttaaataatgctaagcatt

SEQ ID NO: 2613 - DNA, 201 bp, Homo sapiens
gtgggccggggatctcgctgctctgccttcctagcgggaaactgactgcctgagctctggaggacaaacagagacactggggggtcaacgggggcggccgcgggcggggctccaggcctccacccaccgggttgctgagcgcgcacgcagccacccgagggaagatccccgccgcccggggtctcggagaggggttagaac

SEQ ID NO: 2614 - DNA, 372 bp, Homo sapiens
gtggcattagcgaatgtggtggactccggcaggcctggggcaggggaatctccggtaacatccctcagtaccgaaggcaggatttcccggccacttccgtcggttggaattctcttaagcattgccctgagtctattttcaaatgaaagggggaaaaacccaaaccagattagaatctgaaacagctgaaacagctatcgatttccagcttgctttcaagtctggcagagactgtgaaagtcctaacttctccgcgatgtcagccacggcccgcggcggtcacggagccacttcagcacctcgcgatggacagtgacccccggcgtggcgcgagttccctgcggtccccacgcgggcctgggcggcgggtcc

SEQ ID NO: 2615 - DNA, 201 bp, Homo sapiens
agtcagctccacaatctgcgaccgacttctccttgcccagttcggcctcagtccccttcagccataagatggcaacagcgccgacagccgggccccgcggcgtcctgtctcttccctgccctggcctggagccctctctgggcagctctgcacccacagcgctgcgtctctcccagattgtgcagggagcacgggagggtt

SEQ ID NO: 2616 - DNA, 247 bp, Homo sapiens
gcttccggggggtcctggcgtcttagctgtggatcccccaatacccgcaggtcacagagccacagaggctggacctctagcagcagaggacacagaagaacgaagacgagacgcagagctccaactgcagccagagacaaaggccccgccacatcccggaagccgccctgtcctctcctgccccgtgcctgattggacggtttccagcccagcgtccctgattggataacttctaaggtcctgcccc

SEQ ID NO: 2617 - DNA, 201 bp, Homo sapiens
gatttggcgcggcctttgtttctcgctgccgccgaagctccaattttcgtctgtctgctttgtgtcctctgcacgtagaagcccagcctgtgtggccctgcgacctgcgggtattgggagatccacagctaagacgccagggccccctggaagcctagaaatggtgagagtgccggtccgacatcccgagagagggaacgg

SEQ ID NO: 2618 - DNA, 201 bp, Homo sapiens
ggcgtcttagctgtggatctcccaatgcttgcaggtcagagggccacagaggctgggcctctaagagcaggggacacaaagcagggaagacgagaccaagcgctccagctgcagcgagagacaaaggccccgccaaatcccggaagccgccctgtccgctccagttgcgtgcctgattggacggtccccagctcagggtcc

SEQ ID NO: 2619 - DNA, 235 bp, Homo sapiens
cttggtcggactgcgcgcttagggcctctcgcgcctgccagcctccgctctgcgggcattcctcctagcaccgggagcgcgcggctgctcgccctcgccgcgaccgtggcgccagcttcccgccccctctgccccgccctgagcatctgctctgcgccctccgctgcaaccctttatcctccgcctggattgcgggtctgggtgcggggtgttgcaggcttgcaggggacggggt

SEQ ID NO: 2620 - DNA, 201 bp, Homo sapiens
atcccgcgcctcccagtccggagtccatttgcataattggattttttttttttgcctccttctttctccctgaaacttgtttgaaaacccaagtgaaaaccgcgacgatctgcacactcaaaagcaagtgccaagtaagtgccctgcggtggcctcggcgcgccccggggtgagcgcgcaaagccgggagcgaggtgccgc

SEQ ID NO: 2621 - DNA, 201 bp, Homo sapiens
gggcgcggctctgggagcgggggaaggtgaggggaaatgggacatgatggcattaataatcgttaccaaagacggtgggagtaacaaaggaatgcgtctccgagacgccgcccagccccggggtgttttctggcgcggtcgcggtgcaggaacgcgagccccgccgccgagcctcccgccgcctgcgttcgttggcgcggc

SEQ ID NO: 2622 - DNA, 201 bp, Homo sapiens
gcccgggcgcgccggctggggctctggcgctctcgcaggccccgaggccgacagtcccggcgagggcgggcgccccgcgctccagcaccggctgcctgagcgctcctggagcagcaaaccccagacttcttcctccttctctccttccttccttccccctccccttatctttttctttttttagtctctttctccctcttt

SEQ ID NO: 2623 - DNA, 201 bp, Homo sapiens
tttgtttcaaaagttcacagcatgctttcttttcttttagaccgggagacagtgatctcacccacacggtaagatcaaaagtctccgctcgcccagcctgcgggcttgggctgggtccagacgtctcccaggatgcagatgcgccgccgctggcctccccggctataaagccgcctccagcgcctttccgcgcgcaggagc

SEQ ID NO: 2624 - DNA, 201 bp, Homo sapiens
gggcgaagcgacccagcgcgaggaccagtccccaaccaacccgctcctagttctgggcgccttccccagcagtcagatgggggcttcagaggccggtgcgcggccacatggccccgggccaggcagggggtcgtggggacgcatctgcgctaggcgcacagtattcctgggcgcgggacgggcgaagcgccgtgggttcca

SEQ ID NO: 2625 - DNA, 296 bp, Homo sapiens
tgcctccatctcccaccggggtccggctggccagaggcaagcttcgagaccccccaccaaccaccaccaccgttgcgagggccggtgaggctgcagataacgcttgcaaggacgggagtcggggagggtgtagggcgagtttaaaggacgggcagagcaagccccgggaagaggcaggggttttccctcccgggtcgccgccccccgcaccctcggagccagccgcagccacgcagcgccgcctgccgggcacaccaaggacctggcgcgcacgtggcgcttacccccacccccgg

SEQ ID NO: 2626 - DNA, 201 bp, Homo sapiens
agcccacgggccagcctggcggggtccgacggcggcggcggtggcggcagcgcccgatccagcggcatcagcctgggctacgaccagcgccacggcagcccgcgctccggtcgctcggacccgcgtcccggtcccgggccgccttcggtgggcagcgcccgctccagcgtttccagcctcggctcccggggctcggccggc

SEQ ID NO: 2627 - DNA, 201 bp, Homo sapiens
atccattggctgaaagctccgtctattttagggtgactgagagcgtctcttccttctgtgttgcctggaaacggactgttcgcctagtaacatctgatcacgtttcccattggtcaccgtttccggaagcccgctctcccgtttccggaatccccgcaggcgctgggtctgcagatggcgtccaggtacacagtggcgagt

SEQ ID NO: 2628 - DNA, 266 bp, Homo sapiens
gaaagataaaagggaaagcgcctccacgaaatccgcttacggacacgatcccggggccacactcagccagacgaatgtctggcaaatgacagtcacttcacgccagactctcacagtccttcacacgccactcccactgcctcagggaaccacaagcacaggcatcgccccgcccggcgtcctcctccaaagattggggcaccaggaccgcgggcccccactcccacccagcacaaagagtccggcgctcagagctagcggtttcc

SEQ ID NO: 2629 - DNA, 201 bp, Homo sapiens
tcgcaggccatctgtgtgactccggtgcgagtggaggttggtaccgttcagtgcgaggctgtcaccccgtgtgcctgtccacgtcctgtgtgactgggtgcgaggaagtcaatggcaccgtggaatgtgaggctgtgagttgaggcgggagcgggcgactgttcgctgcaccttgttgggccgatacccgcggcttctttg

SEQ ID NO: 2630 - DNA, 228 bp, Homo sapiens
cagagttcaggacaccccaggcttttcttgactcgattggaacccaccctccacgcttccctggccccaactaaccgccacctgcatgcacaaatggaaacgacagggcagagggtcagcagtcacccgcgtctgggttcgcagctccgggtacgctgtagttccgcacccggttgcccacgcccgggaccacccactgtgtcttttcggaactgtccagcgtgtcct

SEQ ID NO: 2631 - DNA, 248 bp, Homo sapiens
agaccccagacacccaccccaaatctaggtcccagcgttttgcaggggaccttcatcctggggcgttcacctctgacttccctcttgggccttttcgctacggccgagcctaagtggctgaagcgcggacgaggatgcgcggggcctcggtctccaactgcaccacaggccgcacccacgaacctggtccggcacagttactaccgcccgggcctccaggcctcagggctgcagaagctcagtcccgg

SEQ ID NO: 2632 - DNA, 387 bp, Homo sapiens
gaggcggccaccgcagcggccgccaacgagcagctgcacggaggtgcagaagaaggaggccactgccattctcctgacaagctgggggcgtgggaggcctcgggagctcgaagtcgcctcgagcgggggtgggcggtgagcggacccccgggtgttgaccaggtgtttggtggtagagcagggaaggggggaacggacgtcgaccctagggatccctcacccgctcacgctccttggcgttggccacacgccgccgctccagcaccaactggaggttttcagtggacgagtagccgcccgagggcagccgcttgagccggcagacagcggccagctggggcagcggcccgaactgctcccgcaacacgtcctccagcacctcggctt

SEQ ID NO: 2633 - DNA, 203 bp, Homo sapiens
cgctgcttccctgtgcgccaccgggggtctgccctgggcttgcccgacatcgtggctgcccgcctacctgagcgtaggtttttaccctgtgccagggccgcgcgtggctcccgtctgcggcctgctgggcttcggcgtcacaggtactgcggtcccggcgcccgcacgcgggggactgggcgggggctggagagcctaggtcg

SEQ ID NO: 2634 - DNA, 203 bp, Homo sapiens
gctgcgctccgctgctcagcccgggcggcccaccgtcccccttgcttgggtggacgcacccttgccctccgcctttattggcggcagcccccgtggggcgcgcgtggggggcgctggggtccccagctcccgcctcgagccccctgccgcggcgctgtcagtcccgggggcctgggcctcacctcgccttggtcttgttcgca

SEQ ID NO: 2635 - DNA, 312 bp, Homo sapiens
gccgggggggcgcccggggcggcggcggtggcggcgggcgggggcaggccgggctgcgaatacactccgaagttgtcgccgcagtagagggccatgtcggcggccgtgggcggctgcggcgcggccgcggcgaggggcgagcggggctggtctcgccgctcgggcgagagcatccctttgggggccaaccctgcggctccgccttcacccgcgctgggcgcccggtgctccgggccggggtcgggcgggtgctagcggagcgcctgctagccggcctcttataaccgagcccggcgcggctcctcctgggcc

SEQ ID NO: 2636 - DNA, 407 bp, Homo sapiens
cttcgggaggcccaggggcacggcgaggggtcggggaaaggcgatcgcccactacagcccgcgcgcctagactgagggaggagccgggctgcagaaccggcggcggatggagacgggagggaggctgcgaggtcgctcgaggagagactaaggctctagaaacggagaagcgggcgctctgcgggaggcggcggcgctgccgctggccgtcaagggcgggaagtgttctgggactctcattaggggccgcgagcctcgagcgtcaaattcccgcggcgtccgcctagcgcgctgctgtggcgggcgcggagggcgcgcgccggcagtgggggctgcggcggcggagggcacgggcccccgctcagcgtcctcaccttcttggtgcagctgcctcccgcgagccgaga

SEQ ID NO: 2637 - DNA, 295 bp, Homo sapiens
gcgcccgccccgcgcgcccctgtactccccgcgccgctcctcggggtcccgcggcgctcgcaggccgcgccgccctgccgcccctctctcgtggcttttacggcccgcccgcccctcagcagccctggggtgcccggggcggccctgcaagcgggagagagcggcgaggcggcggcgccgagtgcggggggatgcggagccgtgcccggccctgtcgcatccctcggccgcccgcccgcgcccggccccgcccggccttgcccgggctgcacgcacttctcccgcggcccagaat

SEQ ID NO: 2638 - DNA, 435 bp, Homo sapiens
cctggcccggcctggccagtccccgcggtctctgcccgggctgacgcccaggaatgtggtcgacgagaagccccaacagcacggcgtggcctctcagcctcggtgagtacccgccgtggggaagggtcctggggacccactggaggccgcggcccgcagcagccaggggccgagccacggccacggacgccctggtgtcccggtccgtgccgggcctccaggcggaggaggcgtccgctgggctcagatccccgactccagccccggttccccggcgcctgggctgcgcggagtccctgtcccgcgtcccggacccctacgcgcagcctccacgcgctccgagctggagaagccgccagcccgccctcccagggcgtgtcgcccgctttctgtttctttgtgcggggcatgtgaaatgtgtggggccagaattgt

SEQ ID NO: 2639 - DNA, 410 bp, Homo sapiens
cccttggagggaagcccgccgggaagctgaagacagtggtcaccgccctcggtcattacttcccgggacccggaccctaaccctgcgccacatctccacccgcccccagccgtgtcctggctgcgcagctggaaaggttgagcagctcactgctgtccctctgttcggccttggacacatcgcctgaactcctgggcgcctctgctgttaagtgggggacagcactatttactggggaggaaaactccaggaatgtggaccctggggccacgcaggggttgggaagtgaagggcagggaacgcgggcggcgcccggggtctgcgggtaggcaggcggcctggccgcggaggcttccccgagtcctgcgccttcctagagagggaggggctcatatcggctggcacagcca

SEQ ID NO: 2640 - DNA, 392 bp, Homo sapiens
ggagcccgctgggcgcgcccggcccggcccggccccgccgcacgcccgcccccctggcctggccgaggaccccggggtttggacgtgccaacgccactctcgcgcgccgaagctgtgacggtttactaagcagagacttgcgaggcacacagagagggaatgaggcggaaccgttcgggggctcgttgacactgcagagcctcccgcagcatcgctgccttaaatcccgcctttccaggcgtgcgcgcacagcgagccagaggaggctccgtcccgacctggggtcccccgcggtcctcagcccgggggctcgggtccccgaagagatccttggcaatggcagaggtcccaaagcctagatgccaagccccgcgatggggcggatgcttcca

SEQ ID NO: 2641 - DNA, 203 bp, Homo sapiens
agagaagacgccaggctgaggtcccagcgacctcaggcaccagctccgaaggagggcggggagaccgcaaaggggaagtgcccggagggccaacggcccccgcgcaccctgcgcccctctgaagcgcgccgcctccccgcgccggggactgggacctgcctctggggaatccgcctagaagacggcggcggactggggtcggg

SEQ ID NO: 2642 - DNA, 398 bp, Homo sapiens
aaaactgcgggagcccatctactgcgctcaggtggccagctcttgagccttccctatccgtggctccttgccggcatgcaggcatgcacaagcataccgccgagcaggaggatctaacgaatccagcttgtggacatgccctaatttccatttccgcctcctccaggtctgttcaggtgaggatgatgggagggaaaagcggtgtacagccgtaacattggcaccctgcaagagccgccggggcactgacacagagggacaccgcattggagatgcggtgtctacggagatttattgcgcgcggtgaaacactctaagcaccgcgcggaacaactgggttcagctccctcatcccggaccttccccaggaccacacgtcaccctttatccccgaaccc

SEQ ID NO: 2643 - DNA, 286 bp, Homo sapiens
tgcagagcttgaaccccaccgtccagaaggaaaggtgagtgggggacccgggcgggaggtgaggcctgccggcagcggccctcaggcgtgctgggcagcacggctagcagaggcggcgcctggtcttggatgctgcagcggagacgccaaggagactgaatgcagggagcgaggcgtagcggccgcggagggtggggccgcccggaaatccaggcggcgccagccttgtagcatctgcaggccgggggcgcgcacacgaggggcacgtgggtgtggaggaaccggc

SEQ ID NO: 2644 - DNA, 267 bp, Homo sapiens
ggctgccaaggaggcggggtggccagcgcggggggtggaggatgggggcaggacgcgggagggaagggcagggggtggggggcgaggccccggggaccagcgcgcgagagtgcccagctgggaaatgcagctccgaattaacatcgtatgtttcataatcagtttacgagccgatgtggggaaagccacttccagatggggaagagcagcccggatttccttaaggacgttcttcagccagactagggaggggagaaggagatgggg

SEQ ID NO: 2645 - DNA, 260 bp, Homo sapiens
cagagccgtctgcatctgcccgcatcctttgggaggctgcgatgatcgcagccagggtggccgagcgcccggcccactgcacccggcggctgttttgcagcgcccctggcattcagggaatggtttgcaaatctcaatgcaccacagactagttttcaccgtggagcaggaaaggcgcctattagccaggggcaaccggctttgcagacctgggcgggggcgtagggggaggggcggtggtgcaaacctatcgtgatttc

SEQ ID NO: 2646 - DNA, 239 bp, Homo sapiens
gaaggcaagctccaaacccctgcctggaagacgggctgtcgcggctgcaccaccagcaggaggaggaggagaagaaactatttcgcgataccccattctgcgggtgctttgccgctgccgcttctgctgccgccgatccgagtccgcgggttcgaacaccgcagcggtggggacggtgggtccggcgggcgccgggaggaggacaccagcggagccctgcactctcgtgccccgctcac

SEQ ID NO: 2647 - DNA, 846 bp, Homo sapiens
gctggcgggctctggcccccgaggacgcagacatgtggcttgaacctccgctcccctagccgttgcctctgtgcatctttctgggcgcccccagcgaatgcgagcggcgaggcgagggcgagcgcgccgaggaagggcgggagaggcgcggagcttggccgcgccgcgctgcgccgagcgccgggctctccccgcgagctccccgggcccgcgcgcgcgccccccactgcccccgccccccgcgcggcgcgtgccccccaccccccgccgcgcgccctcgcacccgcccggctccacgcggcgcgcgcctgccctggcggcagcggcggcggcggcggcgcgtcctcccccgaacgccgtctccagggctgctggctgcgctctccattgttccgcggctgctgcccggggtgggcggcgaggcgggggggaggtgtcggcttggccgccggggagggcttaccgctcgggcggaccctcactgcgagagcgatgcgggcccaggcgcggcgcgcgggggctgcagggcgcctagcactgggggttgccggcgcgcgggggcctcctcctggctcccaggcactcgctgctgctgggcgcccctcgcatcctcggttactatggatatctcgctcctccgccgccccctccgcgcactccgggaggccgccggggcggtagcagcggcgcggctccgcgggtgcccaggtgaccggctcggcagcggcagagcagtggcagcagccgccactgccgctgttactgcggtcgccgccgctggagagaggaggacgaggagggcaaggggcagaagcaggtcctgctctgtctgccccagaggccacc

SEQ ID NO: 2648 - DNA, 526 bp, Homo sapiens
tgctgcttcctcccggcgctttgcttttctacaactggaagccgcgaaggcggctactgcgctgagccgctcgctctgctggtcaagtttgggcgacccgcgcggaggagggtcgggctgactgccgccgctgagctgtccccggacgggagcgcctgtccacggcactcaccccctccagcggtggaaatgtggagaagtaagtgggaggcggtgtcgggaactgactcctcttaaaacggtcggcgccgctgctctgaaatgggcggctaagtgcttgtgggactaagggcggcctcagagatgcccggaaaatcgctgccacggccagagtgcggcgcagacgcggcagagttggaggtgtccgcggtgcaggctgctgcccacgccgctcaggccaggtgctgagggctcagcccgcgcctcggccgaaccactctcagccccgttgagccacctcgtccgcccggctttcatcgcaccggccagaggaaagttcccgcggcccccacgcctcttcacagct

SEQ ID NO: 2649 - DNA, 201 bp, Homo sapiens
gccccgcccggggacctagggaggagggagagaggagggagggagtgggcagcctgggcgcacgccaccggtccccgtacgcccggcaccccccgtggcgcggcgagtcaatgggatttgcacactcgaggtgtaacagcattactgcattaattaccatttccatttcacgtccagattgtttacttatctgcgggaaac

SEQ ID NO: 2650 - DNA, 523 bp, Homo sapiens
tgctctgcacgcgtgtgtacggcccgtacgaggcggccgggcccgccagccccttgaccacagcggccgcgccagggctaccggggcccgcggctgcagccgcagctgctgcagccgctgcggctgccgccatctggcaggaggcatagggcatgggtgagggaggctgcggtagcggccacgagttgttgaggaagccagactgcaggtacttggggggcgccaggtagccgtagccgtcggccccggcgcccgccacgccgcacccgcctgcggcgcctccggccccgaagagccccttgccgggctggaagtgcgcgggcggcggccggaagggcctcttcatgcggcggcggcgccggtagttgcccttctcgaacatgtcttcgcaggccgggtccagcgtccagtagttgcccttgcgctcgccgccgccctcgcgcggcaccttgatgaagcactcgttgaggctgaggttgtggcggatgctattttgccagcccttcttattcttctcgtagaa

SEQ ID NO: 2651 - DNA, 276 bp, Homo sapiens
gccacctccctccctccgtgacgtcacgggccgtcccggggtgagcgcctgagccgctccgggtccgcgccagtgagcgcggctgctgccggcgagctagcggcgcagcggcgggaacccgaggccgagcgccgcggcggcagcgctagaagcgcacccatcgggcacggcgaggcggcccacggtgcggcaggcaccgggaggcgagagccggcgcggacagtaggcggcggctgcagctcgttggcggctgctgcgaggatgctgcctgggcgg

SEQ ID NO: 2652 - DNA, 357 bp, Homo sapiens
aggagggaggcagggcaggcttgagggtgaaagcggcaaggacctaggctcaagctggatttgcccaccctcccttgccgcagcttctttggcctctgtgcgccctggattcccgaagtcagttccctgcgcagcggaccagagaggtccacccgcggacgtcaactcaacccctgggcggggtccgggggctgagcagaaggcgaggtctggggagtacggacaactttgagggctgtctgtgccggggtgggagcgcagtgggtgagtttcgagctctggcccagggacggctagagcagggcgctggcgcgccgtggggacaagcaggtgtctgctcctgcctgggggaaggat

SEQ ID NO: 2653 - DNA, 278 bp, Homo sapiens
ccgggcgctgggcagcccccgccggccgccgtcggagcctttgtgcccacgccgggggcgtcgctgcaggtttaggagaagacccgtgcctccgagcagccgctcctaaaaattaaataaatcaataagagaatcaattaataggcagcgctgcgaccgccaggagcgcggagcgcgcgaggctcagcggcttcctcgccaagcccctgctaccggcgcgcggccgcccgcgctgcggcagcggcggcggcgcggctgactgcggcggcagcgcggca

SEQ ID NO: 2654 - DNA, 336 bp, Homo sapiens
gctccgcatgtggggcacaatgaaacaagagcagccccggccagaggtccagtaaagcggaaagacggtcccgcccgcacacccctccggaaaactgaagcgtctcctctgacccccaaggtcagaaagatttattacttccttcgagagggcgcagccacagacccactagagagggcgggcagggtgtcggaagccagagaacggcgctccgcgtcctcccaccgctccagggcgcagaggtgtcctcagtgcccggagaggttggcagtgtcggccccgagggaagcgtggagcggacggccgacaggggatttctgcccaaacttcatcacc

SEQ ID NO: 2655 - DNA, 311 bp, Homo sapiens
cgcgtgccctgctcccgcagtggccccggcgcccaggacgccgctggcccgcgtcccctctcggaatgaaggtgttccgtaggaaggcgctggtgttgtgcgcgggctatgcactgctgctggtgctcactatgctcaacctcctggactacaagtggcacaaggagccgctgcagcagtgcaaccccgatgggccgctgggtgccgcagcgggggcagccggaggcagctgggggcgcccagggccgcctccggccgggccgccccgtgctcatgcccgtttggacctccgcactccttaccgccctccc

SEQ ID NO: 2656 - DNA, 201 bp, Homo sapiens
cacaggtaacagagacaaggttaggaggcaaagcacatttatgtgcaaatgagacgcgctagggaacttgtaatcctctgcacccccgcccttgatgtctcgatccctacaatcacagaattctaggcagaggccgccgacttctccgccctcgccaagagggacccggagcaccgaagcttcccagccggtgccggcgtt

SEQ ID NO: 2657 - DNA, 201 bp, Homo sapiens
aaacgttcctttagaaaacaagccaccaaccgcacgagagaaggagaggaaggcagcaatttaactccctgcggcccgcggttctgaagattaggaggtccgtcccagcagggtgaggtctacagaatgcatcgcgccggctgcggctttccaggggccggccacccgagttctggaattccgagaggcgcgaagtgggag

SEQ ID NO: 2658 - DNA, 481 bp, Homo sapiens
cgcgactgcacttggggcagccccgccgcgtcccagccgcctcccggcaggaagcgtaggtgtgtgagccgacccggagcgagccgcgccctcgggccagcgtgggcagggcgccgcagcctgcgcagccccgaggaccccgcgtcgctctcccgagccagggttctcaggagcgggccgcgcaggagacgttagagggggttgttagcggctgttgggagaacgggtcacggaaacagtcccttccaaagccggggccatcgtggggtgggcgagtccgccctcccaggccgggggcgcggaccagaggggacgtgtgcagacggccgcggtcagccccacctcgcccgggcggagacgcacagctggagctggagggccgtcgcccgttgggccctcaggggcctgaacgcccaggggtcgcggcgagtccacccggagcgagtcaggtgagcaggtcgccatggcgatgcggccccgg

SEQ ID NO: 2659 - DNA, 280 bp, Homo sapiens
taggcctcctggggctacctcgcgaggcagccgagggcgcaacccgggcgcttggggccggaggcggaatcaggggccggggccaggaggcaggtgcaggcggctgccaactcgcccaacttgctgcgcgggtggccgctcagagccgcgggcttgcggggcgccccccgccgccgcgccgccgcctccccaggcccgggagggggcgctcagggtggagtcccattcatgggctgaggctctgggcgcgcggagccgccgccgcccctccggctggctc

SEQ ID NO: 2660 - DNA, 252 bp, Homo sapiens
cggagtctcagctacgaatcatccaatacccgcaggtcacagagcgacggaggctgaggctgtgaccgaatcaccgacgcctccctgaggggtgaaagcacggccgtggagaccctaaccgagctcacgctggcgcaaaaggcaaaagccgcgccagatcccggatgccgccccctcctctccggctgcgcgcctgattgggcagttctcaatccagcgctctgattggataagataccaagctccccacgc

SEQ ID NO: 2661 - DNA, 239 bp, Homo sapiens
ttacctgcgtgctgctctcgggccccgccccgctccgccccggagggatcctcaggccgggcccagacctaggagccacctggggatcccggggtggctgcgcgccgagggggcgccagcggggacgtgagctggcgccgagacagcctcggccccccagcgccagggccactgccaggagacccccggccagcacccacgtggggcgcccccgggagcccgaggggtccatcgcctgt

SEQ ID NO: 2662 - DNA, 405 bp, Homo sapiens
aagtctgcggagcgggccgcgcccctggcccgcccgggctccaagtcccgcgtcgccgccctggcggggacggtgcagcaggcggcgggatgcggcggggcggcagcctgagcgccccggatggcccgcggcggggcggcctgcaagagcgacgcgcggctgctgctggggcgggacgcgctgcggccggcgcccgccctgctggcccccgccgtgctgctgggcgccgcgctcggcctcggcctcggcctttggcttggctgccgcgcgggccgccagcgcacgcgacaccaggtgggtcggccgagcagacagcggcggggcggggagcgcggggcgcgtggcttctgggtcctgcgggcccggagccccggctctgcgactccttgagcctggttgggaact

SEQ ID NO: 2663 - DNA, 237 bp, Homo sapiens
cgcgcacggtggtgtaggagccccggtagcccagcgtgaggaagcccgagcgcttgtcctgcgcgccgccgccgccgccaccaccgtgcgctcccgggcccgagggcacggcggccgccgccccgcgcagcagcagcgcgtcgctgctaccctgcgagacgttgtcctccaggtcgctctggcagccctcgtcgttgagagagttctgcttggtgaccttgggcgacagcagcttga

SEQ ID NO: 2664 - DNA, 204 bp, Homo sapiens
cgaccggggcggccccgctcagggttcggggcagcggcggcgtcggcggcgcccgagctccatcggaggagagacgcgcgagagaggagctccgccggtgcggcggcggcaatggagaggcaagaaggagctgctgctcctttggggcgagggcggggaagtgtgagagagacttgcgagaggctctagggctgctgctcggct

SEQ ID NO: 2665 - DNA, 224 bp, Homo sapiens
aggactccccactggggctgagcccctcccgccctcaacagaacctctaaacacaagtagcctttccctgcctccaggagctcacgaaacgctgccacaccgagcgaatgcaacgcgtacacacgtccacactcgaacagcacaagcaagagaccggctgggtgtggaatagaggcgcacatcgcgcaacgcattcacagcatgcacacgcgcgcaccccgacc

SEQ ID NO: 2666 - DNA, 278 bp, Homo sapiens
gtctcccatccggcgttctccaggatttccaaagacgcccgtttagatccacaggtacttacctgagtccctctgcttctccacaactccgactcctccccgcctctctctttttttaaaaaaaaaatttaaacaattcccaaataatatttaataggaaagaagaaggaaaaggagcgcacaggaagggcggaggcggcacccgggggggactgtccccagaggaggccgctgtgagccggcgacgcgaggctgggggagtgggaggcaaacccgct

SEQ ID NO: 2667 - DNA, 232 bp, Homo sapiens
ggtggggtaaaaagcaagacgaaacccacccagacagctcttccgactcccagaggaccgacacctctttcgagggccccaacagtggccgctcagggtccgagggcaacggccgaggcgccacgcggggccgcggctcgccctggccacggaggaccggacctgttgcgcctctgtgagtttgccttatttctacctactcggtgtctttcggcacgccgacctgtttccc

SEQ ID NO: 2668 - DNA, 331 bp, Homo sapiens
aacgcgttccggatcttatccctgtacgtgcagttgcccttggggatgagggctatccagttcttgccgcgggtcggggcggcgaacttggtgttggggtcgcaggccaggcggtcgtgggccgagctggccatgaccacctccccgcgggcgtcctgcttgggcgagtgctctccgtagcgcccgcactccgtcttctccgtgtgcagctccgcgccgccgccgcccgccgccccggccccggggtccggcgcgggctcggcgtaggtgatgttcacgaaggcggtgtaccattcctccttctcggccacggtaaagtccaggcagagca

SEQ ID NO: 2669 - DNA, 231 bp, Homo sapiens
gcggccatggtggccccgggaacgggtccggggagggagggcgcgggaggacggcgagccgggggcaccggaggggaaggcggcggcgcagaccgtggctcgccctcggggcagaggagggggtgccaggcgggactggggagaggggaaggggggctcagtcctgaccgggacccatcgccctctccgcggggcgcggggccaggcgcgcagatgcgcccagggcgcagc

SEQ ID NO: 2670 - DNA, 201 bp, Homo sapiens
ctcgcagtggtttctcctgcagctcccctgggctccgcggccagtagtgcagcccgtggagccgcggctttgcccgtctcctctgggtggccccagtgcgcgggctgacactcattcagccggggaaggtgaggcgagtagaggctggtgcggaacttgccgcccccagcagcgccggcgggctaagcccagggccgggca

SEQ ID NO: 2671 - DNA, 201 bp, Homo sapiens
agcccaggagcccggggcgcccgcggcgggcatgaggcggcgccggcggctgcagcaagaggacggcatctccttcgagtaccaccgctaccccgagctgcgcgaggcgctcgtgtccgtgtggctgcagtgcaccgccatcagcaggatttacacggtggggcgcagcttcgagggccgggagctcctggtcatcgagct

SEQ ID NO: 2672 - DNA, 219 bp, Homo sapiens
cggttggcggtgcctcggcgcttcaccgggcgcggcccccccaggcccgggggcccggcgcccggcggcacccccccgtaatgggagtggtccaggccggcggcgccgctggcatactcggggctgtaggacagggccatgctgtagtcggggggcgacatctcggggtggccgatgagccagccatggaagtaggggttctcctcatggctgcagcgg

SEQ ID NO: 2673 - DNA, 284 bp, Homo sapiens
gcgggaggagggcggcggggcggctggcggcggcggggcccgggagcgccgcggcgcaggatcctccagagcgcgccgggctgagcggcggcggcggcggcggcgggcgcaggggcagggcatgactgacgcgccctctgcctgcgcttatgtgagagaaagcggccgagggagggagcgtgccgagcccgggctgccctcccctctcactctccctcggaagccgtctccctggagctccccgtttccctcgcctcctccccggcggccccacctcccccggc

SEQ ID NO: 2674 - DNA, 429 bp, Homo sapiens
tctctccccgggtcgcgacactgactcgtcaacgttaatgggggtccgcgactgctgcggggacgagggcgcagagcagcccccgccacgggccggtccacgcaggggccgagaaagtggcggagaggcggtggccgaggcccaggggcgagcgcgggctgagctggtccctgctgcgttcacgagcgacacccaccccttcgctgcggacgccccgcgggcgccaggctgggggccctgcgaccgacccctcccgcccccgaggtaccgccgggcccgcctggcaggcagcgcgtcccgcgagctggagggccgagtttcgcggggccgtggggcgtgtgggtgaaggcgacacctcggatgcgggacgcatgaatggtggcagagcaggggtcgggatccgttcatgggttgggagagagatgcttt

SEQ ID NO: 2675 - DNA, 283 bp, Homo sapiens
ctcgtcactattgtttaatcgagaatcagcaacgcctcccgccggtttccaccctacgccggaatggactttcagaacccactgcggccgcaagacagcccgcaagagctggtcaaaatgccctcaggtgcgtgggggcttcggggccttagttggagcccgacaccctgagactggcggcccgagggctgtagggccgccccgggcgtgcgcccaccggctttgcacctctgggcagccgagtgtcgcggagaacgccccatcttctccaccgcggtctttt

SEQ ID NO: 2676 - DNA, 241 bp, Homo sapiens
ccgtccacaccgccttccctctgcaggtgaggaatggggtctgcttcgtttggaatgtgcctttgccgggtcctgcctgacctccaccttccagccgggacgcgcgagcttttccgtttggctgagtcaaaaagggatcgcgcgcatcccgccgcccctcaccacgaagcgcagacacaggaggttgcagggtcagtgctgcggagaatcccagacggccccacagccgccgccacccgcg

SEQ ID NO: 2677 - DNA, 244 bp, Homo sapiens
ccgccgtccccaccccggggcgcgcaggtcgaggaggaccccgctgactacgaagagtttgaggacttctcgagtctgccagacacccgcagcatcgcctcggacgactctttctaccctttcgaggacgaggaggagcacggcgtcgagagcgcggagagcgtcccggagggcgtcccggaaagcgtcccggagacggcgaccctcctgcgcgccgcctgcgccaacaacgtggggctgctgc

SEQ ID NO: 2678 - DNA, 225 bp, Homo sapiens
tcagtccgggaagaggcgtgcgcggcgccgcccggcttcagggcaaggtcctgaccttgcccaactgcagcatcttccgcttttgttgtctgagcgcggccgcgggacaagggatgctggcgggcggcaggggcgagcgccgcgggcgagaggcggctcccgacgcgagtgcgcagcgcccggcccggcggcccctccgagctcggcgagcgcagcgccccctgc

SEQ ID NO: 2679 - DNA, 249 bp, Homo sapiens
gagcctggggccgccgcggcgcccggcgccgagcgctcccgagctgcgccccgcgcgcggcccgcgccacctgtgccgccgccgcctcagccgccgagggcgaggctcctcccgcggcgcgcggcagcctcagcctccacctaaacctcggcggccggcccgggcgcccggctagtgagggagcgtccgccccgccgccgaaaccggccccgggtgcggagcatgcccagtgccgccgcgagagcggcg

SEQ ID NO: 2680 - DNA, 255 bp, Homo sapiens
gtacagcagatggcacgagcacgtgcggcgctcagcttaggctctcggaggcagctgagttggaaatcccgacggaaagcacccacaagctcccactctgcgctggcccacccgcgtgcacgcccaccccccacgcgcgtccctggctcagaagcgcacagatgtttactgcttagagccggtaccgctggggagatcgagcgacttgcgcggcgcacagtgcggcgctggcagggctctgggctcccggtcggg

SEQ ID NO: 2681 - DNA, 243 bp, Homo sapiens
tcagcagcgccgccgcctcccagcgccgatgcttcagccggcggggcggctgaggggtgagggggaactccgcgggcgggggcgagggagcgtgtgtgcgcgagcgtgtgcgcgcgcgaggggagcgcgtgcgcggtgaggacgcgcgccggcggttggggcgggggcgggggccggggcgctcctgtgggaagggaggggtgaaaggtcgctggtccccggcaacacggctcaggcaaacgt

SEQ ID NO: 2682 - DNA, 201 bp, Homo sapiens
tggagagaaatgagctggagagttacaccgagtcaacgcgggacacggctcccggcccgggccgggccaggggtgggaggcggttccctaccgcaggcggcgggactcccatgcgccgagggacccaagtctccactccacccacacgcccacccggcgtcggggcgctgcggcctcgcctcacgagcccagagcaggccg

SEQ ID NO: 2683 - DNA, 208 bp, Homo sapiens
gccggacatcctcctccaggactacccgcaccccacagtcgcgtcaaaagcgccccatccccctgtctctcgccgcgcaggtttcccaccgacgcccgctcggaaggcgagagcccccacgtggcccggcgcggcgcggcccccggggaccgcgagcaacaaaagcccggcccgcagcccctgctcctcgccttccttttcaattctc

SEQ ID NO: 2684 - DNA, 257 bp, Homo sapiens
ttcagctctccgcaagtaccttcctcgccttcctaccccccccagcccccagccgccgccgctcccgcagccccggtcccgcgcctccccgcagccccggcgcccgcctacccgccaggcaggcggtggtgtcgatccacttgagcagctgccccgcgctcagctcgccgcgcgcagtggcgtgcgccggctggatggcttggctcatgaccacctcgccgggcgccggccgctccatggccagggcgagagcgcta

SEQ ID NO: 2685 - DNA, 350 bp, Homo sapiens
gaacggctcagcccaggccctgcgccagagcaccgcacccgggggcggacggccctgcagctccccagcctcttcccgcatcaactagctgacgcccgggcgcactggcttcccccgctcccgcccgcacgaaagccctgcccgacgtctgcagtcagcatcgcccgcactgcctagggagggtttgcgccgagacccagtggccgagtgagccacagagtcgctggtcctggggacgctgtcttctaccgctccccaccgtcctcctctttcctgtatctcaccccggtaccccgcacccttctccccgctcggccccgcgcactctgctcagactttacaagcacttt

SEQ ID NO: 2686 - DNA, 216 bp, Homo sapiens
accaaattaggggctgggagtttccagattgaaatgcgccctccaccaccaagagggagctcacgcggccgcggggggccgaggcagccagccggcgccgcggtcctggggagtccgtgcaggggtgtgctctggtgtgaaacctggcaggactctgcctgggcttgcatgcagggaggggttagagactctgaaatgtactagcgggcagggtgg

SEQ ID NO: 2687 - DNA, 269 bp, Homo sapiens
ggcattgctgcccgaacgaacgaacgaacgaacgaacgaagcggtttcgtttaggaaaaataccctcttgacgcgaagccacggctgaagtcccgggccacgcagaggggccagcaattccatgggtggtggggccctccatccctggacgcagcggggagcagcgggcggccctctctcctgcccacttctcctgggggtgggggagccctgtgtcacccgacgctgcgaggggctgccacgggcttctcaggttgtgcccttcgcgg

SEQ ID NO: 2688 - DNA, 258 bp, Homo sapiens
agatcgggcccctgcccgtcccctttctgcgccccgggatgaggcagagactgaacagccggcgagcaaatcaacggcatccagaaagccatgtcggactcggcgcccagcgcccaagcgctaacccgctgaaagtttctcagcgaaatctcagggacgatctggaccccgctgagaggaactgcttttgagtgagatggtcccagaggcctggaggagcggactggtaagcaccgggagggtagtgggagttttgct

SEQ ID NO: 2689 - DNA, 224 bp, Homo sapiens
tgtgctcccctcttcctcctcctcctcttcctccttcgccgcttcccctcctcctcccactcttcctttttgctcgccttttccctcctcctcgcggccgcggctcggatagaggttacccagcgccctcccgtagctctccggagagcatgtgaccaggccgttagcagcgccgcgagtgcccggcaatggcagggatggtgcctcaaatatccctggaagct

SEQ ID NO: 2690 - DNA, 256 bp, Homo sapiens
cgccatcccgcgccagtgcctgagctgcaactgcaaactgcgcgtcctggcacgagcagcggtgggggcgggtgggggaaggagcgagtgactctccaggcgtcttccgctacctgacaccagccaggcagcccccagggccagagcgtcagcgccgaagccaggctcatccgggaagccactccggtggccgcggggtgcccatgccagcaccagatctctcttcggaaggaggagcggggcgggctacacggcc

SEQ ID NO: 2691 - DNA, 310 bp, Homo sapiens
gggaaggggcgttaacagggccaccactccggggctccgccactccccagccgttccctcctccggagaccttgcctgccaagagctctgccccctgccccgttcagggttggggctcggtgggaacctccccgtgcccgaagggacgaccccgtcagagagtcccccgacccttgcacctaccgtccttggcaggacgtggagctgctcggaagccattccgggttggcccccttacccgtgtgccacgacccctcggcgggcccctgccgcccgagtgccctcaccgccagcctccggagcggcggag

SEQ ID NO: 2692 - DNA, 410 bp, Homo sapiens
aggataactgggacgggctggacccatacttgatacccgggaaactcctagagcgtgtggtgctcctgccagcggcagttactggtggagctgaggccaccgctactgtcgtcgttggcgctttgcttctggaacctcccagcaagatggcactcactgtctgttcccttccgattagcacccccagccgcgctccctcctccccgggatacgtattagtcacatactgtggggagaagatgggctatgtaaatgtaagtcaacgcgctttcccagccacctttgcataatgcaacaggaacagcgacccgcgcgcacgaaccgggtagtgtgcgcgtgtgtgtgctcgcgtgtgtgagcgcgtgtgccagcgtgcgtctccgcgcgggcgtgcgtctgggtggatcctt

SEQ ID NO: 2693 - DNA, 274 bp, Homo sapiens
ctggggccagtcccccctccccaccgccgccgcctccccacccactccgcgctcaccccacaaccactccgcctggtctttccccggccccacctccatgcgctcctactactctttcaaacactgcagcaagttgcagcaaggcgggcaaataccgacagcgcgcgtgggggcgggcggcgggcgccgcggggcccaccccctccccggtctccccgcgccctcgccgcctcccgcgctggctctcaccgcatgagcagcgttccctcggtct

SEQ ID NO: 2694 - DNA, 201 bp, Homo sapiens
tctctggctggcgggcgccccgtcggccgccggcttcctccttgaaacccgccggcgcacatgaggccgctgcccccgccgcaggcgctggcggccccctcgcggtgcccgtggtgatgccatgccccgccaccacgcgggaggagaggagggcggcgccgccgggctctgggtgaagagcggcgcagcggcggcggcggc

SEQ ID NO: 2695 - DNA, 265 bp, Homo sapiens
ctcccgtggcaggcggcagcgagctgggcccggggccgggctgagctttgggaccgcgctgcgcagcccccgagccgttcgctacctggctgcggtcgcgcggccacctgtcctccgccctcggggcgccgcccagcttcgcgccaggcgccttctccagcgcccgccgccctttcccggcgagaccactcgggcgcgccccgcccgccggtccccgatgcaaacagttgggctccgtaggcggctggctccgcgcctcccggcc

SEQ ID NO: 2696 - DNA, 201 bp, Homo sapiens
accaccaccatcccaagtgcctgctcgctggggacccgccgccgccgccgccgcctggcctgccctgctctggggccctgcgcggcttccctctgctctccgtccccccggaagaggcgtccgccttcaagcacgtggagcgcgccccgcccgcagccgccgcgctgccaggagcgcgttatgcgcagctgccccctgcgc

SEQ ID NO: 2697 - DNA, 362 bp, Homo sapiens
cctggcggggagcctgggcagcgccgaccaaagttcggagcggcagcttcggggcgcgggacgcggggcacacgggctcagctgctcgacgggagcccgacgcgcgctcctcggcgggtcggcgggtccggaagctccgctgcccgggccgggtccccaagcccgcagccgctttgactaaaataggcatcgcgacggcggcggcaggcggcggcagccagggctggggccgcaccgcgcacgcgcatgcgcccgccgccccgcgccccccggcgggcggagcccggcgccgcggccaggatttcccacctcgctcccgcgactccgctgcgggtctgcacacccgaggactcggtttgaaa

SEQ ID NO: 2698 - DNA, 298 bp, Homo sapiens
gtccccgccccccaccgccccctcccgctccgcagcccccgagtggcgtcagcacgcccgccgggcatgggctttaaatgcccactagcgggagctcaggcgcttctgccctggagcgcggtcgggagtaaaatcgcaggagtgggagggtagcgagccagctggattccgagccgcggagcgcgctggctttgctccgcctgatgactccagagcgcgggtccaagcgccgcccatgcagcacccctgagctccggggaaggagagttaatgaaaaaacacttaaccgtctccgctg

SEQ ID NO: 2699 - DNA, 295 bp, Homo sapiens
gagcggcgcggagagcggcaggggcgaaacttcgcgggccagatgcccgagggcgcggcggcgctgccaggctgccgctgctgcccctgcgggccccgagcgcgcctccgcaggcggcactgcccgcggcgcggcgtgtgcaccgagcgagtgaaggtatgtgtggcgggcgcggctggagctgccgccgccgccgccgccgcgccagcaggtcctaatgcctgtcacttcccaggacgctggcagcagcagcagcccggagcccccgagccctcggcaggtttgcgtgtccttc

SEQ ID NO: 2700 - DNA, 203 bp, Homo sapiens
cgaaggcacttgggactcccagacgcaggatgcctctgaccgctgagtaaatgacaagggaggcgcggccgcggtacccgctcacctagcgcaaccgcctcgcgcggggagacctcggctgggcccttaggctggactccggtagccgaacgcccgctacccggccaggaagccagggagcgagcgcctgcgcggccgcatcc

SEQ ID NO: 2701 - DNA, 215 bp, Homo sapiens
cgcggatcggccggcctgggctcctgcagagcagatcctgtctgcgtcctccaggaggagtgggtggcaggactggggtttcccacaggttttggggcggcggcgagattggcacggtccggggtcgcaggcgcgcagccacgcccctggaagtccgccccggcccccgcccccaacccgcctcttcggggctttatggcgtgaggtttggggct

SEQ ID NO: 2702 - DNA, 201 bp, Homo sapiens
ggaggctgcagccgctcgagtcggcccgggtgggggcggggtgggggcggcgcggagggcacggagattacggcggcgccacccgggacatccagggccccgaggccctgggcggtccccacgcgagatcgcaaaccatgacaataggcagtcacccgaggtcaaataaaaacggagtgggtcccccgcgcgccgccgccc

SEQ ID NO: 2703 - DNA, 340 bp, Homo sapiens
ggcggcgctgacggatgccggtcctcagggagttttaaggcggcgggcaccagcgggctgatcctgaagcgctgctcggagccggagcgctactgcctggcgcggctgatggctgacgcgctgcgcggctgcgtgcctgccttccacggcgtggtggagcgcgacggcgaaagctacctgcagctgcaggacctgctcgatggcttcgacggaccttgtgtgctcgactgcaaaatgggcgtcaggtatgcgtgccctgccaggtcggttggggggatcaagtaggggtccggggccgggacagctgcttgagggggacccggggcgagtgctcgaaggg

SEQ ID NO: 2704 - DNA, 201 bp, Homo sapiens
agggctcagggcgcagggcgggtcccgtacgcagggcgggcgcgcgggcatctttgtggccaggcgaccccggctcgctctcccggagcccagggactcccgaggctggcgcgggctgcccgcgacaaggtgccagcagcctcgggctcgcgaggagcagctcccacccgcggcttccgagtccagctctgtccctccgcc

SEQ ID NO: 2705 - DNA, 236 bp, Homo sapiens
cctgagcagtgcattttcccaaaggtaaagagagataagggaggaaacacagcacccaaggtgatcagtcgattggacactgttgatggcacattctcctcgttcccaaccaaccgcacaaaacccgcaacacctcgcgtccccgcggggtctcccgcgcccctggcccggccctcccggccgcccccagcaggcgccccgctctccgcgggaactctgggacctggccgagcgtt

SEQ ID NO: 2706 - DNA, 251 bp, Homo sapiens
gctcctcagctccccgcgcaccctcctgcgctcgggccccgtcgtcccgctcagtgctggctacgggtcgtgtcactagcctgtgcgtcctcgtcactcgcgggtcggggcacttggcgccctgtgtgggtggcgggagcggggacgcctcggtgcccggggaccgcagcgcgctggcgtttaactttgccgtcgcccgccttggagtcgggaggctccagccgtctaagtgtcccgggagattcaggcac

SEQ ID NO: 2707 - DNA, 201 bp, Homo sapiens
ccccgcccccgccccatcccccaccggcgcaggttcaggccatcgctgccaggaccccccgctgtcgccgccccccgccccctccactcagactctgagtcgcccactccagccggtgcaggccgcggggccgcctctgatggcctgggcaccccccactcccgccccgttcacgaccaccgcggctgcctgagctgctca

SEQ ID NO: 2708 - DNA, 206 bp, Homo sapiens
gtccccgagtgcgcagcgtgcgcccccagcccctgctgcgcccccaggcctggcgcgcgatccgagcgcagcgggcaaagttggaggaacttggcggcggcggagcgggcgcaggctcagcccgacaaagcccgggggcccgggtcggggtcgctgccgcagcccgcacgctgccccgtgcctccgagaggtcccttccccagcgc

SEQ ID NO: 2709 - DNA, 201 bp, Homo sapiens
ggccgccgctcacctcgcgtatttcgtcttctggaaatccagcagccggggggcgaacatcgcggcgcttccatgggaatctggccccgggctcagagcgcgggtagctggcagagcctggggggcgcggcggcggcagcagcaggttggagggcgcgcggcgggggccaaggggacctggtcggcgcccggagccggagc

SEQ ID NO: 2710 - DNA, 203 bp, Homo sapiens
gctgtaaccctgggcctgggattgcggggacgggacgggtgggaagcggccaaaggcgcagcggcttctggtcagagccgcagaggcctgagacgtgggccgcgccccggcccaggagaccccgcggccgcgccctaaccctcagtctcccgactgcgactgcgacccgggaaaacgcctacgtttttggaaaggaagtccca

SEQ ID NO: 2711 - DNA, 216 bp, Homo sapiens
ttggggggttgggagaacgaaaataccagctgcgcttccaacatccaaggaaggaagtggcagcggggacggggagaggatgggaaggggatgctgactgcgagttggggcgggacgcggtgatgggaggggaccgggccgggaatgcgggaggcgaggggagcgacgggacctgccgttccggcggccgggcagccaatcgattcgtctccccta

SEQ ID NO: 2712 - DNA, 335 bp, Homo sapiens
agtgccggagcgctcggtggccgccgcgccgcgcgcctggagggatgctaacgtggagccggcgccgagtccgcccggcgtgcgtgcgtgtgtgggagcgcgcgagtcccctgacgcggggaccagttatgaatcgggggtgtgtgtttgcctccagagacctggcaaggtgcggagccctccagaagtgcggtcaagcggcagcggagacggcgagccaggaacctccccccgcgtccccagcttcccagcgtggcggcggaacccccggagaaagtttgcaaacttccagcgggcgcggcgaggacgccgggtcacctagggggcgggtgggc

SEQ ID NO: 2713 - DNA, 230 bp, Homo sapiens
gagagaaagtgagaagggagagaaaagcggcggctgagcaaagcgggagccggcgcgggcggtggggcctgacccggacgccgcgcacccggctccgccccgcgcccagcgccccgctcactccctggccgcgcctgccttcgcgcccctctgttttctctcacttaccagcagctctgctgacaagcgagaaaactgacaagtgagaaaagtcgtctgtcagcgcccgg

SEQ ID NO: 2714 - DNA, 224 bp, Homo sapiens
cagtacagggggtgagatggggtggtggttggtgaacgttggttactttattttatattattttattttgagagttgccataattaccggcgccaccccccgtgcaccctgaggtctggttggcgagccgctgctgggagttttctgcaaataccccccaaagcctgaaggcgggcttcaaacgcaggcgccggggaccatgggagccttcaaatagctgcgct

SEQ ID NO: 2715 - DNA, 211 bp, Homo sapiens
ggtcaatttcaggcacagcccatccgagtcaggcgaggtccagaaaggcctgactcgcctggcagcctcaacggacttgtccccgcagccgttgactagccgttgacgagcggacctcccggtcgtcatggcgactgtgaaatgtagggtggagcgcatgcgttcgaagccattcgcgcgggcagtccctgcgtgtccccctgcgtgtccc

SEQ ID NO: 2716 - DNA, 205 bp, Homo sapiens
cgtgtaatccgatcccttctgactcacaagccctgagtgacagttctgatttggttcaaccgcgggagggaggggaaagagaaagaaagaaacccccagccgtacgcctctcctggcatccaatcgactttctggaaaaaggtcccatcccggcctggtgccccgtgctgggtggagaagccccccgccccgacctggcaccgcc

SEQ ID NO: 2717 - DNA, 398 bp, Homo sapiens
ctccgcccgccccgcgccccgcgccccggcgcctcgccgcccgccgcccgcccgccccggcgccgccgcccgcgccccggcgccccgggccggcgaggggcgcgcccgcggccgcggccgctgcatggcgctgagatggcgggggcgccgcgcggcggaggcggcggcggaggcggcgcgggcgagcccgggggcgccgagcgggcggccgggacaagccgccggcgcgggctccgggcgtgcgacgaggagttcgcttgcccagagctggaggcgctgttccgcggctacacgctgcggctggagcaggcggccacgctgaaggcgctggccgttctcagcctgctggcgggcgcgctggcgctggccgagctgctgggcgcgccggggcccgcgcc

SEQ ID NO: 2718 - DNA, 290 bp, Homo sapiens
acagcgggcgctcccagacactggggaaagtgctttacgatgtcccgagtccctccagtctcgccagcggggcgagcgtgagggtgccccgaccgaccagcggccccgggtgcagggtggcgggcccggcggcgcgcgtccccctccccctcctggcggcccgcacgtgtcgcccgcgccgcgcccccacgggttacgcgcgggtcccgcagcgccgcggccgagccgggctgcccggcccgcggacacagcgccggccgccgcatcccgtgcggggccgcggcgcgatg

SEQ ID NO: 2719 - DNA, 307 bp, Homo sapiens
cgtgaaactgtccaatcaagtgcgcagctacagaggaagaggcggcctcttcaatatggcggggcctttgtctcctagcttccgggctctgatcctagttcgcgtctccactgttccatctcctccgttcctggagttcctcggtgactctactatagcttctgttatcctgtgacctgcaggtactgggagatccatagggaggacggcggaacatctggaggctgggaaatggtgagtgcgtggagtgggtgtcccgagaatggggaagaggctgtttgaatccggccggaaccggctgcggtgg

SEQ ID NO: 2720 - DNA, 212 bp, Homo sapiens
agtgctgccaggcggaggctcgtcagaaggctccgcagctgctgaggcggggtgggactgcgccccaggggccgcgctgaagctggcgccgcgattactgcgcaccgatttcgcccactctctgtccgctcccgggagccttctctgtctcaggacggttccttatctcccaaaccatgctcgtcctccacttcggacccacagccaccccc

SEQ ID NO: 2721 - DNA, 375 bp, Homo sapiens
tggctcctgagcagcatcgcccagtgcagcctccgtcaggaaaagcagcagaatcgacagccccagggggcgagcggggtccatggtgcagggggtcgggcggcccgctgggcaaggcgtccgagaaagcgcctggcgggaggaggtgcgcggctttctgctccaggcggcccgggtgcccgctttatgcggggcgagcgtccggccgacccccgccggggcggagcctgaggggtggctgattcatgcacggggactgtcaccccgccgcccccgcgctgcaaactgtgtaagagggagaggaattccccgccaagttgaaaagttgaacctgcctcccaaactttctcctgtagtccagacggggacgccctg

SEQ ID NO: 2722 - DNA, 201 bp, Homo sapiens
ggggttgcccgcaatatgcagggaaatgagcacctcgccctgctccccatccccttccagctccccgtggtgggtgcacaggaaaaagaagggcgaaaagcgggggtaatagccagccgccgcgcgcgccctcagcgtcgcccccagcaacagcgctaggaggaaagtctgccgggcccagccactgcgctccatgccgcc

SEQ ID NO: 2723 - DNA, 356 bp, Homo sapiens
ttggagacgccgggacggaggagccacgcggagagaaggcgagaagaaggcggacgggagcggaacgggctcgggagcgggcctgggagcgggcccccgccgagaagttccgcgggagacggcggctcccaaagttactttgggccgcgggagcgcgggaccggggctgcgggcgccgagagcgcgtcgtctgccgcctccgtgcgccgccgccgcctctgcgcgacgcccctcggccaggcctgggaaagcgcccgccccgctccacaccttcttaaagccccgggcgccgcgtcccccccgccgccgccacacgtgtcccggccgctcccccgcccccgcgcgccgccccgccc

SEQ ID NO: 2724 - DNA, 265 bp, Homo sapiens
gccggtttctttgtctgagccggctgcgtcccgcgcccctcggggctcgcagtctgccagtccgggcggcccgcactcgttctgggaatccgcccgaggccgcgaaccgctaggggccctcgcgctcccttcccacccaggccccctgtccctcccgccgcggccgcccggcccctcgcggcagcgacagagcctcatctgtagaggattttaaaatgagattaagcgaaagtggaattggcagactcgagtggtgcctggaaat

SEQ ID NO: 2725 - DNA, 697 bp, Homo sapiens
gaccccagccgcacgctgtgcgaggcctgcaacatccgcttcagccgccacgagacctacaccgtgcacaagcggtactactgcgcctcgcgccacgacccgccgccgcgccgaccggccgcgcccccgggaccccctgggccggccgcgcccccggccccctctcccgccgcgcctgtgcgcacgcgcagacgccgcaagctctacgagctgcacgcggccggcgccccgccccccccgccgcccggccacgcccccgcgcccgagtcgccgcggcccggaagcggaagcggaagcggccccggcctcgcccctgcgcgctcgcccggccccgcggccgacggccccatcgacctgagcaagaagccgcggcgcccgctccccggagccccggcaccggcgctggccgactaccacgagtgcacggcctgccgcgtgagcttccacagcctcgaggcctacctggcgcacaagaagtactcgtgccccgctgcgccaccgcccggcgcgctcggcctgcccgccgccgcctgcccctactgccccccgaacggcccggtgcgcggggacctgctggagcatttccgcctggcgcacggcctgctgctcggcgcgcccctggccggcccgggggtcgaggcccggacgccggccgaccgcggcccctcgcccgctcccgcccccgccgcctccccgc

SEQ ID NO: 2726 - DNA, 226 bp, Homo sapiens
tgggaggagcgcagacacctttcggtgatagggagggcttctcacttggctgttacctggaagtccacagtggccccggcgggcaggcgggcgggcagagcgcgggtccgaacgcccttcgcgctcgcggcggcgcacgtgcggcggcggcggcggcgccggcggcgcgggcgggacccactgggtggccgcgcgcgccacccgcgcgttttctgcgcgcctctgc

SEQ ID NO: 2727 - DNA, 201 bp, Homo sapiens
ttttctccatccccccaacccccagcaggacacggaactccggcgtttctcgaaagccacaaaagaggggcacggaaatcccaagctcgccgtgctaactcggagaacgcaaactcgaggcagagcgtgcgccgtgcggggatgtgggtgtcgaggaccccgaagcgcccggcttcccccgcgacccccatcctccctaga

SEQ ID NO: 2728 - DNA, 201 bp, Homo sapiens
tacctcgtcatctcggcggggcaagtccggattccaccagggcaggtccgggaggtcacccagggcagacgatccgaggcagagcgctttaaaatcctgccgccgcacgcccagtcagagcgccgagcgcgcctgcccccttcccgtcacccttcagtctcccattcgccgactaaacttttgggggatcacatctccaag

SEQ ID NO: 2729 - DNA, 215 bp, Homo sapiens
ttgtccttcagtcagaacgtgaatgtactgctgacgcatactgttctgggagaagattagcgtgatgcagtgctcttatgtattagcgccgctccccctccgtcgcctgcctcgcggggttaacgccggcgccttccagcgccgcgccggccggcgccgcgcagccccgcgcctccggccgcccgtcttcctctttcctccttccttcctcctct

SEQ ID NO: 2730 - DNA, 252 bp, Homo sapiens
tgaacgtgtgcgtgtgcgcgcgtgtggctgcctcctccagccccagccccgaacgcaaatactccaccgaggcacagggaagccgggagcagccgaggaacgcggagggcgccgaatcagagcctgcggggcttgacagcttctcttgcggcgtccaaggtgggcgtaatgtccaacaaaaaggtcggaaaatggggatcgattccgaacacccctttcctccacccagccccggagcccgagcagcggcgg

SEQ ID NO: 2731 - DNA, 203 bp, Homo sapiens
cgctccggcggccgcggagggagcgcaggcggcgccgctgcaggggccgggcgggctggcggcggcggcggcggcggctgcaggagcgcgggcaggtccgcgcgccgctggcaggggcagcaaatggcagccccttcccgcagcatccatccgcggctgcaccgcaccggggcattgtgggaaactccgctcactcccccgcc

SEQ ID NO: 2732 - DNA, 201 bp, Homo sapiens
cggcggcacccggcgcagaggctccagcgcggggagccgggctcagccccggcctgccagcgccgcggtcctagcccacccgaggccggcctggggggcccgcagggcgcgcggagcgccgagtgcgcgtcgggctgggccccgcaccccggtgcaggagcgcgggcgcggcgcggcggagcgccccgcatggagccggcc

SEQ ID NO: 2733 - DNA, 201 bp, Homo sapiens
gctgaacaccgcccgggcccagtccccactccgcggtttggtgaagttggtttccgtgcctgcttgggaagcccctgcctggggataatcgtcaggtcctcgagtcgcttcccccctaccttccgctgcgtcggcaaccttatcctcccgtcctcattaacggatcggcactcaaatcaaagcccagccctctggggttca

SEQ ID NO: 2734 - DNA, 201 bp, Homo sapiens
ccccgctccccggcagagcttctgtccgcgccaacccacccaccaggctctgcccgcgccacgcgcgcccctggcaggcctggggcggggaaaggcgaagcgctgggcacgcgagggcctgtgcaccccagttcctacgacgctcctggcccttttcaggcccgccgctgccgcatttaaccccctccttccgggggttat

SEQ ID NO: 2735 - DNA, 213 bp, Homo sapiens
cagctcatttaatattatttatgcattttgtgcaaggaattgtgggatttcgccccacggtaaacaatatggaaatcttaaaaatagcgatcttcctgtgcgtgtccacctacgcgccccggggtgacctggcggggctgtcgccgggtgactcacacccctgaaccgcgaagcgacagggaaagcgcgggcgagcgcaggagacgcggtcgg

SEQ ID NO: 2736 - DNA, 385 bp, Homo sapiens
tcatcccctgcttgtctaagccggctggctctcgtgactgactcggaacaacagagcagatgtttgcgtgggaggcaagcctcacccaacatctgtcctgcggcgggaaggcctgggtgttcacagatagagctggagttccccggtgggtggcacagacaattagctggggctgcctcacatgtaatctaattacaggggaaacaggctcaaacaccgggtgataagcagcgcaactgtttcgggtgactctgtaatttttcctccattaattttctccataacgcacatgattgtcataagggttaattaaaaagagcgtgagtggcctcatgtcacatgtagctggaccagaaagtgttgagtacctgctcatgcgtgcaag

SEQ ID NO: 2737 - DNA, 278 bp, Homo sapiens
ggcactgcggctcagcccccgcccggggactcgcgggccgactgtggccccttctggggaagccggggcgcggggaggcgttccgggcatctcagccgcacggggtacgctcgccctcggcggggcccctcgctccgctgtgggagtggcagtgggtgtcggggtggagaaagtacgcgtggcgcggagtcctggggacgcggcgtcccacccgctctggggagccccggactctctccagcttccaggctcgcatgcccctcttttcttagtgccct

SEQ ID NO: 2738 - DNA, 248 bp, Homo sapiens
acgcgagccgccagcggtgggacccatcgacgacttcccggggcgacaggagcagccccgagagccagggcgagcgcccgttccaggtggccggaccgcccgccgcgtccgcgccgcgctccctgcaggcaacgggagacgcccccgcgcagcgcgagcgcctcagcgcggccgctcgctctccccctcgagggacaaacttttcccaaacccgatccgagcccttggaccaaactcgcctgcgccga

SEQ ID NO: 2739 - DNA, 216 bp, Homo sapiens
tataacacaagggagagaaagcaacgctttggttccagaaacttccatcgtcaaggccagttctggccagacgcacagccaaagagcccccctagtctagcggatgaaccgttcgcgagtggcaccccctaaaaccttggccccatctcccaagatgcctctttactgcgcaatccagaaagcacccggaccgccgccacccaccagcggcggcga

SEQ ID NO: 2740 - DNA, 201 bp, Homo sapiens
tgaggtgcctccctcaccaattctaggcaccggcccctggtggaactgtccccagactgcctgagtccccagggtcaagcccccttcccacctcccagcacggagctctacctagaactgcacctcgaaagcccaaagcttacctatggttcccagagacaggcgaaggcgaggttttttacgggacgccctggtaggtgc

SEQ ID NO: 2741 - DNA, 208 bp, Homo sapiens
cgagcagccagggccagcgagcgaccccagcagcagggacgcggccgtgcgagagctcgcggacaggcgagggggatcccaggggagcagctgctgcccacgggccacgggcgatgcacggagtggagaagtgaacgtggtctacaggatttctgtccggaaggtggagagcgctacaggggaatctcctcgattcctgtccgtctcg

SEQ ID NO: 2742 - DNA, 201 bp, Homo sapiens
tcaggagcccggatccttgcccagcttcttggcggagccaagttcgagcgcacagatttcccgagctccagcggccagggggcactgtgtgagcggctgacgtcacccctccgcccggccgaaaccaggcggcgggatcccacacagttgaggagagggagccgaggccgtgacttagggctggcgacgattaaaccaagt

SEQ ID NO: 2743 - DNA, 364 bp, Homo sapiens
gccgcgggtgaggcctgtggttaacctcgcgctgccgaggtcttacctcctcgagtccagtctgattccaggccgcttccaggccggtgcccagctgaggcgggaacgctgcagtttggttgagcgtgacttttaggctctgtgaggaaaagtcgagcgcgccacatcgaggcgctagccgtttattctaccacaaggtaaaagattcatgctgtcctagttaccctaaagctgggagatacactgcacttcctaccagaccccgaatgctctcagtgtctgtaattctttaagaagttcctagagcagacagcccttggatcgtgggcacttctccccggggacggggaccctgctgaccgcc

SEQ ID NO: 2744 - DNA, 213 bp, Homo sapiens
gcccagcctctccccagcatgtaaagtcttctgtctctcctcggagttggcggaggcggcaactttccattctcgccgccgggggccgggcagcagcgggcgcgcgggtcagcgctcagcacggcgggcagcgccgcgctgcgcaccgccgccgaccatgagcgaggacagccgcggagacagccgcgccgagagcgccaaggacctggagaa

SEQ ID NO: 2745 - DNA, 201 bp, Homo sapiens
tctcctcgtcacggcaacccaactggaggcagaagccggcggggcggccgagcggggcggggcgggagcgcggccgccgcgagccacggtggggagcgggcgcgggggaccctggcgggccccgggcagcgcggctgcacttacttgtgtcacaactgcggcgacggggggctgaggaaccggttcttccaaaagcaaacc

SEQ ID NO: 2746 - DNA, 201 bp, Homo sapiens
ctctgggcggctgcagaggccggccgtccggtttggctcacctctcccaggaaacttcacactggagaggtaagggcgattctaaaatgcatcgctgagtcgtcaagctgccaccctttcctatctccctttgccttcttaaactgtacttaaaaaaaaaaaaaagccaactgtacagagtggttgggcgcgatgggtggg

SEQ ID NO: 2747 - DNA, 296 bp, Homo sapiens
tccgggaccgcgcctcggccgcccgagccccccgcgcccgccgccccccacctcggtcgggggcttacctgggagcccgctgcccccggccagccgcccgcgtgtgcccagggccagcagcacgcacaagtgccagcgcacggccgccgcgcccatgctcaatgcgggccccgctgggcgtgcgggcgtgcggggcgcggggacccgaccgaccggccgctcccgcaggcgctgctcgctgctcgccgctccgccaccgctcgggctcccgagccgcccagccagcccggctgatg

SEQ ID NO: 2748 - DNA, 201 bp, Homo sapiens
ccctgcctggcggctcctgcgcccggggctgctgagcccggggttcgtcctgaggccgcggctgtggttcctggccctcccggcccgcgtcactgtcgcgcggcgcccgctgcatcttgccttccttgcggcttcgcatgcccttggtggaacccagctcggcggacgacgaggaggatgagatggaagcctgctggaaac

SEQ ID NO: 2749 - DNA, 297 bp, Homo sapiens
ggggagggaggcgcggcgcgggaggaggaggggcgcagccgcggagccagtggccccgcttggacgcgctgctctccagatacccccggagctccagccgcgcggatcgcgcgctcccgccgctctgcccctaaacttctgccgtagctccctttcaagccagcgaatttattccttaaaaccagaaactgaacctcggcacgggaaaggagtccgcggaggagcaaaaccacagcagagcaagaagagcttcagagagcagccttcccggagcaccaactccgtgtcgggagtgca

SEQ ID NO: 2750 - DNA, 268 bp, Homo sapiens
tcgcgctcgggaggggcggctgccgcccgcggggcgcccgcggtgcccgggcctgggcagcgaggaggtgacgccgcccccgcgggatgagcccgggaggcggaggggcggaggaggtgctggcggcggcactgagcggcggcggcgcagggcgcgcgggccttccgcgccgactccatcgacccaaggggcggcggcggtggcggcggctgagcgaccctgggccgggcgcgtgatgaggaggggccggcgccagaccccgctgcac

SEQ ID NO: 2751 - DNA, 201 bp, Homo sapiens
ctgagcagtcgaagggacaactagacagtcatagacagacagacggccagcccgagcctcgggcaggagagaggctgcgaggagcagcccatgcttgccccgctcagccctcgcgctcccgggctgcttttttaattccgacccgcgcacgctgcgagtccccggcgctgtcgtccagccggaggggcagtcccgctcctt

SEQ ID NO: 2752 - DNA, 201 bp, Homo sapiens
cgcgatcagcatctctccgccacgaacctgagagacaagaagcgaaaacagggtgtgtgggggatggagagagccccggggaggcagctgcgccttcgcacgtcccaatttaaagaagagagggaaggaggaagcgaacccactgcctagcacgagccgcggagcggcttaatccagagcgggcagctgcggacgagttgg

SEQ ID NO: 2753 - DNA, 201 bp, Homo sapiens
ccctgtgcgagcaaagccgggagagcgagccccaagcacctggcagcggtgcccccagcaggcgccgaggaatccggctatccatttctggtgaactctgcgcccactgaggcattcgaggtacggatgtgtccgcctagtactcggagacgaaggagagagagcggggatatgcgctccagctctgctaggctccagggc

SEQ ID NO: 2754 - DNA, 201 bp, Homo sapiens
tttctcctcctcgcgcatctcgtggtccgactcgagggcgtcgaacacggcggcgcccaccagcaggtaggtgaaggtgcagacgatgagggacagagtccgcacgttctgcctcttcatggccgccagcaaggagccggcgcggggggcatgtcccgcaggctcacagccgcgcgcgtcccactgcagcgcccggcggcc

SEQ ID NO: 2755 - DNA, 302 bp, Homo sapiens
cgcccacccgggcgcgcgggtgcgcagcggggtccccgccgggcgtcggccggtgcgcgaagtttgctcggctcaacccccaaggcgcgggagcggggcgcggccccaggacggcagggaccgcgatggagcggcttcgggggcggccgggggacggcgcggtggcggtcggccagcccgctcctccgggggcggcgggcgcggcggcggcggcgggaggggtcccgcgggcctcgcggagcagcggggcggacgcgggcgcatgagccgcgcgggggtcggggccctccggcgtccgggcg

SEQ ID NO: 2756 - DNA, 201 bp, Homo sapiens
tcggtggccgcgtccgtgaaatggggacgcgggctctgctctcggatcccttccagcccccgaccctccgcacttgtcccgagatccaacgtgcccggtccgcagcgtgctgggtctgcggcgtcagggtggcccgagtcccgagaccatctgcgcttgcggacacagccgcggggcctggcatgaagggccccagggagg

SEQ ID NO: 2757 - DNA, 220 bp, Homo sapiens
gcggggcgggcgactgccgggccccgggccagctctcgccccccgccccgcccccgatcgctcggctcccccgcccggcgctccctcgggctgcgctccgcggctctcggcggcggcggcggcgggcgcagagcgcggcatgggcgcccgggccgcggggcctggcggcggcgggcggacgggcgcgcggctgcgggcgcaggtgcggggcggcgggccg

SEQ ID NO: 2758 - DNA, 347 bp, Homo sapiens
caccgtcccgggtgcggcggctccaagcggagacctgagcgcggcgggccgagctccccaatttgttggcgctgccccctcccccccggcggtgcgcgggcggcgcctcaaaggggaggaccctgcggcgcgggtaagaggcggcgggagcgcgcggcccgggagtgtggctgcagtgcgccgggacaccagggctccgcgctccgcactcaagaggctcccgcgtcccaacccctcgcgcccgcgcgttcgcggatccaggccgaggaccgaaaggggccgcccgagcccccggggccggcgcccagagagcccagcaaggccggccgccctgccggtgtgccgcc

SEQ ID NO: 2759 - DNA, 201 bp, Homo sapiens
tggcaccaggcttccccatgggcaccggagcaggcggacaggggtggggtcccgcgagcgacacggaagggtcagtgtggcggagcggaccctgtggaggcggggtcactgtgctcctgagaagggtcctcgggggtggagtctatcaaggttgcgggggcgtggtcacggagcggagccaataaaagcggggcgtgcacg

SEQ ID NO: 2760 - DNA, 201 bp, Homo sapiens
cgtcctggcaccgggggcggcggcgcagaggccgggaggaagaaatccgggccctggcccaggtcgggcttccacccctgcgacccgcgagaggcccaggcgggaaaggcggcgagtggcgtcagcggttccgaaagcaaacctggcccggtgctactgcccgagggtcgccgggcgcgtttcctaattcccccgagtctg

SEQ ID NO: 2761 - DNA, 225 bp, Homo sapiens
agtgcgcacgctgcaggaaccacggctacgcctcgccgctcaagggccacaagcgcttctgcatgtggcgcgactgccagtgcaagaagtgcaacctgatcgccgagaggcagcgcgtgatggccgcgcaggtgggtgcgggcgtgcgggagcccgggttcagccttagtttttttttttttttttttttttagatggagtctcgctcggttgcccaggctgcag

SEQ ID NO: 2762 - DNA, 318 bp, Homo sapiens
gctgccaactcattcgggagcccggggcatgaacggctacggctccccctacctgtacatgggcggcccggtgtcgcagccgccacgggcgcccctgcagcgcacgcccaagtgcgcgcgctgccgcaaccatggcgtcctgtcctggctcaagggccacaagcgttactgccgcttcaaggactgcacctgcgagaagtgcatcctcatcatcgagcggcagcgggtcatggctgcgcaggtggcgctgcgccggcagcaggccaacgagagcttggagagcctcatccccgactcgctgcgcgctctgccagggcc

SEQ ID NO: 2763 - DNA, 265 bp, Homo sapiens
aggaaggggagcgcagtctgcagactgaagccagtggcgctgcgctgaatgcaactgcgcgcgcccgccgggtgagccagcgatctgagccaggcgggggcggcccgacctttcccgcccagcctgggtcagaggaagccgaaagcggcctcagcaaggtgaggcgcccgaggctgcagaagaccgagcagaactttgcagagttcgggatgtgctgggctaggtcgctgaggacttgactggcttcctccctccttccctccac

SEQ ID NO: 2764 - DNA, 259 bp, Homo sapiens
cggaggggaggccgcggagggccgggtggaggtccttaccgccagccccaaggtctgcagcatctctctctggtctttgtccccagggccgatgtgcctccgagcgaagtcgtcgtgtctgggcagaaggcgctccaggaggcgcgaggccccagccgcggcgctgtccccgccgccactgctgctgtcccggctccgcggcgcccagcacggccccgatcccccagccaggcggcggccgcccccgaccccgcggccc

SEQ ID NO: 2765 - DNA, 201 bp, Homo sapiens
gacggggcaccggtaccaattagcggctcgcctcggggtccccgcggctaaggcgagaacgcaggaccaggagcattgctgcccactctctaccgcaacccgcacatcccgggaccacgtaacggcggatggggcgtccgggagcggcccctgcaggggagagcaacaggctcccgcgccctggaggcctggtctgcgctc

SEQ ID NO: 2766 - DNA, 323 bp, Homo sapiens
cccccgcgacctcaccggggaaacaccgcggacagtcgggccagcagcgcccggagctcactccaggtctccaaacttgcagcacttcccagagcgcgcgcgctcggagcgggacctgcttgctccagtgcacgccgcggagcgaaccatcgggctggcgggggtggaggggtgcaggcgtgggggctgcgggccgctcgggccttgggcttctcctgccgccgccgccgcctcccgcccccggccaggagtcgcgcgtgacgcggttcgccgcaggagcctcgaaggcgcggcgccggcgagcccttccccggcaggcgcgt

SEQ ID NO: 2767 - DNA, 201 bp, Homo sapiens
agccgcctccgcacctcccgtcacagcccccgcagcaaccgccccagcagtcgcagcctcagcagccgtctcaccccggcaagatgcaggaggcggcggccgtggcggcggcggcggcggcggccgcggcagccgcggtgggcagcgtgggacgcctgtctcagttcccaccctacgggctgggctcggccgccgccgctg

SEQ ID NO: 2768 - DNA, 355 bp, Homo sapiens
gcgaacacaattgctccagccacaggcgaggcctggccaaggtgtgggcgcatctggggcaggtcttgagaggtccagcgcccggtggtgcggacagaggcggggcaccgcggcgctcgccgccgcctccccgcaggtgatcatcctcctgcaggtgtcctcgggtctcaggtggctgcgtgtctgcgccatggttgacattctgggcgagcggcacctggtgacctgtaagggcgcgacggtggaggccgaggcggcgctgcagaacaaggtggtggcactgtacttcgcggcggcccggtgcgcgccgagccgcgacttcacgccgctgctctgcgacttctatacggcgctg

SEQ ID NO: 2769 - DNA, 201 bp, Homo sapiens
cccgcgcggagcgattgtgaggggctctgctggaatttggcagcgcggaggcttggagagaagccccatgctggctcccattcagccggcccgttttcctcgagctttggaagtttcactcagccgtgcactcaatggcttcacaaagctgattacaagcttcagcgcattcctgaaggagccaaaagcgacgcaggtgca

SEQ ID NO: 2770 - DNA, 290 bp, Homo sapiens
gacaccttgtggagcaggtggcccaggctgccgggcccatcgtcgggcgccttgcgcagcgcctcgccggacaccaagtagggagccgccgccggggtcgcgcgcgccgccgaaaccttgcctccgccgccgctcaccgacaggctgtggagaaggtcatcgaccgatgtcaccgagtcattcctgaagcggttatacttggtgcgtggaagcatgcccctccgtgggctcgctgcatccgcccgggcgctgctggtgccggccccggcgcgggctgccgcgcatagcag

SEQ ID NO: 2771 - DNA, 201 bp, Homo sapiens
tagagactgtagcttccgccgggctggatgcgagtctcccaggttagagcccagaagcgcgctgggacctgggtctggcttttgggtctgtgtccttcctcgtttggccccaattgtccgcattcaagatcataataaaaaggcttaggaagtaaacttcttggacgcggaagggccggctcgcgggtttccgccgagtga

SEQ ID NO: 2772 - DNA, 201 bp, Homo sapiens
agaggccggcccgccgcgcgggagacactctttccaaagtggaagcgctgcgtgggcagcagcgcgggccgggccctcggatcccagtctctgttgctcccgagacccccgccccgcgccgcatcctccgagctcagcgccctcgggctgcgctgggcgcagtggctcccggtcagggcgcagtcggcctgggcgctagag

SEQ ID NO: 2773 - DNA, 288 bp, Homo sapiens
cgatgtagctcagaatccgcgatccagcccggtccaccacagccttcagcagcgacactcgcagcctccgacctctcagaccgagtgagcttaactaagccgttactcgcgtgccagcagttgggcgctccgacctctcagaccgcgtgagcccagcaaagcggttaggcgcgcgcctgcagctcggcgctagcccggactccgggagccgctctcgagctcgcgtggacggcagagggcggctgcagctcgggcgcaggcgccgctggcttgcgggttctcctgggc

SEQ ID NO: 2774 - DNA, 212 bp, Homo sapiens
tcactccccgctgcgggaaggggctgcttggctgcctctgggggtcttcagagctaccctggtcccgggggattggaggaggaggttacctatcctgcgtcgtctttaatccgtgcaccactatccatcaaatagagacagatcctgggcctctcaaagacggatgattgggggtggtgattggcctatccctaaatatctaccacgcaagg

SEQ ID NO: 2775 - DNA, 201 bp, Homo sapiens
agtagcagcaggagcagcgacgcccagacccccgggtgctgccggggcggccgcgccatccgtgcgcacagatcccgcagccaggccgctcgggccgcagcgggggcgccgcgggcgcgggccgggactgagcctccgccgaggccaccagcacgcgcccgcgcagccgcggagcctcccgcacccccgcctccctgcctc

SEQ ID NO: 2776 - DNA, 246 bp, Homo sapiens
gcggggatactcccgggggccccgggcgcggtctcggggaagaggcggaagctgaaattgcgcgacggggacatctgctgaaaggtcgcccagcccgaaacgagcgccagaccccagcaacaaaaggccaggcgaggccacatcgcgctggagacagagcggctgccccggagcgcaggcggcggctcgggcgggaagaggcgctgggcggccggactcgcagaggggcgtgcgcggagctgggcg

SEQ ID NO: 2777 - DNA, 201 bp, Homo sapiens
ggcgctgcaccgtccctgcggccccagaggctcgcgggtgtctgggcgcgggtggcgggcgggtcgggggcttgcgggcgtgtctgtgcgagagctgccccgcgagcggcgcagagacatccgggcgagctgagagcctcactttgctccatcggtggaatgggcacactcggaaggcgtagctgctccatccctgggagg

SEQ ID NO: 2778 - DNA, 201 bp, Homo sapiens
ggttgcgcgacgttccccgccgctgggggagattagcaaagttacccgcctctggaccccggggcctgggcccctagatcccgccccgcggcgggagatgcgtttgagccttttacagacggagcgcgtcccagcctgacgcagagggatgaatagacaagcgcaccgggcgggaatcccgactgcctgtgtatctggggt

SEQ ID NO: 2779 - DNA, 358 bp, Homo sapiens
gacacctagcggcttcagggtgaaccccgaccgcagccgtcgccgcctcgggcagagtttgcgcccttgctttgcgccccgggcgctgaagccgggcgggcgatgcccgcggcgtgaaagcgcccgcggcgggcgccgacctctgtcctagtctcctgctccccccgccccgcttgtcccgtgcccttgtgaccctggctttggcgccgtcgcccaggcgccccgcaatgtagctgcccctgcgcctcggcgggaggcgtcctgccccgcgagcgcccggggcccggagcccggcctgggggctcagccgagctcgggcggggccggggccgcggtggcgatgcaccgggcccgttag

SEQ ID NO: 2780 - DNA, 201 bp, Homo sapiens
cggccgggctccctggagagggagtgcaaggaggagcagtgctccttcgaggaggcccgggagatcttcaaggacgcggagaggacggtgagcccagcctcggggcgccccgcgccgcggacactgcaggcggcggtgaaccaggccgcgtggggccgcctgcgtctctttggctgcggctgtgggcggcgaacacgcagc

SEQ ID NO: 2781 - DNA, 201 bp, Homo sapiens
gcccgggacgcgagagggggcgcgacggcggctgcggtcggcccggcgcccacctggtcgctcctgcgagcagcgccccgcgtcccgcccgcgcggagcccgcacctctcggccgcgccgccgccgccggcgaggagccgcacccgggcgcagcgccgcccgcccgcgatgacggccgctcgggccggggacggggaggcg

SEQ ID NO: 2782 - DNA, 201 bp, Homo sapiens
agagagaatccgaggctgtttctgccgctgaaatctgagcgggagagcatcccgaagccgcctgcgtggagcgagcagcccccgcgtcatgggccagaggcgcccgggagaatctgcgggtcacggatcacacccgcaggggcctggcggagcaaggtgccgttcgccgcctgcgggcaggagccggctctgggcctcggc

SEQ ID NO: 2783 - DNA, 277 bp, Homo sapiens
ccgcagagacccagccctgtctgccgactggcccttcgacgtcgccgccgtgcctgagccccgctgcctgctcggacaagcagaactccggcaggcgcagcgggcgccgaggcttgggctttagccgtggcgctcgcctcggcgcagtggggagccgcgggcgtcggagaagcggccgcgctgttccgggtcactgcaccggctgaaaaaaccaaaagcaaaaccaacacccagaaacgaagcctgcgtgcccccgggggctccgttttgctcccct

SEQ ID NO: 2784 - DNA, 201 bp, Homo sapiens
agtcagtggaaccggagggggacttcggaggaatttgtctctgatgtcccggctccctggcctcctattagaactcgtagaggatccgctctggagtccccgtgcgccctggcagaggtcggggacgccagagtgcacgcagtctcctgcgcgccgagcccaggctccgggcgcagggaggatcgggctgagagcagggtg

SEQ ID NO: 2785 - DNA, 247 bp, Homo sapiens
gcaagggccgggagcctggccttccatgaagctgtctcaggccgggaccagccccagccccgacggccgctgcggccccgcctcggcagccccgtgagcccgcggaggagtttcgcacccgaccgtgcacagcgaccgagttggcgcggcccgtatgaagcgaagcgccggcttcagcagcgcagtctgagcaggggatccgcgtggcaactagggctgcgcgcgagctcggggcgactgtggcggc

SEQ ID NO: 2786 - DNA, 201 bp, Homo sapiens
cccccgcgcgcagcccgcgcagcgctcagagccggacggcgcttcccggtggcggcggaggagcccggagggacgcagccgggcaaggcagggcgcagggcgggcggcgcgaggcgcagggcgcggcgggcagaggccacctggccaccttccctggcgcccggggaaggcgcggcgatggccggggcgcgcggggcggcg

SEQ ID NO: 2787 - DNA, 201 bp, Homo sapiens
cgccaggcccgcccccgcccggccgcccgcccgcccggtgggtcgcggtggccgcgggctgcgctgcgcgggccgggcctggcgggccgggggctgcgcgcgtccgcgagggcgcccgacgcgggctgaggggcgctggcgtgtgcccgcaggcggccctgcgcgggggacggcgcgctcctggacaccgccggcttcaag

SEQ ID NO: 2788 - DNA, 201 bp, Homo sapiens
cccccgagctccgcgatccctccgcctaccggggaaggagacctcagcgtcgctgtcctgcccctcctgaacgctgtccttgtccgacttggagccgccgcgggagcgcttcatgttgcggaaatactgcccccagcgctgccggccggcgtccttcttcagcctcttctccttggcccggcggttctggaaccaaacctg

SEQ ID NO: 2789 - DNA, 356 bp, Homo sapiens
aacacggagcacgaacataagcaggtaccgcacatctgcgagctattcgggtctccgggggaaggcaaaaagccccaacaagccttaagtaagaccaggacgcttctatagttttgctttgacagctaaggaaaaaatctgccaaaaaccagaggcgctgctgagtgttggcgtgggaatgctagtttagtcagagccttgctctgggccatttaaataaaaacagacatgttggtggcaaatgccagttgaacacgcaggagagcggtgcttctcgggcccggagaagggtttgcagctgcactctctcttcccttttctcttggcctccccagccttcttatcatcacgatcag

SEQ ID NO: 2790 - DNA, 201 bp, Homo sapiens
tcaacgcctgcctctacttcaagtcctgccacagctgctacacctactactgctcgcgcctgtgccgccgcgaggactgggacgcccacaaggcgcgctgcgtgtacggccgcgtgggcagcgtgtgccgccacgtactgcagttttgccgcgacagcggcccggtgcaccgcgctttctcgcgcatcgcgcgtgtcggct

SEQ ID NO: 2791 - DNA, 281 bp, Homo sapiens
agcctcgtgcgccggcccctgccccgccagccccgctatggtcccccatccacccccgcgggagcgcccctgtccccccatcctgcacttcccccagagtcgcgcgccagtttcccgccccgtggaagcgcccctctcccgacttcggctgatccccgctcgccgccctccccgcgggtgcgcgcccggcccctccctcgcccggggcgggtctgcgtgggcggtgctccgggtcggcgggcggagctccggttccccagccctgcgccccggtggagccc

SEQ ID NO: 2792 - DNA, 222 bp, Homo sapiens
gcccaggtcacacaccagatcccactggggatgtgagaagggtgcagcgggcgtgaggccccgccctcgccgctctctgcccgcccccagacccgcggcccgcctggccgcctcacctggccgatggcgttggtggtgagcacaggaaggccattatagtcccaatccttgaggcaatggttgaagtccggcggggcgaagccgctgcacgaggggtcggta

SEQ ID NO: 2793 - DNA, 237 bp, Homo sapiens
cgggcctggatcaggacggcgaggcgggccggcgcgcgcgcgaggtggccttcatccacatccagcgcgagctgcggctgcgcggcgtcttcctgcgccacgagttcccgcgcgtctacgagcagctttgcgagttcgtcgaggccaacaggcgcttcacgcccaccaccatctaccccacggaccggcgcaccggccgccccttcatgtgcatgatcatggccgcctccgagccgc

SEQ ID NO: 2794 - DNA, 201 bp, Homo sapiens
cctggttcctcaatctagcagtgcttttgaatgaacgtgtgacagcttaatgaagcagccgagtaccttgatttgaatgttggagccggggttcacagggggctgtattagtcagtacaggctgggttatgccactgtgacaaagagccccagatctcaaaccccgtccttgtgggtcagctgaggtctctgttccaggcc

SEQ ID NO: 2795 - DNA, 364 bp, Homo sapiens
gcttcaccagcctcccggccgagcggaaggcgccggcgcccagctgggtcaagttgttgtagctgaggtcgaggaacacgagcttggccgagccgctgaacgtgccctcctccagcgagcgcagcgagttgttcctgaagtccaggtagaccaggtcgccgtagaagatgaagaagtcctcggggatccgctggatgcggttgccggccaccagcagcttgcgcacgtccagggggaaagggtctggcacgctgggcagcccgcggtcgcggcagtccacggtgtgcgggtcggtgcaggcgcagcccgcggggcacgcgtgcccgggcgcgagcagcagcagaaggctgcagagcccgagcgc

SEQ ID NO: 2796 - DNA, 201 bp, Homo sapiens
gaaattaacccgctagaaaaatctcttgggagaggcgggagcggcaggggtggccgagtggccgtcgccaaaacgcggccccaccctggcagctgatttccgagatctggcagtaagacgccgcgcgcaccgggcgggctgcactcgacgtctaagttcagctaccaagcccaggagcggtttccctaaggcgtgtcccgg

SEQ ID NO: 2797 - DNA, 201 bp, Homo sapiens
gcgctccctcctggggtgggcagcgcaggtctggcctgcgggtggggggtggagagtgagaggcacgcggggcaccagctcagctcccctctggggatttcgtactcgcagtttaaggaaccggtggagcacgaactccactcctgagctggcgcaagcgtctcccttccatggagatccaccccggctcccctctgaggc

SEQ ID NO: 2798 - DNA, 201 bp, Homo sapiens
aggaaccggcgctgccggtgcctgggggtcggggcgcgggcgaagccgggccgcggaggacacaacaggtagagccgggggtgcccggccgcgcgccccccgcgcatcatgcagctctttgtcacctctctcgcccccaggccaaaatcctgagcatgatggaagacaataagcagctcgcgctccgcatcgatggggcgg

SEQ ID NO: 2799 - DNA, 222 bp, Homo sapiens
tgcgcgcgtgcgtgtgtggcgtgtgtctgggtgttttatgactgtcctccgtgaggccgtgtgtgagcccttgcgtgggccgtgagtgcggcagggagcgcggtgtccgggggccgcctgtcggtgtgtctgtgcgtgcttgtgcgctagcctttgcctctgcgagtgcgtatttttaggaccgagtctgtctatatgagcctgtgtctgtgtgtgtgcgct

SEQ ID NO: 2800 - DNA, 201 bp, Homo sapiens
gacaataagatctgttattgacgccaccgggttggtgatacttaggtacagcagccctagcaaacgaatacacccccatgagaactaagctccctgagagcggtaagctgccttgtcttgctcacagctgacaagaacacgcctgtacggtcacttagcacctagtactgccatttaaccgtttcactagtatgtatgaac

SEQ ID NO: 2801 - DNA, 265 bp, Homo sapiens
aggcgcacacgaggagcccggcccagtattcccaaaccagactccggaggcgccgccagggagcggtcatcgttgggcgccgccgagcgtgcccggggcgcggccgtggcgggctccctggggcggcagctctaggcgcgggcgcgcagcagccccgaaggcgccgcctggcccagccgcccggctcccgagcgccgctgcaagtggggggcgccccgcggcgccgcgcacatcttactggggggccgccccgccggcgcccgcc

SEQ ID NO: 2802 - DNA, 242 bp, Homo sapiens
ccgggctgtcttcgccgctcaccggagagggtcgtccgggtgtttggttttgttcgaaagtttctgggcttttttttttttttgtaaaatccaaagcaaccgaacaaaaagagtccaggccgcgcgggcgggctgcgcgcccgcgccctgcagcgcgccggcgggggcccggcccgcggggtcactgcactgagccgggcagtgtgtggtggtggtggtggtgcagcgccgccggcgggggc

SEQ ID NO: 2803 - DNA, 201 bp, Homo sapiens
ctccagggcgcagggccacgagctcccgctcccaccctcggcccctggcacccggcgccggctccgccgccctctctcacacgcacccttggcagggccccgcggggcgccccaaagcttgggggcagctcccaggtgtctctgggaagggaaagaaaggccacaaagcaaaagaaggagcaaagagaaggcgagggagga

SEQ ID NO: 2804 - DNA, 261 bp, Homo sapiens
tcgcccaccgatgagccgccgccgcccgcgcccgggtgcaggtgcgccgccgccgcgtgcaggccgcccgcgtgtgcatgtccgtgtgcgtgtccgtgggcgcccagatgcggcggcggcgacggctccagctgcgcctcgtggccatcctcgtgcagcgcgtggtgcaggcccggccccgcgccgccaccgcccgccgccagcatcccggccaggccgccgccgccgccccccgggtaggccgcctgcgcgtacagcccg

SEQ ID NO: 2805 - DNA, 201 bp, Homo sapiens
cggtgtcctgggccgagccgcttggagatcctagatcagcatgtgggtgggaaagggcgccccgtcctgggcccccccgcccctgcgcgcagagcagagacgcgcagacccgctcccactccgcttggctcccttggagcagccccggcggcggcagcgatgggctgggaggggccggcacgctggcctgcgcgggtcccc

SEQ ID NO: 2806 - DNA, 337 bp, Homo sapiens
gaattggacaacaatgtggcgcctgccattggccaggggaggcagacggcgctctgattggccgggcccgcgcccggggagccccgcattctgcagtgtccgaaagattcgaaactccaaaagctccactgcgtgcctctgggaggggagggggcgcgccaggaaaggagtggaaaaaagtgggcgaggaggagcgttgaaaatttcctgacaagtagtttccgtgcgcccgagagcgtgtgaattgctcctaattaccgtgtccggtgcgcctctctgcgtagacttgtgtaacctctcggcttctggggcgccggctcggctgcaccgctcttac

SEQ ID NO: 2807 - DNA, 201 bp, Homo sapiens
tgaagttgtttccccgggacaggaagggttaaatggctgcgcgtcaactcggcctcgactggggtgtcagggagcaagagccgcttgtctcgggggattccgcttggggggttcccaggggtcgccctggcgctccggccacaacttgggcggctctgtgcggcggccctcgcctgcgcctttgcgcgccacccaaaactt

SEQ ID NO: 2808 - DNA, 201 bp, Homo sapiens
cagtaggcagtgcgggcacagtgttgcagaccaccacctcgccaggtccgggcagcgcccactagacggacaggcgcccgcggccgcccctaccccggcgcgcccacctcgagcctctcacgccgcggcgggcgggcgcaacatattctcctacctccagccgccgaggaccacactctccgctcagccctctcgactcat

SEQ ID NO: 2809 - DNA, 201 bp, Homo sapiens
ccctgaaccgctacctgctcatcacccgggcgcccgccacctaccaggcgctgtaccagaggcgccacacggcgggcatgctggcgctgtcctgggcgctcgccctgggcctcgtgctgctgctcccgccctgggcaccgcggcccggcgccgcgccaccgcgagtccactacccggcgctgctggccgccgcggcgctgc

SEQ ID NO: 2810 - DNA, 201 bp, Homo sapiens
gctccgtgcgctcagtcctgccgggcgtcggcgacgcggcggccgctgccgttgccgccacagccgtgcccgcagtgtcccaggcgcaactgggcacccgcgccgcgggccagcactggtaacctagccggggcccgagggaagcggagatccccggcttccgacgtccttgggcaccgtcgcctccttccctcctagggc

SEQ ID NO: 2811 - DNA, 386 bp, Homo sapiens
tgcttgttgaaaaacaacattgtgatcacttccagcggcgaagggtgtgcttgggaacggtttggggaggggacagaagagagaggggtgggatggacggcggcagaagtgggaggtacacgaggagttactggaaacggcgcttctgtggaggagccgggggggatggggagtagagggagggggccctgttgcctcagcgccccgaggtcgtggagcggcagcagctgcagccggagcagcaccagcaacagcaacagcgagcgggacggagttaggaccgctcggagcgcacaggtctcgaggtagtataaggtttgctatccttccacttgctggcagttgcagaagaagatctgctttttaagtgaaacgtacatgccacc

SEQ ID NO: 2812 - DNA, 201 bp, Homo sapiens
aggccacataggggccgggtgcaggccccacgcggaaaggcgcgcagtgctcggggtccatgccggctcagggcgcacaggcctccggggctccggggctcgcgctgcccgcgccgcctgtgagcgcccgccaagggggagggacctgggcgcgggggcgcggagcccccgggagcggcgcgcgccgcggggggcgggggg

SEQ ID NO: 2813 - DNA, 201 bp, Homo sapiens
tgccagggcgcagggagggcggcactcggccccagtcttcgcaatcccgcgcgctctctccgccgtgggacctgggtccccgcgccgctcccctgagccccgagcgcgcggcgggcgggagccaggttgggactggtggtgaggcagggagtgaggagcgagcggagtcgcgtgcgccggcgcgcagctccgggtcgcccc

SEQ ID NO: 2814 - DNA, 309 bp, Homo sapiens
cctgggccgcggcggttcccacctcgccaccgccgccgccgccgcacggctgcccgtcgcgaacaagcaccggcaccaccacgcgacgcagcaggccgggcgcggcgtgcagctcggcggatgctgccaggtcaggcgactccgccgcccctggagcgcgagcgcgcttcagcttgtagcgatgattctggaaccagatcttgacctgcgtgggcgtgaggcgaagcaggctcgccagctgctcgcgctcgggcgcagacaggtaccgctgctgccggaagcgccgctccaactccagcgtctgcgcct

SEQ ID NO: 2815 - DNA, 203 bp, Homo sapiens
caccctgccctcggtcggtgacccgctgtggtccccaggccaagtgttcttcgtgcccgggcggctgacgctgtctgaagcccacgcggcgtgccggcgacgcggcgccgtggtggccaaggttgggcacctctacgccgcctggaagttttcggggctagaccagtgcgacggcggctggctggctgacggcagtgtgcgct

SEQ ID NO: 2816 - DNA, 388 bp, Homo sapiens
accgggaagcagcccggtgttccaagccttttgagattctccggacctgcgcgccgcccgctcggcagggggctcggcaggcgcgggcggcgggtgggggcgggaggctctgcccgctcggtggctgccgcggcctcctccgcgctgctctccacgcctggcttattatgcacgaggcaggcaatttgccttcctccccggggacccatctcggagacaagaaggtagtttgttctctgtaatggcttctgctggagtgcggcggggcccaggcgcgagcgggggcacgggcggggagttggcagcgaaggatgcgcccggcgccccccggcggccgcccggagcccgaggtcggcgcgggaggagcgctgactccgcgggccgagcc

SEQ ID NO: 2817 - DNA, 241 bp, Homo sapiens
gagggcggcgcgcagcggcgctccgcgaggtccccacgccgggcgatatggggtgcctgctgtttctgctgctctgggcgctcctccaggcttggggaagcgctgaaggtgggtggaacgagggcgcttgagtgcactcgcgggagggcggagagagggagctgggtagggacggggagggcaacgcctgatggggactggtgagacccgggacgcactggcgcgatctaggtagaaaact

SEQ ID NO: 2818 - DNA, 232 bp, Homo sapiens
gggctctttatctgcattttctcataaaactgccgtccgtgtgtgtttctgcgcctggcctcttgcatttctaaggggcctttgaagacagggccgaatgcgcgcgggggcttcaggcactttgcgctccacggcgggtcccgcagcccggcccgagccggccctggaagcttcgccctggactagactggcaccgacgccgcccccagcctgagcgctgagagggaaaacg

SEQ ID NO: 2819 - DNA, 214 bp, Homo sapiens
gaatcccttccagtgccgcaattaggaaagttttaaaaagtaaggaccctagacagacaagagatccatcctttcctttagcataagaaacaccccgcgccgcgccagccgaacgctgctcgcacaaggctatccgcccttcttggccgggacgcactcggtgccttccagctccccaccagaactggtccagggggcgcggaaacagagaggc

SEQ ID NO: 2820 - DNA, 250 bp, Homo sapiens
agcagggaccagctggtcgccggcccctcgggcaagatggggaaccgggagatggaggagctgatcccgctggtgaaccgtctgcaggacgcgttttcggcgctgggacagagctgcctgctggagctgccgcagatcgccgtggtgggcggccagagcgccggcaagagctcggtgctcgagaacttcgtgggcaggtaagcgcgcagggcgcggagtaaggatgcggcagtggggcgaccccgctgcg

SEQ ID NO: 2821 - DNA, 201 bp, Homo sapiens
ccaggaccctgcagacccggccgcggccgggccgagtgcctcccgccggggccttacgcccacggtccacgcttgcaacaccagggctgtacggcgggtccgcagctgggtctgcgcctgggactcggggctccctgcgctcctcgtgccgcaccccttgccttaaccccaagcggacgggtcctggggcttcaccggcca

SEQ ID NO: 2822 - DNA, 467 bp, Homo sapiens
tcgtttcttctcacgctcccccccccgccccctcccgcgtccagccccgctctccccaccttgtaaaacaaagccggggaaaatgcctgcccgtgcagctcggagcgcgcagcccgtctctgaataagaagtgagtacaatggcgtgtttgtaaaaaaaagcttcaagtccgtctttttcaaaaaacattttgaatgctgcatgcctcatgcttcccagcgcctcgcgggagagacccggctatagagcaggaggtgagaccccccctccggtacccccacccctctggccgcacgctctcctgccccagccttttctgggaggactgcaaatgccccctctcagcaagcggccgtttcccatcttcgcttcgcgtccaaagtgttgggtcataatctggatttggaggcaaacccttgccagatcctctccacgccgcttctcccccctctcccgccggtgcccgg

SEQ ID NO: 2823 - DNA, 201 bp, Homo sapiens
ctcgaggggctcacagcttggcactaatttgcaggtgttcgctgctgatttggtttcttcttcgatttgcggacggttccctccagcgactctcgacacacgttttcctgtcttcgccggagggccgggtctggggtcgccggagcctgcgggaatccagcgcttattcgctgaccctcgagtcgcttcgctagctgtgcg

SEQ ID NO: 2824 - DNA, 232 bp, Homo sapiens
ctggggtgctcccaggaagtgaaggaaaaggtccccgacgacattgtcactggaaaagtgctggccacggcctccgccttaccctctccacccacgggttcggagcccccaggagcagtcagaccgatcaccgctcctgcagcctcatttgtttccggagagacacccacaagccagcccacggagagtctggactcgcccgccccagcacccacgcctcccccgcgcccgg

SEQ ID NO: 2825 - DNA, 222 bp, Homo sapiens
ggctagggacagcaaaggagacacgggtgggtgagacgccggaccctacgagggcctgctgcccttctggcgcgggcgtggaggcactggccagagggcacgcccactagcccgagactttcgggatgaggccatttcctgagtccacatctggacatccacctctccgaatgcggtgacctcattcataccacagcggtcatcagcgggcctgagatcgtg

SEQ ID NO: 2826 - DNA, 239 bp, Homo sapiens
ggcttccaggcggagcgcgggcgcgaggtgcgggctccggggcggagcgcacgcccgggaggcgggaagtgggcagcagcgcccccgcctggcccctgtgcgccccgacccgacgcctccccgcccgaccaggtgcctcgagagcgcacagctgggagggctctcccggtcgcggcgagactcacgcctgcggtgtgctagggcggcggcgacggtgacgggcgtggggcgcggcgctg

SEQ ID NO: 2827 - DNA, 209 bp, Homo sapiens
cgccccgggggtccctgcaccctagccggggaatgctgccaccctgaggggggctgtctggctgcggggcgccggggctgggggtactgctcccccaggacgcggctccgcagtgcagagcgccgccgcctgcgtggggggatctggcagcttcaggggctgccctgagctccctggcgagcaggagtgagctgctgcggcgagtgagc

SEQ ID NO: 2828 - DNA, 380 bp, Homo sapiens
gaggccgggcctcggcgacccccgagggaggcccgggaaccacccccgacccaggcgccagacccggagtcgcacggggctcccagtccagccccgcgagcggctgctgaccgcccctcccgcgctcgccagggcccctgccccgcgtcagccaccgcgcgccttccccctgcccatgccgcagcccccgtggcttttgttctggactcgggatgccaggttgagacacgtcctgcaaacctctggcagaaatgggcgcaagggggtggatttcgttttcgcctcccgggctttttctttctccccgctcacatgccttctcattactcctcttcctctctcccattgcactttgatgaaatggttttgtctgtctaaac

SEQ ID NO: 2829 - DNA, 394 bp, Homo sapiens
cgggtcggcagggaccaagagcctgaaagggaacctgccctcccctccccgcagcccggtcattaaggcaagaaactgcaggcagagaagcccccgaatccgacctaggacgtcggcgcctgccaggatcccctcgcctgccccccgcgccccgcgcgcgctcatgccaccaccacggggagggtgcatgcggcaggtgcctggccgaggcccccgggagcgagtcgcccttacgtgctccagcttgtctttcctccgaagccagacgctggcgctgtagtcctgctgcttgacgctgctgtagaagttcgcgcccactcgggtcaggcttggggagggctccttggggcggcttttgagcctcatctgctcgaagccctcatggggggaggcc

SEQ ID NO: 2830 - DNA, 201 bp, Homo sapiens
cttcgtccgggtccctcaaacatgtcgcagcgtggctgctcactgtcccctctgggcaagaggaggccccagacatttccacgggatctgaactcccgagcgccctgcacggagcagccatcccgccagcaccccaaagtgaagctgctcacaacggacaagcccggagaccccatgagaggccggggtggagaagccggg

SEQ ID NO: 2831 - DNA, 557 bp, Homo sapiens
gtcgccatcgttcagcctcgctgcccaggtgggaggggtcacctgccgcggggtctccaagccagtgccgcttgctcccggcccccacccactgacagcacggcgtccgagtgaccctgtctagcctcgttctgcgctcctgcaaaccacgttgctgcgctaactacaaacctggccaacatgtctttgtaaccctatcatttaaaaacgcttccaggcacctggccgctgccagatcaggttcgcgggcccggaggaggtcctcccacctgcccccgccagccccggggaccgtgcgcggcctccgtgtggcccccgcccacgaggtccctcgggcaggaaccgccgcgcgacctctgttcagcggccgcgtcctggccacgggcgacccctgtcgggaaccctgttcccggctaagctgcgttcccgcattccggtggctctcacccgagctcgcgtttgctggctttccctctggctcctctgcctgaccccgattttgtctccgaactccactcccagatcctccccgccctggaacgccgacctttcccccg

SEQ ID NO: 2832 - DNA, 212 bp, Homo sapiens
agctgggttttttcccacctcaaaacctttattttcagtttttaaaagccaccttagcccgccatattgaaactggcacggtttctaaagactccttccccgcagttgtggcgcttccaagaaaacacgagtacggatcaggctctggatgagtgtccggccaccgagaatcagccacttcccaccctccaggatcccccagctccctccag

SEQ ID NO: 2833 - DNA, 201 bp, Homo sapiens
tttccaatggctcagtcgaccgtgtgcacaaacttgcgctttatccgccggggatcgctgggagcggagataaattcaatccccagggcaatcttggccccgcccgccccaccccatcctgtgcttaaatagagcctttcttgaagctgcgaacatttccaggccccttgggcagggctggaggggccgaggagagctatt

SEQ ID NO: 2834 - DNA, 201 bp, Homo sapiens
tcctggacaacaatgcgcgcccccgcccccccagaaagccagggacgcccccagtcgccgccagagctggctcggcttcccagcccctctccgtggcacccgcaggcgagacaaagttcgctcccggtgaggctgcgcgcgtccaaagcgtgcgggatgcccagcacggaggtccccaagcgggggacccctggctccccc

SEQ ID NO: 2835 - DNA, 294 bp, Homo sapiens
ggcagatgacgattcgccgagctcgccgcctgtcctcccggaggcgctcggagctgctgcgggctccggtcgccgctgccactgctgctgccgccgccgccgcgcggggtcacctgaaggttggggcgcggaagctcaactccgtgctgattgggctccaagttttctgcgccctcgcctcgtcccgagtgcccgcgaatcccccggacgcccacgcagaccacccagccacaccacaactctgcctgcggagagaggagaggagaaaaaggggccgcttcaaaaactttcaaa

SEQ ID NO: 2836 - DNA, 244 bp, Homo sapiens
tagtcttgagccggttgtcggccaggtgctgggcacacccgcgccgccgtcgccgctcgcccttggccgcgccagccgcagggtcctcggcgcccgggggcggcagcaggttggagcgcaccgtgcgcgtcctgccctctcggcgcctccgccgtcccggaggcccgggctcctcggtccccgccggctcccgctccatggccgcgtgtcgccgcgcccggctcctccgccgctcacgcccgcc

SEQ ID NO: 2837 - DNA, 303 bp, Homo sapiens
ggtctggggccatgggaacaggatcaaggccccctgagcgccgggcctggcttctgtggcttcgcaaacttttcagcctgtgtgccacggcgacgcgcagcggctgagtcggagcccacgcggcgcgcgcctcccgcgaggaacttttcggcttgtaggctgcttgtcactctcgctttccgacgcgcctccccctggctcgcgctcccggagttccctcccctcctggcgaggacctttcccggcgcccgcggctccgatccccgccgcgctgcgcccgctctcccggccccggctgccccg

SEQ ID NO: 2838 - DNA, 286 bp, Homo sapiens
aacagatccccgagctgaaaaaacaaaaacaaactggggagccagagcccctgaaagctccggtaggaaattcaatgggcctcctgttcctttaaactctcgctttcgcccccgctgacactttgcaaagccgcggcggcagcggcggggaccacgctgcggtgcaccaccttccgccaccctcccgcgctgggctggggtcgagggggcttcgcagagtcggtaaccgaaccggctctggtttgctttctccactccctagccactaccagaaccagcctccgcg

SEQ ID NO: 2839 - DNA, 261 bp, Homo sapiens
tggctgtggaattagatctgttttgaacccagtggagcgcatcgctggggctcggaagtcaccgtccgcgggcaccgggttggcgctgcccgagtggaaccgacagtttgcgagcctcggctgcaagtggcctctcctccccgcggttgttgttcagtgtcgggtgagggctgcgagtgtggcaagttgcaaagagagcctcagaggtccgaagagcgctgcgctcctactcgcgttcgcttcttcctcttctcggttccc

SEQ ID NO: 2840 - DNA, 201 bp, Homo sapiens
gaacgcgcagagagttccttggagtgccctgattttgtccccgagagggcccccaacctccgcatcctcttagtggctgtcctggcaggtgcgcgtcctgcggggagttgcgccccgggggctatcgccgagcgggagctgcctcctggaaccctgcccaccgcgaactgggtgcctactccccatttctgcctttcagtg

SEQ ID NO: 2841 - DNA, 201 bp, Homo sapiens
tcgcgtctcagcaccgagtgctccaagccctgcgcgcagcgccgggcttggaaggcggcgaatggctgcctagccgccgcccctactagtgacactcggccgccagcccccgcccaggatgtgcacatctgctggcagcactggcccgggtggcagtcaccgggccacccactccacaggtacaaccgcacccaatccaac

SEQ ID NO: 2842 - DNA, 201 bp, Homo sapiens
gcgccccgggaagtgcatggtcctaaggtccaaggcgccaggacccaggtccccagagccctcaatcagtgccattctcttccgcagcgcgggtgtcagccgcgagctcgtagcccctcgacacccgcctctctctggggtctccggggaccctttcagaggctgtaaaggtgtcagaagcccaaggcaggaggcagcttg

SEQ ID NO: 2843 - DNA, 201 bp, Homo sapiens
ccggcgccgtcgctgtcgctcgggccccgcgactcgggccgggctgtgggcgcgcggcaggcgggctgcggcggcggcgggacggggcggccgcgggttgcgtggggtttgtgcgcgcgtgtgcgcgggcgccggctgtgcgcgccgcgggcggacagggttcggccggcggcggtaaagttgggacccgcgggccgggcg

SEQ ID NO: 2844 - DNA, 201 bp, Homo sapiens
tgtcccggctgacctcgctctgcagccagcttgaggtcaggcggtcgctctctgcaggtcacaaaccctcggcgcaaaagtagggctttgaacgcgacaccgcaccagagcgcccagctaagcgagctgcctccacccccactgtgtcgggcggcgcaaactgcgggcgcaggcagaggagccgcggctctgcgccgggcg

SEQ ID NO: 2845 - DNA, 201 bp, Homo sapiens
ctgcggaggggccggtgggtcagagccaggccaggcagttgctgagccttcccctcccctcctggcgggagtgtgtgtgcaaggggccagggggcggagtcggagaaagggttgggggtgtccgtgtccagcgctcctccggacgcggctccacaatccagctgcgagaacagatggacgcagcggcggctcacctcgggg

SEQ ID NO: 2846 - DNA, 201 bp, Homo sapiens
cgcggctccccgtgggctggccgggccaatgagcgcgcggctgtaggggcggcgggcggggagggggcgccgagccctgcggatggaggcgcgggcagcgcggcgcgctcattccgcgcgggcgttgctggcggggggcggcgcagccactggacccggaccggggccgcgacccggggtggcgggtggcgtgggcggcgc

SEQ ID NO: 2847 - DNA, 201 bp, Homo sapiens
ttcgccgatccccagaggcaccggttgcgcttcctggtggcttggaacggcgcggagggcaagtttgctgtgacttgtcacgaccgcaccgcgcagcagccgcagcggcgcgagggggcccggctggggctggagcacaagcccgaggccgccgtgtccccgcccagctgggccggccggctctcggccgcggggttccgc

SEQ ID NO: 2848 - DNA, 344 bp, Homo sapiens
gccggccagagggcctacgcaagcctcgaaacccggggggacgcctcttccacccccatccctgcgctcgcccggggctgggcgcgccggggcgcacgcacgccggtttgctggcgacctggcgcatctgcccgcgcgccctggtctcagctgtcgcaggttcctcctgcacccacttccagtcttcaaagccagtgcagtcagcaccgtccacctggagccccaatcctctcctgcgattcccgcacacccactgcaccccatccaccacctccgggccgcgcaggtccgggcctgcgaagacacgcggcttacctccggccactccgttcatctggtcaaag

SEQ ID NO: 2849 - DNA, 201 bp, Homo sapiens
atccctccccgcggcgccccctcgcgcagcctccagactgttcagccggtgtccgcgggcgctcgctctctgcgagccccaggttcgcgcgagttgcctgcgggaggggtcggggacacggacagacgctgccctaccagggattcggaggacctggtgggcaagagcatgacccagcgactcccgcctcgggcaagcgcc

SEQ ID NO: 2850 - DNA, 218 bp, Homo sapiens
attattctctcccttgcccaaaggatttttcccttctttctgaccccacgaactcatctccccaacaggttcctaaagtatgggcggatgtgctccctctcgcccaccgccaggagccgagccccggcaggtgagcggtgcaaaacacgcacccagctgcccccagcttcctccgtccccgctgagttggctgtccccaccccgcaccacggcacccg

SEQ ID NO: 2851 - DNA, 234 bp, Homo sapiens
gcgcgccccgtgcgcccccgccccccgcgcgcccccggcccatccccgtccctggagagctgtcgcttgcgcccgggcgcgcggctggctgcctcctcggcggcggcggcggcggccccattagcggagcctccgcctatgattggcttcgcccgggaagctggagacgggcgatgaataattgatgtgtgcggtgcggtagccggacggcggcggcggtggcgggcagcagcg

SEQ ID NO: 2852 - DNA, 201 bp, Homo sapiens
cgggggcacccgggcaggggtgccagatacagtattgtatctggcaacctcccggggcgctcagtgtggttttcccacccgggagtctggaagggtctcccgcagcccgcaggagacgcagcgctccccgctcagggggagcaggaggacagctggccgctttcgggagccccaggcgcgaagcggcctctctccgcctca

SEQ ID NO: 2853 - DNA, 201 bp, Homo sapiens
agccatagtagtcgtactcctcgcagcgcgccggcgcccagtgcagcgcccccagcagcagcgccagcgcggccgtccgcacgcccccccccgccgccgccgcccgcatggctgcgccctctccaggtgcgcgccgcgcagccccccgacgctcggtgcccggcggcccaggtgttccggcgtgcgcccccggccctgact

SEQ ID NO: 2854 - DNA, 235 bp, Homo sapiens
ttccgcggcctgggggacgggagaatggggggtccacggccgccttgggtcctcaccgcgcaccgcgcccgcagcggagccccggagccatggccctgagcgagctggcgctggtccgctggctgcaggagagccgccgctcgcggaagctcatcctgttcatcgtgttcctggcgctgctgctggacaacatgctgctcactgtcgtgggtacgtgcggacagggcacccctgc

SEQ ID NO: 2855 - DNA, 201 bp, Homo sapiens
atccgtccaccttctacccctggctcatccaccgctaccgatatctgggtcatcgcttccaaggtacgtgccacgtcgcggaactgcagcgcgccgctcccgccgcatccttcactgcccccggcctgctccgggtgggcgcttggcaaggcctgggcggaggttcctccggctcgcgggccagcgcgccctgttgggaaa

SEQ ID NO: 2856 - DNA, 241 bp, Homo sapiens
gccaataacgggcgggctcttatagcccgaagccaaagcgccaaaatccgagggaaggcgaggagggggcggtggcggaggcggctgcggggccggggctcggctgagccttcgcctgcctaatcccatttgccattgtacgcgcccaatcgccgtatactccccgcatttaacttggatgacattttgatttcatcattagcatccggcgccggattgacgcagcctcgagccggggact

SEQ ID NO: 2857 - DNA, 201 bp, Homo sapiens
ggggcatttgcaccggggctgggcgggcgcacccagagccaggcgggcaggaacccctgcgcagccatccggtgcctgcatgtccctggcgcggaagggacgcctcaccagcctcggcgccccctccccctagatttcctccccgcccctccccactgcctgcctgctgcaccaccttccacccagatcacccagatcgtc

SEQ ID NO: 2858 - DNA, 201 bp, Homo sapiens
ggccggcgcgcgtgggccccggcgaggcggcgctgcaggagctttgcgggcagctggagcgctacctgggcgcggcggcccacggctgtggcggcgccaccgtgcgcgacgctctcttcgcggctaagggccgcgcggccgactgcgagagcccgcgcgagtttcgggagcgggccctgcgcgcctgatgggtcgaggcgg

SEQ ID NO: 2859 - DNA, 217 bp, Homo sapiens
ccggcggcgagcgctgcaccatcccacgcgggcgccgagccggggccgggcgtcgcgaccggagggatttcctgcctcggcgagtcagctccggagccctcgcgcagcgcccgcgccgccgctgagctcttctagcctttcatttttaaaaaagtttccccccgtgtgtgtgcgtgcgtgcgcgcgcgcgcgccgttctggcacaagccagccttga

SEQ ID NO: 2860 - DNA, 201 bp, Homo sapiens
cagggtcccgaccctccgtggggtacgcgcgacttcggcgcagatgtcagtccgctgccttccgggttgagggagcgaggactccagacgaccccagggccgctgtccaggcccagccccgcgttctccacctcgccacctcgctctgcggctccagcctggagatctacggacttcattgcgatctcttgcgcagtgtag

SEQ ID NO: 2861 - DNA, 201 bp, Homo sapiens
caaatgggccaaacaggttcgtaaggcccccgcgggtcccctggcccggaagttgagccgcgggtgcctggtctgaagttccgcgccccacagtggcccgcgggcctcggcggctcctgccctacgccctccaaggcaccaggcaggtggccccagggcctttgcccacgacaccccctgggtggggcaggaccacccctc

SEQ ID NO: 2862 - DNA, 201 bp, Homo sapiens
tgcagtccgcccggcggcgttttcgggcgagggtctggtgctggggagcgagcgcggagcgaggtgtctctttaaatacgctctgcagtgtgacggcggccgcccggctggaagagccatccccaccctgcggcaggagcccgcccgccgccatcgcccgccccggtccccatggttacgcgcctgcctccggccccgggt

SEQ ID NO: 2863 - DNA, 317 bp, Homo sapiens
cgcgctctgtcaccaggcgctgcagctgctggccgagctctgtgcccgtggggccctggagcacgacagctgccaggatttcatttaccacctgcgggaccgtgccagaccccggctccgcgacccaggtgagtgccgccaccgccgcctggagggacctaagggccctgggctgggacttggggccgcaccggggcctgaggcagaacagcgacgcggactgggagagggcggggggcggccaccgagccaggagagtgatcaagaaccagcgcactgtggcctgatgctgtaaccaggcggggacccgggcggtg

SEQ ID NO: 2864 - DNA, 221 bp, Homo sapiens
tctgcactgtggagtacgccatgactgctcacggtggtcgcaggtgcagacgccagccggaaccggaaccggaaccggagcacgggctgccgctcccgaccgaaccgcgggcggcgcggacggcgtcgcgcgagggacaaggtgcgcgaggcgcacgcatcttcacctccactgtcgggagttgacctgctcctcccgcgtggttacccgtcgctgtaaat

SEQ ID NO: 2865 - DNA, 201 bp, Homo sapiens
ccgagagccctgcggcgcccgccctcctgctggcggacgtgccttctgagtcgcctccgcgcaggcaagaggctgccgcccccagcgagggagagagcagcggcgaccccacccagtcaccggacgccgccccgcagtgccctgcgggtgcgaaccccaacccgatataccaggtgctctgaggggatggtggccgcccac

SEQ ID NO: 2866 - DNA, 201 bp, Homo sapiens
gcaggggagagcgagcatgttcctgccccgggcgccgtgcggtcgcagcagcagcgcggccctctccagtgcgagccgtgcctggaatgtctcgggtaagcgaagggccagcaagcgaggcgaaacggacactataaagcagagagtggtgtgagcttccccgccctctgaaaagatggcaagtctccgtttcgggaaggc

SEQ ID NO: 2867 - DNA, 201 bp, Homo sapiens
gagccccacgccgccgccgccgcgccagcggtggggggcgggctgggggcggggcggccggggctgccttcccgggcgcatatgcgagcgcagcacccggcgctgccgagccacctcccccgccgcccgctagcaagtttggcggctccaagccaggcgcgcctcaggatccaggctcatttgcttccacctagcttcggt

SEQ ID NO: 2868 - DNA, 201 bp, Homo sapiens
gggcatagccacggcaattcccagtctgctaatgccaaggcgggcgcgtaaggccgcctaaatctagacctccctcctcactcatttcaaaaaataacaacgtgccagccacctccgcagataccgccggctggtgcttgcccaggagacgccagggccagagcgccactcccagcatcgaaatggcagagagaaagcgca

SEQ ID NO: 2869 - DNA, 230 bp, Homo sapiens
ccggtgtctcctcccggccgctctacccagcaactttccgtgctttgttccccgactggaaatgctttacggaagcgtcttggacagggtctccgccaggcgacaagagctcggtgctgagatgtgttacgttctcatctccccatcaattatggatggaaacaaataaggaagagtcaattttgctgagccccttctccggcaacgagaggcgttctgcagccgggagg

SEQ ID NO: 2870 - DNA, 201 bp, Homo sapiens
gcttccccgagctggccgcccttgcagacccccacgctcagctgctacagcgccgcctcgacttcctcgccaagcacattttgcactgtaaggccaagtacggccgccggtctgggacttagtgtcaccgggaggaaaagagagagatctggggctggggtatggatgatggggggaagggcggtcgcctctgccactgtc

SEQ ID NO: 2871 - DNA, 201 bp, Homo sapiens
ccgcagacgccggaggcgccatggccgccaagcccggcgagctgatgggcatctgctccagttaccaggcggtgatgccgcacttcgtgtgcctggccgacgagttcccgcagcccgtgcggcccgccaagctgcccaagggccggggccggctgcggcggccgcgccagtctcgcttcaagacgcagccggtgaccttcg

SEQ ID NO: 2872 - DNA, 201 bp, Homo sapiens
gcagctccaggaagtcgcagtcgccgccgtcgtccaggtagagcagcagcgcgcgcgtggcgttggtgcgcaggctgaagctgagctcgccgctgctcgccgcgcccgcccagcgcgcgtagcgagcccactgcccggggccgccgccgaactccaggccgtccgcgcgcgccgccagcgccagcagcagcagcaacagca

SEQ ID NO: 2873 - DNA, 201 bp, Homo sapiens
aagctcctatcccttggacccgggcctggcgcccccgcccccggcgcgtcctcacccggcggacgcggccgcgcacaaggcccagcacggcccgcgtccccgcagcccggccgcggttgaacatctccagcgcgaagcgggtgggcgccagcagctccggggacggcggcccccaggcctgaaagctggcggctcggggct

SEQ ID NO: 2874 - DNA, 201 bp, Homo sapiens
ggttccccagcctgggccaggccggggcgcgtgtctcgggccccctgtggctgcaccgcgcgccctgtgcccacgggcgaaggcgctggaattcggcgctcggagcccgagtttctgaaggcgggaggcggcgcccgacctcaggggttgcgctgggctgccggagccaagagtgtctgcgtccccagccccgcgtcagaa

SEQ ID NO: 2875 - DNA, 201 bp, Homo sapiens
tcagagtgtgactgagcgggttggcccggcggccgttgccccccgcccccgccccttcgcgcctggccgcgccactcactgtcgcgggtgtccgcgtgcgcgccgccgatgcggccgtcggggagcgcctggaggtggaagccgatgcccacgttgcagtagagccgccgcagccgcttgatgcccagcaggtagtcgccg

SEQ ID NO: 2876 - DNA, 201 bp, Homo sapiens
cattcagaaaatggaaagctgagtggtcgatgaaccggaactgggagcagctttctatgaatcagagaaaatgcaagttaaaaggagacaccatttcccacgcattagactggtaaatatcaggaaataccaagtcttgctgaggaggaggggcccagggagttctcacaccatgtgggtgggattgtaacttggtacaac

SEQ ID NO: 2877 - DNA, 201 bp, Homo sapiens
tctccgggacggacgctccaggcgcggcgccgagtggaggcgagggggctgcggagggggaaggggccacgcgggccacggggtttaacccctgactccccgcgacgccaagaatgcaggagggcagagttgagggagacctcaggtggaactttcaggtggggaaggctgagctgtcggggctgcgggtaccgggaaggc

SEQ ID NO: 2878 - DNA, 201 bp, Homo sapiens
ccgccgccgcctgcccgggacggctccgtgaagaaggacggaggcagattgcgtgcccgcagcgggaccttcctggcccctgggatcgccgtggcccccgcggggcctgccacgtcccctcccgcgcccccagtgcccgcacctcctagcccggccgccggcgcagccacctcaccccccgccggctcggcacccccgggg

SEQ ID NO: 2879 - DNA, 268 bp, Homo sapiens
gcggccagacttcggctttgcaagctggcggccgcggcggcctgcgacgcctcccgccggggggcagccttgccgtgggccggggccgcgactgtcggggcgctaggggcggccagcggccgtttggctggcgtgtcggcggcgctcggggagggcgggccggggggcgcggcgcccatgaggccgctgcagcgcttgatctgcttctgcaggtacttgcggtggttcaccttccgcttcgacttgcccggcttgtccagcgccagct

SEQ ID NO: 2880 - DNA, 614 bp, Homo sapiens
agagtcatcctgcccgttgttctggatcttgaaacttgggagacccacaccaaaggagggaaccggttcctttaccctttaagcgcgtcgtgtcctccaccgcctcttctcttggcccgactggctctggtttccttcacgttcccagcctccaaattggcgtccgccccatggctcgtgtaggacgctaaaagcacggtaaatcccagggcgatctccagcagacgccctcgacgcatgatgccgagccgccaccggctcccgccgcctcttgccgcgcccggggctcggtctgcggccgccgctgcgccctgaagcgcaccgcgccgccggggtcccgctatcccgccgcccgtcccccgggccgggctcctcccgccttctccaggcgctgctcccacttcaggcggcccctgccagctgcaacacagagacaaatccccgaggcggggagactttcagggcatcgggatgctgaagcctcgcggtccccattcccaagcccaacccgtgcgccgcctgcgcgtggcgcagttaatttgggtaagggaagaccgtttggtccacagctggctggaaagcccaggcccccggcggcagcagccccggccgat

SEQ ID NO: 2881 - DNA, 201 bp, Homo sapiens
gggcaccagctccgagctcaggccccactcccgggcggttcgggacgaatcccctctacaggccagtgtgtgtgcagggcaagtgtagggggctgaggggcgctggcggggaggcagtagaggtggcctggaccatcttggcgcggcgcgcggtgagcgcgaggattccgccagtgggagtcgctgagctaaagtgcatct

SEQ ID NO: 2882 - DNA, 201 bp, Homo sapiens
ctcgcggcgacggtgacgcgctctggctctgacaagcctggctccccccaccctaccgggtggcgccgttgctgaccccacgcccagccgttcccactcccgcctgaaactcctccgacagggcttcgcttcgggggctcagtccccagcgcgtacacactcgcgtggtgtcggcttagcctcttgtaaaggaagcagggc

SEQ ID NO: 2883 - DNA, 201 bp, Homo sapiens
ttgcagccagccggcggtccaggtaagagacaaggtgtgagtaaaggcttctgatggccgggtggcctgacggccaggtgcgagtggggaggacagctcacgcggcctgagcagccacccctggccatagctccagcccccgcccctgcccccggcccctgccctggcttgcttgcgcgctacctcgctactccgcagtgc

SEQ ID NO: 2884 - DNA, 201 bp, Homo sapiens
cgctcggccgccgcctccagccaactcgggtccctcccacggcgaccaatcagtgcgaagctggctgggcgggaagccgcgagaggcttttattgcggcgcgggtggcggccaggagctgccaggacagtctcccggtgcttcagcctaacggtctcgctcactcaccgccaagagaaaccccgccctgcggccggtcccc

SEQ ID NO: 2885 - DNA, 201 bp, Homo sapiens
cgggtactgcgaactgccgggcgatgctgtcgctgccgccgtgatacggagagcaacagttccccagcaacacccctccccgacacaggcacacaccccccgacaggcacgcacacccaccccacagtgcccggctcggctgcggtgagtgaggggccgggaagaggcgcaccgcccagcgagcgccgcgcgccggggctt

SEQ ID NO: 2886 - DNA, 261 bp, Homo sapiens
ggaccggcggtgacaccggagctcgccgtgcgctcccggccgctctcggtgggtgccggtctctgcacctgatgcgttcgggatgcctttcccaccctggcgcgcccgccgctagctcgcacagcgcctcgcacactcccgcacgcgcttgaaatgcgcacggtcccgccggcccgcggaaccacccggacgcacggagcgctccgcaccgactcgctcgccgcctccccgagacgctcgcaccgtgcttgggccgggcgc

SEQ ID NO: 2887 - DNA, 201 bp, Homo sapiens
cggccagggcaacagccagggcaaagggagagagaagccgccccggggcgagaaggagaaaagttagagggctgaacaggtgacgctgagcttgttggagcgtgtgtgctccaccacgcaagggcgcggagttcggccgcctcatctcccgccatctgcgcgcccgggggcacgtcctctgcgatagcctggaacccagac

SEQ ID NO: 2888 - DNA, 201 bp, Homo sapiens
gggcatcggtgccgacgccgcgagggcagcgcccgcggcgggaatactaatgcaccctaaagggcacggccgccgccgcagcaggtaattagctggaccgcggcggagcgcgcggaggtggctgctggctgcaaggactgcgcccagcctccgcctcgcccctcgaggctcccgcgtgggccggcgggcagtgcgtgggcc

SEQ ID NO: 2889 - DNA, 201 bp, Homo sapiens
cctcctgtcccggcctcgtgctcccgctggggactgtttgcggtgagtctgtcgcacgcacgtcagggccgaggcagtgatgcggggcagcgtgggaggacgggctgcggagcccgcgtcatcctgcctgtggggagcgctgtgcctgctctcctgccagcgcgcccagctgtcccggccgccgccacgcgggactgcctg

SEQ ID NO: 2890 - DNA, 201 bp, Homo sapiens
ggaaaatagggcatccggagtgcaggagattcctcagggccgcccccttctccgggggtgccctgaggaaccgcggcggggactcgccgctggcagcctgcgggtcctggtgccagcgcgcatgggcgggctgtgcggacgtggctggtcctccaaaggtttcagatcccgtccgggccgctcagtcccttaaagctgtgt

SEQ ID NO: 2891 - DNA, 219 bp, Homo sapiens
ccccgggccaggaagctgtcaggcaggggagggccagcgccagctgtggacgttccgggacagcccctcaccccagtccctgtccctgccctcggcgcggcgcaaacgcaaaagcctccgtggccgcagctccagccccggtggccgcccgacccccgtcgggaccccggctgcacccactggagaagcggcggctccgactcccgaggaggcggcggc

SEQ ID NO: 2892 - DNA, 268 bp, Homo sapiens
cctaccactgcctcttcctcccgctctctacctccctgcagcgccaagccggctccccaacctggtctgctgaacgcaaaccgctgagagtttgctgcaccgccccctggggcccctggctgccgagtcccgctaaggcaaagacgccagcaagcgaggaagcgcagcggaagaaaaacaagcgggcgcgcgaggggagccccaggagggctgccgagtggctggcaggcggctcccgcccctcccgggtggcctcgccggcggctga

SEQ ID NO: 2893 - DNA, 201 bp, Homo sapiens
tccttcggccccaggattggggagtgtgccgcggggccgagggtggggaacagccagagggagacgcgaaccaggccgctggcggagggctcagggggagcgcagaggcgacggcccccatgccggcggccaacatgatggagaaccggccgctgcccgccctgcaggtgcccgagccgcagggtgcgcccgagggcagcc

SEQ ID NO: 2894 - DNA, 517 bp, Homo sapiens
cagagcgcgggcctccgggtctcaccccgggaaaagtctgggtctgctctgcgctgttgcgtgctgcgctcctgggacctgctgactgtcctagagggaacgtcccgcggtagtgtcagttccctggggaccaggaagggcgactcttgcctgggagtcagtgcttgggccgtcgggtccgggtaagcgctgggggtttggctcgagaagatgcggataggtggcctagggcgccgcggatctccgccctctgcgggcaccgggagcccagggtcgaggcgcgccgccccgaggggccccttctcctaacaatgcgcccggaatggagtccgcgccctgacagcgcgggtcagcccgaaaccgcccagaatccgcttcgatgagtgggtgagccgctctgggagtctgccgcgtctcggcagcggagggcctgagtggaaaaattcttattggatgcactttttaatggttggtttgcctcggttttcgtccgagtcttccccggcagtaggcgctg

SEQ ID NO: 2895 - DNA, 226 bp, Homo sapiens
cgcgctctcccagccgcggccccctcccccgccgcttcctcttgctctcccagccccttcccccacgtgtggatgacgtcaaaattccgcgaaaaagccgcgtggtggctccccgagcggaggcgcgattccgccgcccagcggccccctcccgggggcgcctggagggggagaagggcggaggcggccggttccttctcctcccgggaggcaggaccccccgacg

SEQ ID NO: 2896 - DNA, 201 bp, Homo sapiens
tttccgggaggcgagccgcgggctgctgggcgcggaggctggagccgcgagaggttcggctgctgaagcggccactgcctcccagagccaggctccgcgccgcgcgtccccgccgccgccggcactgtgcacccacctactcctcggagattggggtaggggaaaaaagttttgaggcgctctcatctctgcctccggggt

SEQ ID NO: 2897 - DNA, 212 bp, Homo sapiens
tcccgggcgtctggcatcctcccctaccggggccccggcggcgcgcggcgtctgcccggaggggggctcgggcatggtgctgcggcagctggacccgccgcgagctccccgcgctccgccgccgcctgcgccgcggagttggcccagctgcaaataaacagcagtccccccgcctcccccggccatcgccacctcctccgccccactgcgca

SEQ ID NO: 2898 - DNA, 388 bp, Homo sapiens
ccctcccggttacctgtgctgcttccgccctggctgcccctgtcccgagggaagatgcccgagcacttctcccactccacctggccggcgaagcacagctcggtgacgatgtgcagagccttctggcacagactgttcactccgtcctccttgtggaaactcatcgtttggcttttctttcgttttctctttttttcccagttagccgtcttttcctcttcccgtacctctaacccctctggcgccctaagccatagtccgcccgcggtgactttggctggagattgcgccgctgagagccggcaactcttaggagccccacgttggccccatggcgggagcggagggcgtaggggaaggagaggcgcgcgaggaggctgcggctgcc

SEQ ID NO: 2899 - DNA, 201 bp, Homo sapiens
ctcctggatgccaaacccggtctagggagcccaggagccgttgcagcctcagctcttctccctccctctctcgatgacccgggcaatgccaacctcctttcgggattgaaagctctaaatccaaggtgctaagttgatgggcggtctttgctctcacccctcgatttcgggcgcgtgtcttgaaagacaggagagaaaaaa

SEQ ID NO: 2900 - DNA, 201 bp, Homo sapiens
ccgtggcactctcgctagagcccaagcagtcccccaggcgtggggtctggtggacgctggcctggagcgcccggagggcggggtgggggtgggggggacgcgctgtcgtctggggtgtctccgcgtactcctgttgggcgaaccctggctctccggtgttggttgtcacttgagcaactgatgggcttccaggggaagtaa

SEQ ID NO: 2901 - DNA, 212 bp, Homo sapiens
cccgccgcttcccccccaccccgccccccaccgccgcccttagccctcccccgggatgagagagagtcgcgctgcggagcaaccccagtggatgggtccgcgggggctgagcgggcggaggacgcgggaactccgtgacaccgaccagctgacgctgcccgcgtgaaaccagagccgggcatcagggcctcatctccactgtctctgcacct

SEQ ID NO: 2902 - DNA, 250 bp, Homo sapiens
caggagggtgggtgccagcctttcttcccatctctcgagcctcctccccggcgcccacgtgggcggagcagcgcgagggtgtgcgtggcaggggccgcggcggcgtgtgccgtgcgtggggtggggtgcgggctgggcggcctcgccttcgggccccgcgccgccggggcgcggcccccagctccatcttctttgccacctgggcggagatctgggggactgtgacctaccctgcggaagacacggaggg

SEQ ID NO: 2903 - DNA, 488 bp, Homo sapiens
acacgccccccgccagcctgggcgccgggctccgaacccccggtctgcaaacttgcgcatctcccctcgccgcgcccgccagacaacttggcgaacagctcgcccgcccgcaccccgcttccttcggcccttccttcaaatcccaaacgcaccgccgtgctccaaagaaggtgtccacgtcgcccccagaccccggagcgccccctctccacccccgggacttcccaggtcgctcactcctcccgccccccgcccagatctgagagggaccgaaaacacacccccgactcgggcagccagggccgaaactgtcaagaggagaaaaggtaaagcggaaggagggtggccataaacagatttttttgccccttcttaaaaggacactgccgctttaaaagtttctttcccgggcccccactccccgcatctccgtattttgggggagcgtatttaattgaggcaacgcagctttcctccagtgtttgcag

SEQ ID NO: 2904 - DNA, 201 bp, Homo sapiens
ggctgaggagaagggagggagagcagagggaggggggaacccggccgggggaggaggagagaggcgaggaggcggctctggcagcgcgcggcggcggcggcggtagcggcagcagcagcggcggtgcggagagcttggactgggagcccaaagctcggctgggcagcgggagaggaggagccgcaggagctgcagctctgc

SEQ ID NO: 2905 - DNA, 364 bp, Homo sapiens
tctcataatcaaggagtatggtggagctgggtcaatttcaggcacagcccagccgagtcaggcgaggtccagagagacctgactcgcctggcagcctcaacggacttgtccccgcagccgttgcggacctcccggtcgtcatggcgactgtgaaatgtggggtggggcgcatgcgttggaagccattcgcgcgggcagtccctgagtgtcccctcacgtgctccccagcgcgagcagcacccccgcctctgcgcttcccagagcgtgcagcttccggtgagggcagccccacgcacagccccccacaccctccccagcgcctgcagcctccggtgcgcgcaggccccaagcccacatgcgcagt

SEQ ID NO: 2906 - DNA, 220 bp, Homo sapiens
gcccccaccccgagcgcgcagctccacgcagcctctccacactctccccagcgcctgcagcacccccagtgcgcacagctctgccagtcgcttccccgggcgccgcccctgcaccacttcggcccataaccttgcggcgactgtctgaagaacttcccgtggtttcattcttttcttcgggtttagtcttagctgtgacattttaaccaaaagattacac

SEQ ID NO: 2907 - DNA, 201 bp, Homo sapiens
ccgccctccccgcctcgagcgatctcctgcctcagccttgcaggctccgcactgcagatgcctgctggcttccctgcgctcggcggctcccgcggtgccccgtaagtccccgtgaccctccagcaccagccggctgtgcgctccctgctcccacgggccggtcagccgcagacactcacccagctccgcgagctcagccgc

SEQ ID NO: 2908 - DNA, 201 bp, Homo sapiens
ggggcaccgcgttggcacctgcagggagcgattggtctggaagggtagagggcagacgggggcctgggtggggcagcggccaccccaggcgcggagaacccgctgcttccaccctctccccgcggacccccaccctgcggcctgtgtgctcggctttctccgcgtggcggggaagtgcgggtggctgcccgggccctcaga

SEQ ID NO: 2909 - DNA, 201 bp, Homo sapiens
gtgtcggcctccgaacgcaccccgaggcggggtgagggctggcagtcgcccctgcacccgccgctgcgagccgcgcccctcaaacccaggtatgggacctcggaaaatcgacccgctgccctgagtgctcaccacgtgaggaactggagtggccgagttcgccaaggcgccggggacacctgagcagatgagaactggagc

SEQ ID NO: 2910 - DNA, 358 bp, Homo sapiens
gcgcagcgcctgagcctgcgcttcgccaagtgcaccaagtacgagatccagagcgccatggagatcgtgctgtcctggggcctggccgcgcactgtacggcggctgcgctggccgcactgtccctctacaacatgagcagcgccggcggcgaccgcctgggccgcggcaagtcggcccgctgcggcctcaccttctccgtgggccgcgtgtatcgctggatggtggacagccgcgtggcgctgcgcatccacgagcacgccgccatctacctgacagcctgcatggagagcctcttccgggacatctactcgcgggtcgtggcctccggggtgccccggagctgcagtggccctgggt

SEQ ID NO: 2911 - DNA, 201 bp, Homo sapiens
ggagcccccgggcgcgccctgggcgcattggggaggtccccgggcgggcaggcggacgccctggggcggcgggcggcggctgccggggctcgccggggctcggccgcccgctgcccatcgataggtattaggaattgatctcgccgctgctctttgttcggttcagtcatcgattagctgccgcgaccatggagaagcgct

SEQ ID NO: 2912 - DNA, 328 bp, Homo sapiens
cgcagggagggagggggcatcgcctgtttctctgctcgaaaggtggaggtaaagagggatcccggaccccagagaggcttacaaccttccataagcaaggcggggggcggaattcagagaggtaaagtgacccgcccccaaatcgcaataccaggaggacagcagggctagatggaatctttcggttcacagtccccgacctcgggcaagtgccccactcgggcgcacggtctgctcccagaccagaaccaggcgcgctcgtagccaaggaagcttggcgggagactcctccgaggctcccggctcccaggccagcggggctaaggag

SEQ ID NO: 2913 - DNA, 201 bp, Homo sapiens
cgttcggtgaagccggtgcattcaccacatcctctgctgctcctagcagggaagccggcggtgaggcgggggagcaggcatggtggctccggggtttatgcggggtttactgcttacccagaatagcggctactgctgcctactagggcgcacctaccgctggagcctccgcggcgactgcccacctccaacacacacctc

SEQ ID NO: 2914 - DNA, 319 bp, Homo sapiens
tggagccggcggccgcgtccgcgccgctgctgcctggctcgctggcggcggggtcgggggctgccggagctgactccatgttttttcccaatgtagagatcgctggagatggcgagctccgagactccctctatcttctgttttcagagcaactctatggtaccaaaaaaaaaaaaaaaaaaaaaaaaaaaaaaaaaaaaaaaaaaagaaggagaaggcgaccggcgaaagcaggagggaaaaagcaggcggcggcgggcgggcaagcaaaagcgcgagggagcgcgcggagtgtctgggtggacgtgtgtgtgcgccc

SEQ ID NO: 2915 - DNA, 201 bp, Homo sapiens
accgcgggaggagagcgcaaggaggctcctcgcaaagttggaggccaggccggagcgatgttccgggagcggagccctcccagcctcgggcccccagccgcggacagctggcagtgccaaagactccgccattacctgcggctcgcagttgcgattcggccgcagagtcgggcaccgaggaaggcgtaaagttgagcttgg

SEQ ID NO: 2916 - DNA, 370 bp, Homo sapiens
agggcggcccggggtgggggcgcctcacctttgccctccatggcgtgcacgaagtccccctggtacagctggctgcgaagcttctcctccaggctgaagccgcggacgctgacgatctcctccacgtccgacaagtcctcgttctcgtcgtatcgctggcggtcaatcgggcgctgcgaggacccaaaccagagagcccgggacattattgtgggggctggaggtcgcctctcaacctgggcccagcactaacaggtgcagcagccgagcgccccctgcaccccaccattgcaacccaagcaactttgcgcaattgccaaagatgctgaaaagcaggacaaggagaggggcccgcaccccgagggtccag

SEQ ID NO: 2917 - DNA, 201 bp, Homo sapiens
gctatgttggaacttggaggggaggggggatgctggagaggcacacggtgatggacatggaaggacccgggaggtgtggagtggtgggcccggcccgtcgcgggaaggacacagagggacataggctgccctggagaggcgctttcggacatctggaggggcgcatagtgctgggacttggcggcgcctggggcggagggg

SEQ ID NO: 2918 - DNA, 201 bp, Homo sapiens
gtcccccgcccccacgccgcagcccgggccagcggggcccgccgcggtggcgttcgcggatgctgccgcattggccgctgcggcacggacggcgcagcctcgggcgcggcccggcacaggcgccggcggtccccgccagctagcagcccggcgaggcgctggcccacccatggtcctcgggcggcggcccctgcgcccagc

SEQ ID NO: 2919 - DNA, 201 bp, Homo sapiens
atccgctcgtccgtgggtgagctgggaggggcgcggcgagggagggtgggcccggggcgggggcggcgcggggcgcgcctgcggttatgcgacactgccccgcccgcgccccgctcccctccctgggctccctgggctctctgggctgcaggatccgccgacgcggcgcgctggccgcacgggggctgggcgtcgctgcac

SEQ ID NO: 2920 - DNA, 263 bp, Homo sapiens
tgggctactcgtgtcgcatgtcggcgcagttgcccgctgtggcaaggggggggcggccgggctccggagcgggccgggagggcgcggggcgcgcactccgcggcaggtgagcggcgcggctgcaggtgagcagcagcctcggctcgcgcgcccagctttccccgccgcgcccgcccggcccacacgctccccgcgcgcgcgccgcccccgccccgcgcgcgcccggccgcccgcccgcccgcgggatccccgcgaggccgcgc

SEQ ID NO: 2921 - DNA, 201 bp, Homo sapiens
gttttgttttctttgtttttaacgaattggtaagtaaaatattagttgttcaccctgaaatctgccctaaccacttccgtaccccctgaagctcgctgggcgcgccctgggctgtccttccctgagcagccgggcctagagtcaaggcgcgatgattgccgcgcaagctagggtccacgcggccggggctcctctcccgcc

SEQ ID NO: 2922 - DNA, 201 bp, Homo sapiens
cttcctaccccggcacctccttctggtgacgtcaaggggtcccccacccctcatccgcctccccacctaccctcttcttcctcccaggctcgcttccctgcggctacggagaggggcgggggccgacgagggcgggtggcccggggccgagcgcgcgtggggaggtgctggcgacgcgggcccgggagcgcggccccggca

SEQ ID NO: 2923 - DNA, 201 bp, Homo sapiens
ttactcagctctgggggccgcccgaaactggggaagggacaaggctgaagctccgccgcctggccctaggggcggaaagtccgatccaagggaagctggccgcgcctccgcgacggtgttcttggcacggaggactgaggcgcagtccggctgtctccccttgcctgctcttcccgcgctgtcccgccgctcctgacccct

SEQ ID NO: 2924 - DNA, 201 bp, Homo sapiens
cgcggggtcgggcggggaccggccgggggcgccgcgcgcccggtcgggttgactgtcgggggcgatttccgcggggcaaggcgggggcgcgggagcagcgcgcagctgcggggccattccacctgagcgccctgaggtcagggccggggcctgaggacacggcgctgggctccgggggacgcgggttcacgccggcgcccg

SEQ ID NO: 2925 - DNA, 215 bp, Homo sapiens
ccacactcaccgtcccgggcgcgccgtccgcgcgcggctccgctccgggccggcatcccccggctcggctgcctccggtccccgctccggcctcggttcccgctccgcagggctcggctccgcgatggtggccgcggcggcgagcgcggcagggagggcgtgtgtatgcgcgtgagagcgcgcagcgtgtgcatgtgcgtgtgcgcgggagggtc

SEQ ID NO: 2926 - DNA, 201 bp, Homo sapiens
cgcgagtgctccccaatggcagcgcgggcgtccccaaccgcgaggggctgcgctactaccggcgcctgctggagcggctgcgggagctgggcgtgcagcccgtggtcaccctgtaccactgggacctgccccagcgcctgcaggacgcctacggcggctgggccaaccgcgccctggccgaccacttcagggattacgcgg

SEQ ID NO: 2927 - DNA, 201 bp, Homo sapiens
gtgccagcagccccggggccgcccgcacgcaacgcccccgggtcgggccaggctggccagggcagggcggccgcctttcgaggaactgcgggcggggcggcggggccaagctgagcgcccgccctgccctcggcgccccgcggctgcgggcggagcgggctctgcggagtcccccggccgccctccccgcagctcccgtcc

SEQ ID NO: 2928 - DNA, 201 bp, Homo sapiens
ccaggttgtctgcagcgtcgccctgttcttctatttcagagcgcaggtgagtggccaccttcccaggggatcgcggctgagagcgcccatctccttcccccgcacttggaaactgagtctggcggcagggctgggccacccagagcttgcatattccggaagggaaagtgactccagaagggagagaggaagtgttgagtt

SEQ ID NO: 2929 - DNA, 217 bp, Homo sapiens
tgtagctggtgctgctcctgggacgatgtagacgccccatatccaggcgcgggtgccaggtcgccgggcaccagctcactcccagggcctgtgagctgcgcgcattccctcggccgcgcattccctgggaggctgcagtcagagcgctcttgaagggagggcggcagaagacactccctctcggttcatgcaaatcgctgggggaacttcagccaat

SEQ ID NO: 2930 - DNA, 317 bp, Homo sapiens
aagcgagcgaccctctgagcccgggtggtccggcgggcaagggcggcgcgggagacccgcagggcgcgggcgcggatccggggaaccagggccaccgctgcgggcggatgggggtcaccgaggcggctcgtctccaggcgcacacttcgcacatctctttgctaagtgaaggggccaaaatgcacagatgggggagtctacccaggaacagaggcgcgagacgtatagccacccctgggttgggagcacgagccagcagatccccggagcgcgttaaacggacaacatgcccggtgctgcaaatagaggcttttgct

SEQ ID NO: 2931 - DNA, 201 bp, Homo sapiens
tacccctgtgggggggagggtgcagcgaaggctgccagggaccccgcgatcgcgccttaacacgtattggagcgagtgtgcgagtgatcatgagtgtgagcgggtgcgagcgctcggcggggctgaccgtcacgttggcggggccggcggggccaggcagtcttctccgcgtccccctcctcccgctccgtgcctcccctc

SEQ ID NO: 2932 - DNA, 201 bp, Homo sapiens
acggtgccaagggattcagcctggcggacatcccctaccaggagatcgcaggtaagcgcgggcgcgctgcaggggcaggctgcagccctcggctgccgcacgtcccactggccgcccggcgtccccttccttccccctgttgctgagttggtgctcactttctgccaccgctatgggactccgcgtctccgtgttgggcgg

SEQ ID NO: 2933 - DNA, 201 bp, Homo sapiens
gcgccgcagcctcccgggcaccggcggcggtgaccaacctgtaaccccagcgctcagagctgtcatggtgcccgcgggcggcggcggcggcgacagtgggcgaccggcaggatcagtgccaggcgcggcgcccagggcgggcggggacgcgggcccctcacctacggcggctcagctcaggcagcgcgctcggcccggctg

SEQ ID NO: 2934 - DNA, 201 bp, Homo sapiens
gcggtgtgcacgggagtccgccgggcacacgcggggtacacttaagtgcactgccaggaggccgggagcccagcgtgcgagcgtgaggtcagactgtgcacggtaccgaggactagttccattcctgagtatgaaagggtgaaaccgttcacctcaagtttcaccccggagttattaaataatgaatgcatcagtcacact

SEQ ID NO: 2935 - DNA, 201 bp, Homo sapiens
gggctggccgcggacccggacggtcgggagcgggcgcggcggtcgcagagacggcctctccccgcgcggctccagcgcagaccccagacctggagccgtgcgggcggagacgcgcggggctcctctccgcttcgccgccgctgggtttccagcgccctcggacccgcgggaggacaggaaccatccggagtgaagctgcgc

SEQ ID NO: 2936 - DNA, 221 bp, Homo sapiens
ccgagacacaaagaccgaggctgagaccgccaggggttgagggtgaggccgcgtcccggggccgctggagcgcgggcgtcatgcgagactgtcccggctgcgcgccgccccagaggagtccgagcgcccccttcagccgcggcgcgctggccctggccgggactgcagccaggtgggcgccgcgcgtgtgagcgccgcgcgtgtgagcgcagacctggact

SEQ ID NO: 2937 - DNA, 311 bp, Homo sapiens
gaccactgccgaacagccgctggagacccgcagagaagggcgggccctgcgcccggggcgcctcggaggtaagttcggagagcccgggccgggcggagggcgggagcgcacgagtgtgtgtgtgtgtgtgtgtgttcgcggtgtgcccgcggctcggtgcacacgcgcgcgggttgtaaagtcaggagctgcgggagcgcctccctgcctcggcttggccccggagcattgcgggccgcggaggtgtgggggcccttgtcgctgcgctcagggcagcggcggaaaaggtgtgtgcggatgcggggcggggc

SEQ ID NO: 2938 - DNA, 308 bp, Homo sapiens
ctgagccgtagaaggctttttccgcgttctcctctagtagggattcctggacggggagaccgacgggtctgtgggcgcctccccgggacacacttcggcccgctctgcctgggctgggcccacttacgttctgggtggggctcaggaactgcgtgcgggcgtagcgggtgagcatgctgatgatgaccacctggccccactcctccacgtcgatcagcaggttacagagtttccggtagtttttgtgaatcaggtcgatgcgctccgggcagacctcctcaaaggccatcaccacactgcccgccacc

SEQ ID NO: 2939 - DNA, 201 bp, Homo sapiens
aatgtgacacagacaccagctcctcgtgctcttggctcccagggtttctttcaccgcgcctcagcacctgcagcttctccactcttacagcgcccgccgtcgtcaaggcaacagagggatgcccggtgacagactcggcgccggcttccggcgccgtaagagaagcgtccgcgcgggcgttctggacccgcagagttctcg

SEQ ID NO: 2940 - DNA, 201 bp, Homo sapiens
ttattccacttgagcgtggccaaactgttgctatttagtggggagcaaaaaaaaacaatttgcaccatcgaaacgagccagcaactggttgggaggcgggcggtagctgggccccgcgtgccctcggcggccggggtcctctccggggagaggcacacacacgcatagccggatcgcgcctcgccagggccggagtcacct

SEQ ID NO: 2941 - DNA, 201 bp, Homo sapiens
ggtgggagccgcgaggagcgcctagtggcgcggtctgccgggcatggtggccggctcggcgatcgctgactcgccgggtccgggggctctggaagcgaggcgcgctctccgactccgagactttgcagggttgcaacagacggtggggaggcaaaaaaaaaaaaggaaaaggaaaaaatggtgctaaagtcaccaagtccc

SEQ ID NO: 2942 - DNA, 630 bp, Homo sapiens
ccggttagtccatccccgcgctccgcaaacttttctaaccgggtaacaaagtgagcagcggtggccgccgcgattcctttaacttcgcattccggaggctcgagggggctctgggaccgagcggcctcgcagcggcgacagaaatacatattttacgaaaaagaaaaaaaaaaaaacgagtcgcgcgaacccgtcaagtcagatgtgcgcggcttgaagcggaggaggctctgacgtcagccccacctcgcgcagcccggcctggccgcagactcgccggtcactcgccggcggctcaggccgggaggggccaggacagtcccggccgcgcggtggacggaggggccattcctccgggcgttagcaaataaattccatccgagtcaatatcgcccagcgaacggtgtttctctttagtcacccgagaacgagaggcacttttaattagaaattaattaatgagcagctgctccttcccgccccactgtaatcattcgtctcaattacaaatgagacctatgaaaggacacgctgaagatgtaatcaacagttaaaattagcccggcgctgcgcaggcggccggcccggcctcgcgctggcgcgctctgctccgagtggcaggaaggggct

SEQ ID NO: 2943 - DNA, 201 bp, Homo sapiens
aaatgggaccagagcgcggagggagcctggccaggaggcctcctaggactcagccgcgacgctgaaaagcatgaagggtcggaattaggcactcatttagcgagcgttactaatccgaagttacagcgctaattccctgatccggccgctcccacacgcagcgccgggattagaggcgcggccgccgcccgccccgccctc

SEQ ID NO: 2944 - DNA, 239 bp, Homo sapiens
gaagaaatcgggtaaatagctgctcccaggcccgtgccacgagccctggcgggatctctccctccttctgtactctccaccctccgaccccctttgtgtgcgccgcgccccgctgtagctccgctggagagatggggacggtttggcagaaggtggcggcgacaggggcccgggacggtttggggagaggagggtgggggcgcggctgctgtggggtgtccccgggcggggttcacggg

SEQ ID NO: 2945 - DNA, 201 bp, Homo sapiens
tgtccagcctcccggaggagtactatgccttgacaccttcgtttcaccgccccaaagctggcctggggctccgtagggagtggcctgcatggggagggcccgcgtgctgtgtttctgggaggggtaagagagtgggggcgcagggggcgggccaggtccctgggcgcggcgcgggctcgggggacccgcgcggctgacgtc

SEQ ID NO: 2946 - DNA, 221 bp, Homo sapiens
ggcagttggcgcgcccgccctggccgcagcccggcttggggacccgctgcgtgccctggcaccagtgcgtggtgaggaaagcggtggtggcgaacagcagcgccagcaggttcagggccacggccaggagcgctcggccgcggcggctagtcttcatgccgcccgcgccgccgggacgggactgcaccgccggggagctccgcgcgcgaagttggcagctg

SEQ ID NO: 2947 - DNA, 201 bp, Homo sapiens
cagccccacgccggtccgcctcccgcccacggctcggcctccctcccgcctggctcggcgctcctccgccccgagttctccatcccctggatcccgggctcgcgggggcgcggagaagaggatccaggaaaggtttgggaacctgatgggtttgtggctggggggaggggcagttctcccgccaccccatcccctccccgc

SEQ ID NO: 2948 - DNA, 246 bp, Homo sapiens
tgggttttcttaggactcaccttatgtagtttccacatggcccccagagccttgacttcgtggctggagtgtttgccctcctccaagcactggtagcacacgggcatcttgcattgcacgcagtacatgctgtggttctccagctcgtggtctgtgcaggtggagaccttgcgtgggctcagcctccggctcacacgaccctgggccgggggcaccaggcggtgcttggctaggggcccccggggc

SEQ ID NO: 2949 - DNA, 223 bp, Homo sapiens
tgacactgggggcaggtgatacaggagttgcggggcaccggggccagggccggtgacaagtgggtggccggtggcggcatagccgggggaaacacgcggacgccgttgggggacttctggcacggggtagtgggggcgctggcgaaccccccgtaggagccatagccgctgtccgcctcgctgtataggctcatcttgtccaggtccagatagtcatagtcgg

SEQ ID NO: 2950 - DNA, 201 bp, Homo sapiens
gggcttctcgccagcgtttgcgtttggctcccagctctgagctccgcgcccacctaccgcgggcgagtgctgcgcagcacggaggacgccccttctcttccgctgctggcagccttcgcaggcgtctcacccgggcctaggcttctgcacggcagtggggcttttctccttctccgtgaatccgctgacgccgtgccctgg

SEQ ID NO: 2951 - DNA, 244 bp, Homo sapiens
tgcgcttacccgctgcacaacgcgtcccgccccggcctccagcccactctccgcgccgcgccagcctcgaacctggatctccgcgggcgcctgggcggggcgggactccaggcccacccagcaagctaattggctgaggccctcggctggggaccaatcaccggctctgagaaagttcggcagtggccaccacatctggttctcgttaacttttctaaggcagcggccgctggagcagcggggc

SEQ ID NO: 2952 - DNA, 201 bp, Homo sapiens
tcctcacccttggctgcctggcggggcttgaaagggcaggtggccctggcggcgcgccccgcgagggatgtggcagaagggcgtgcgcctggcgccgaggcggagggaccctcgatgccgtgtggcagcggggcctgccatcgcagcccttcgcgggcactgcccccaggcccagagccagccttcagcgagccgggcaaa

SEQ ID NO: 2953 - DNA, 457 bp, Homo sapiens
cccttccaaatatacgttcccttgcccgcggcccgccactcccgcccgggcctcgggctgtgcagcttcctcctaggcctgcccgggcccatgcctcccccgaagcggcgggagtcggtgcagcctcaacttctactgcgtgtcccaggtcgccaaccagctttgctcgcgtgccgttggcccggaggctgccgcgccagtctctgcgtgcgcctgagcgcgctggagcatttgcgaggccagggctgccgacggcgagaggatactttgaggaacacggtgcttcagtcccgcccccgctctccgcccgagctggaggttggggcgcgctgagccgcagcgcctggacaagtgcgcgggccggagccgcccaggcctgcacccgggggctcgcggccgacgcatgcgcacgcgcggtggcgggtctgcaggcccgaaggcccggcccctccctcaa

SEQ ID NO: 2954 - DNA, 244 bp, Homo sapiens
gagcggtgactggaatctacgcccgggagaggcccggagtcccggccgcgggcggcgggggattcctgcaggaaggggcaggaaggcaagcagcccggcgcgccctggcggctccgagggacctgggctcgggcttgcggtcgcgtcgcctgggctttccctgggctgggagcgcgccgggtctccgccttgcacgctgtcaccgcgggagacgtctcggcctcgccgcgcgcagaggggacgc

SEQ ID NO: 2955 - DNA, 206 bp, Homo sapiens
gccccgacgctgcgggcgacagggcttggctccagcagccgccgccgtcgccgccgccgccacccggaggacccagcaaaagtttggatctgggggagggcgcggcgctgagcgggattaccaccagggctggaaggagacctcgagaacctttgcaggtaacgcgcgcccccaaccctcttcttccatgccccgccgctgcgctc

SEQ ID NO: 2956 - DNA, 203 bp, Homo sapiens
ggaagcagtggggggcgctcgaagagcagggcagctacggccaccgtggccgccggaccggccatgtgctaaagtttctggggctcggcgccccgctgggcgcgcagcgcggggagcagacgcgccgtgggtggggcagcgcggtgctgctggcgcccggcccccgcggggtgcagctctgcgcgttctcatgctgtctctct

SEQ ID NO: 2957 - DNA, 266 bp, Homo sapiens
ccaggtcactccgatcttggtcctcaggctcgggataacgtgtcagccccaagagagcgctgcccacagccccgggtgggttgggttcaactgcacggggcggggcgccaacagctcaggacttgggttgcaggctggttcttgcaccaaccagcggggcggcctcgggcctcagtttccccatcccgcccacgaagggaggcgattgcgagcgcttggggtttctgacggaccccgccccgggggtggggcggggagtggtcacg

SEQ ID NO: 2958 - DNA, 242 bp, Homo sapiens
gcctagtagagatctggagccagaagcccagagacagccgagtgcgccgtgcggtctccggacgctcgctgctcagcccgatccccgccaactgtgcaggcggctgacccgcagcggcagcggcagcagcgaggactcgagcgctggctgcagcgacaccatggatctctcctttatggccgcgcaggtaacggggcgtcccccccacgcgccccgggccgccaagtttggggaggttcggg

SEQ ID NO: 2959 - DNA, 201 bp, Homo sapiens
agctcagacccgcgcgaacgtggatgggcacacagtctcgcccttccccactctgttttcccgaggcgccagtaatctgtctcttgccggtgacctcgggcgccccctttgccgccgcctgaggaaggctctgagacccgctttgtgaccgtgacccgccaagcgtcgacgcgccgcggtcgtttgtcctgttttgctttg

SEQ ID NO: 2960 - DNA, 201 bp, Homo sapiens
tcctgctccggctcctgcggggatggatgcttcacgcagtaagcgagtaagcgagccctggagaccggggccctgggtgtgcggtcggctcagtgccacgcggtgagataggcatggttatcaacccacgccaaggcggttgtgtacctggcatagaaaacactgctgttgaatgttgtttccatagtcattcgccagcgt

SEQ ID NO: 2961 - DNA, 312 bp, Homo sapiens
ccccctaacatccggcctgcacgcctggcgggggcgcaacagtgtctcacggctcgggagctcgtttttggcttctgagcaaggtatttttttcatctgccgtgtgtttagctgaattcagtatatttttctcgcacttctcgcttttttttttttctttctgaatctgctcttctgctttgcgggcccctaatctctcccgaatctcgggcgcccggcccggcccaggcgagcgctcgcggttggggacgcgggtggggacgcggcggtctgggcgctgcaggatgcgcctggccgcggaggagacgacca

SEQ ID NO: 2962 - DNA, 203 bp, Homo sapiens
cgctggctttggctgcttgtggggtcctcttaggctccggggggcctgcggcggcctgggaggcagacccccgcgggcaggtgtggccgtgtcccgaccgcgcgaggaccgaagttggcggaagcccctgtgcggtgccttccagcccggaggaggctggcctgaagcccccaggcgttgccgaagcctccccctgccagcgc

SEQ ID NO: 2963 - DNA, 201 bp, Homo sapiens
cgcatgcgcgcgcgcaactagatcctcgccgccgcccccagcgcccctccccggggcagggactcacctaacaggttggggtccttggagtgcgcggggccgcgtggggaagcggggaccctaccccccccacgcgccgcccagcactgggcaagggcggggcactctctgggctcccgcccctcgccgcccgccccggga

SEQ ID NO: 2964 - DNA, 283 bp, Homo sapiens
agcggcggcggcgggccccaggagtcgcagaccctggccagtggcactgcgggccaccctgagcccccgaggcctcagggggacagcgcccgggcgcccccgctgcgcgccgcctccgcggagccgagcggcggtggctgcggaagcgactggggctgcgcggacaccagcgccccagagcccgcgaggagcctggggcccccgggctggagtaagagccgagcaccggcgcagcctgcgggactggcactcaccgggcctctcaatccccagaccttgccac

SEQ ID NO: 2965 - DNA, 201 bp, Homo sapiens
gttcccggggcgccctgccctgcgccaccgcgcgctcgctcgcccgcccgcccaactcacctgctgaagaccaggcagcccaggtggttgatcttgtggtcggagcggtggcggctgtagtcctcccacaggtccctgaaggccgtgatggccaggatgaagagcaccggcgccagtgccaggccgggctggaaggcgttc

SEQ ID NO: 2966 - DNA, 247 bp, Homo sapiens
ttgagcgcgtgacatggtttgccgtccctgaccaagacgggcacggccacccggcgcggcgagggcaggggcgtcacctccatacctttctcggcccgggcgcgcttcatcttgtagcggtggttctggaaccagatcttgacctgcgtgggcgtgaggcggatgaggctggccaggtgttcgcgctcgggcgccgacaggtaccgctgctgccgaaagcgccgctccagctcgtaggtctgcgcct

SEQ ID NO: 2967 - DNA, 427 bp, Homo sapiens
ggggcgccttcccaggggattgggggtggggaggagggcgcacgggtcggggagggggctaccggacctggatcccgggacaccccgggggtctggggggcgggccgcgcgcttacctgcgtcctcgtcgtcgaaggagttcatgcacgggaagtagatggcgagcgcctcgaaggaggcggacagactgaggcggctctgcgagcgctccatgcccgcgccggcgccgggcgcctcggccgcggcggcggcggcggcggcgggcggcttgggcagcttggccgccccattcttgacgcggagtacggcgcgcggcgtggtggcggcggcccggggccgggccgaggctccgctgcggggctggcgggcgcggcggggccggcgggcgggccaggagctggcggcgcgcggagcccgaggcgcgctg

SEQ ID NO: 2968 - DNA, 246 bp, Homo sapiens
cggcccacagccgggatgcgcccccgccggggtcaccgcggcggcgaacgtcccggacttcgcatcccggtgaccccttgggatgaaccgaagccggacccgcaccttggccgtaacaagcgcgctccacgccgccacgcaccagcggtgactcccgagtcctctgtcgccctggcctccccgcaggcgggtttcgaggcccccgcagggagttcagggccacggccacgtgcagccgcccccgag

SEQ ID NO: 2969 - DNA, 384 bp, Homo sapiens
tgcgcgtcggtctggcttgcctgcgggtcccagagcctcggcgcccgctgcctcctccgcctcttccttctctcccacctcctctccctcccagccgcgacgcgcagggggcgggctctacctccccctcgcccccgcttcggttttaagccgcggaggcgcccggtgggacctcgctgctgtccaatcaggggggaccgggtgagctcctcttcctggagccgggctccaccagcgccgcaggctcacaggccgggggtgggggctctggaccgaggggcggcgcggggcggcgcggggcggcgcgcgcggtcctggagcgctagtacttgcttctcgactccccggccgccgcctccggccgccccggggattccgccacca

SEQ ID NO: 2970 - DNA, 415 bp, Homo sapiens
tgggcagccccaggccgtcgaactcggcgcccagcgggggcagctcgcggaaggcgcgagccgagccagacgccgcggggaaaggctcgggcggtggctgcgggggcgctaatcccgggagcaggaggccgggctccagccgccgggccttgcgcgcctgcttcttgcggcgcggccggtacttgtagttggggtggtcgcgcaagtgctgcacgcgcagccgttcggcttcctccacgaagggccgcttctccgccgcgttcagctccttccacgctttgcctgcgggccgtgggcgccagtgagtggaacgccgtcgggcgggtgggcgccgagccctccgtgcgcccgggacgccccgcgagggtttggcgcagcccccgcaccccgcggcccgggacccctgccccccccg

SEQ ID NO: 2971 - DNA, 543 bp, Homo sapiens
tgcgccccacgttctggagcgtgaagccgggcgccaaaaagctgctgtcgggccgcagctccagatccagctgctggtcaaaggcgtgcaggcggaggcgcgtggtcccgtgtcccggggcgcgctccagctccggcaccactagctcctcgtcctcctcggaggggcgcccgagtgcgtccgacacggccagtagcgccgcggcgagcagcagcagcgtgggtactggcccaaagctccgagaccccggagcccgctccgcgttccccatgtcgctgcccagcttgcgccttccgaacccctcgggcacagctcgctgcattggagccccaggagacaccgctcgtagcagcgcacggagcgagggacctttagttcgggtcgggagagcaaagcctcgttggcctgctctggattgttaaaattaacaatttctattattcgttggaagggcgcgcagagccggctacagccgaagctcccggagtcactaaaaggaggcgctgcagttctgccggcgcgcgggaagtttttcttccagcg

SEQ ID NO: 2972 - DNA, 227 bp, Homo sapiens
ccaggagcgatggctgcaatgcctttttctttgctttgctttccggtgccgggagccttgcctcccgccgccacccctggtcagctctgcgcaagaacgtcgttctgtttggcagccaggccgagacgcagcctgaatgtgagcaggaactcggagaagggaagggagagaatcagaaagaaggcccgggagggacccgggaagcagtgggaggtctgcgccctgga

SEQ ID NO: 2973 - DNA, 323 bp, Homo sapiens
ccgtcggaagagccctgcagagtgagcccctagggccaccccgctgccttcctccccgtccccgcagccgctgtagccagcgtgggagccgggcaggtcgcgtggggcgctggacttaccgagaggttagcgccgccgtcgggggagggcgtgtcccgcacgtgtgtgtccgcgcgtgtccgcgcccgcgtgtgccagcgcgcgtgccttggccgtgcgcgccgagccgggtcgcactaactccctcggcgccgacgggctcagcccatggtgtgggcgccgggttcagggaggctccggctcccgccaatcgcggagcaggg

SEQ ID NO: 2974 - DNA, 279 bp, Homo sapiens
ggcacgagcgccagcagcccgcaaaacaggtagagcacgcctcccgtgagggccacacgcgccttggccgggcccggggccacgcaggtggtgcactgcgcgcccgccagggtcacgaagagcgcaacgaacgccagcagcacggcgctcacggtgagcgcccgcgccgcctgcacctcggtgctcagagccagcaccgagtcgtacactttgcactgcatgtgcccggtgctctgcaccacgcacgacatccacagccccttccaggtggtctgcgcc

SEQ ID NO: 2975 - DNA, 261 bp, Homo sapiens
ctcggcgcgcgctcctcggcgcacacgctccccatccccgcgccgcgcgggccgcggacttgcaggctgcgcgtcctttgcggagtctgccccggccccacggacaggccccgcagtgagcaggtaagggtcgccccgccgcggctgcccctccacgcctcggccgtcttctccccctccagaaccttcgcccagccgggacctcggatcccctcctctggcttggcggtctccgccagccgcgacctccaccgacggaga

SEQ ID NO: 2976 - DNA, 364 bp, Homo sapiens
gctcgggccctgggcggcgagggcgcagcgagggctgtcgcctcctcgggcagccccggggggcgcggcgttgggtcgcgggtccgggggctgccgtgttcgaccgtatgcgccgatttgtcgctgggcgtccgtttcctcttgctggggctgggcgcggcctcggagcctggcggcggtggtgagggcgcacggccagctgcagcggcgctgtgcttgccgtggatccaggacaccttaggcttggtggcggggtcaggtggcggcggtttcctgcgctcgggcgatggcgacagcgacaggcccccaatctcgccccgggcccgggccggccgggcctcgcgtcgggccacgcgcgcgtaca

SEQ ID NO: 2977 - DNA, 242 bp, Homo sapiens
ggcgtcccttgagtctagagaagtgggttaagacaagggaagaaaatcccttacagaagaggagatccccgttttcagtgctggggactctcggcacccgcgtccctgtgcttctggtggttccggcgcttcctcggagcgcgcggcatgtctgctcctacacgtccagcacctctgtccccagagcaaacccacctcccagggcacacgcagaggggcagtcaggcaccgcctccaccctg

SEQ ID NO: 2978 - DNA, 285 bp, Homo sapiens
acggccgcccggggccgcaccctcgctcggtggcggcgcccgaagacgccagccgcgccacgcactgcctgcgtcccgcgccccagccgccgcgcaccaacgccgccgccttcgccgggagccaagcccgccgggccggcccggtcccaggtgggcagctcggcttgcagctggttggaggtggcggccgctgcagccctggcagcgggcacacccctaagcatacgcacccaacgcctcctccctgagccacgaggatggagcagccaccccggcccgggactg

SEQ ID NO: 2979 - DNA, 222 bp, Homo sapiens
ggcactgatcctccagcttcttgcttgctccctcgctccctttctctacctcggacattcccaggacaattagggctgaagttttcgggagaagcagccccgagcccgtgggataagggggcggcccggctccgcccaggacccctcccggacctcccccccggctgccccggttggctgcagggcgcgtcactccgcggggaggcggcggcagcggtggcg

SEQ ID NO: 2980 - DNA, 201 bp, Homo sapiens
gcggcggcggcggcggcggcgggggctggggcgcgggggccggaccatgagccgctgagccgggcaaaccccaggccaccgagccagcggaccctcggagcgcagccctgcgccgcggagcaggctccaaccaggcggcgaggcggccacacgcaccgagccagcgacccccgggcgacgcgcggggccagggagcgctac

SEQ ID NO: 2981 - DNA, 298 bp, Homo sapiens
gggaccacctcccacggtgtcaccgcacccaccccgcgcccttcctccgcctcctggagttcaccgggaccaggtggcggcgggtgcctttttgggggtgcgcggccatgcaattggtggatttttttaaaccgttttggaggggggagcgcggcgttgggggcgggagagcgctcctggctgtgagctgctcctgccgcttcgctccgcgctctcctgccgctccgctccgggtctcccgcgctcctctccccggctcggccgagcgcgctgccccgacgccgccacccagagccgg

SEQ ID NO: 2982 - DNA, 272 bp, Homo sapiens
tgacagggaccgggctcagatctgccaaatgctgcggaggcagaacctgacagtgcgggagggcaggcgcctgggaggtaggagctggtggagatgacagcgtggaactcgtgagccccacgcaacgcctccctgccgcccagggtgggctcctagaagcacagaaatggtcgggctgcgggacaccacagcgaggaaccagcggagtacaggggccccaggagcgccgggacatgccaggccgggtagacagcctcgggtcggagtgagtg

SEQ ID NO: 2983 - DNA, 201 bp, Homo sapiens
gagcatgagggagagtgccatccctcagctgaaggccactgtgccttgtatttctggtttgggcaagtgaggagcctgccagcccctggcaggaagtgcacgtgaccggcggctggccaggggcacagagacgcactccacacagaaacccaggctggcggggtgggcggccggggagccagccctgcagatgttactaag

SEQ ID NO: 2984 - DNA, 251 bp, Homo sapiens
gcaggctgaaggcggagctggagatattcggggagcaggtccggagcgcccccgaggtcggggccggcgagggagaggtagggagcccgaggaagggaggcggggcgggcagggaccgagtcaggagagagcgggcgggggtcctgggagcggcccccgagagtggggtctgtggggagcagggcggccccggggacagaggaagccgcggtggaggcctagggcagacgcgggcggacgcgaggagcgta

SEQ ID NO: 2985 - DNA, 249 bp, Homo sapiens
acccgctctcggagctccgctcggcggcacctgccttggccacgcgccccagtcccgccaggcccctcggcgggcccgaacccgcagccgggaaggcacacgcgagcaggagggcgcactccatggtcaggtgcggacgcggcggctgcgggtggccagacgcggcaggcggagcgcacgggcggcgcgcattctttccgcggccccggagctcggcgccccaggtgcggctccaggtgagagccgccg

SEQ ID NO: 2986 - DNA, 249 bp, Homo sapiens
gtccccggcagacgcagggggacgtccgggcggcgcggggcgcgggtcccggagtggctgcgggaaggacgcgcggcattgtctgtgcggggacccgggacgggtcggggcatcacaggcgcgggaatccacgtgtggactctgcgttcgcgggcgcggtgacccccgcggggatttgttggtgccccgagactcactgagttgcgggggccttggagacctccaggtctgaaaagttagctctagaga

SEQ ID NO: 2987 - DNA, 201 bp, Homo sapiens
ctgcccgcggcgccgggcgcgccggccgtcgggtggtggtggtggccggcggcgtggtggtggtggtggtggtagtgcgggcccgcgccgctctgcgcggcggccgcggcgatcacggcggacaccacggcggcggcggggcccatctcctcgccgctgccgcccaaggaggcgccggcaccggccccggccgccgcggcc

SEQ ID NO: 2988 - DNA, 201 bp, Homo sapiens
acggcacttacggtcggggggtccgggggatccggcgggcggcggacggcgcacactcgcgactcggtccgggagtcgctgctccttccagcttggtccccgcctccacgactcaggggcggctgcgcgctgtcttctggcgccgcaccgggctcaggcgcgcggcggggctggggcgcgcggggcggccgcctgggccat

SEQ ID NO: 2989 - DNA, 251 bp, Homo sapiens
cggcgccgggcagcgcgtagagccagccgcgtgtgcagggccgggtgccgttgcgtgcgggcgcggggcgcgggcccggggcgggtgcagggcgcgggatcggggtagcgcaggagcaggcaggggctcgcggctcgcgtgggccccaggcgcgggatggcggcgtccagcagcgcgggtccgcgcagggcgcgcagcgctgggggcaacagcgtggggtccggtcggcagtggggcgcgggctgcgcggt

SEQ ID NO: 2990 - DNA, 201 bp, Homo sapiens
cacggtggatcctgtgggtcgctgagttttctgactcccggtttgtcttattttgctttgtcagtgggctctgcgctcgcgttaacaattcgaatgggcacgtttctgcgtttcagaacgctgttcgcttcctcacacttagattgaggtggaactcacgtcacataaaccgggtcgcaaggctcagctcagcggggcccc

SEQ ID NO: 2991 - DNA, 201 bp, Homo sapiens
tggcgcggggcgcaggtgcacgcaggttggccgcgggcgcgcggggtccggcgggagtcccggggtggtccccgcgtggggccgggggcgtccgcgcgggcggggcgaggtcggggagggcagctgcccgccctcctcggcactgggagctttcggctggtactgcgggaggagctcccgggtgacccgcgggttctgaaa

SEQ ID NO: 2992 - DNA, 201 bp, Homo sapiens
tgaggaactggacatcaggcgctggccgctccccaccctcagccgctgggtgcccagagcccatccctagcgatcagagcagaactgcagagaagacgtccgcgtccgggccccgtctggggagctagggcgcgcggggagcgcccgggccgcgcggtcactgaccgctggctgcacgggggcgccgtgcggactcggcct

SEQ ID NO: 2993 - DNA, 337 bp, Homo sapiens
ctcagggctcccgggatcggtgcccgttagtgggcacaggacgccgggtgtccgaagggctgcctggagatgcaactgaccttggcgggcatcagaatgacgagtggcagcagcaggagcggggtgacgaacaagatcacgaaggacttgaacttggagacatagctcagcgccgaggccatcgcgcgggagggagactggcgggcgagacgagtgaggggcagctagaggcgccgcgggcttaagaaggggccacagtccccggggattggggagggggcggtgacaactccgccccgcacgggggcgcctccccgcggccctggggcggggccac

SEQ ID NO: 2994 - DNA, 201 bp, Homo sapiens
ggcccgtgcagagccgtccacccctctccgtagcgccgggttgctccaaactgctcttggaccccacctgtgagccgcgtggctgggctgggctgggctgcgcgggacctgtcagcggcccccgccactctgctcgcaggcgctcaccggctgcctcctgggccgccgctggccgccgccacacgtgggacgccgagggca

SEQ ID NO: 2995 - DNA, 201 bp, Homo sapiens
acatggcgtatgatagggaattggcagggttacagcttcggaccacccggggtagggcagggaaactacggcagattgcgcagcgcatcctgtccgggtgcggtgagggttgcgctccgcttggttctcgtcacaacccacagaaagttctcgcggagcactggtgcccttgaattcatcaggcgacctcgccgcaaagaa

SEQ ID NO: 2996 - DNA, 201 bp, Homo sapiens
ccgatcctgctccgggcaaccgatgggaaacttcccgagagcgcggcctccctggggactcggcgcccctgacgcctccaggcgcttcctcgggccgctgcggcccctcctcgccgcccgccagcgcttaaggtcgcgctctccccacccccgccttcctcccttcctcggcggcttccggatctggacagagctgcagga

SEQ ID NO: 2997 - DNA, 1216 bp, Homo sapiens
gaagcgaagaggggtcccttgatttgcaacatagaggaaagcgccgcttccgcccagcctggcacccacgcgcccacacgcacccggcgccggccgggtcgctcacctgagtcctaaaagctgttgaatccacatggtcacgtttcggggagcggggcctcagacctggctcgcccaggccatctgcgcggcgcccgcgcccgctcgcttccgtcccgcggcgccggtctccggctctcggtccgccgcctcccgccgcccgccggccgcggggcgcacagcgagtcagagcgcggccgcgcggggctccatgccggccggcgcgccgccgccgttggggcgcatggctcaggctgggcggcccgcgggggcgcacatcctccggccggggcgcggggctcgcggccccctccgccggcggcacagcgaaggcggcagcgaggcggggcgtgttccggcgctgtcgcggcgcagcaaagggctggggagccgcggcttcgccctccggggcggcgaggagggaggccggcggcgctgccgctcacggtgcgtgtctcccggcgcgcggctcttgcctccagccggagctccgcgccgatggggcggcgctgcttagggtttggggtgacgcgacgcggacggacgcgagtcccctccgcgctgccgggtcggggggctctgccagaggctccgccgccgatcggcgccactcaagttgcccgggggctccgtctgagcgctcgctctgcagacggccgcggcccggagactggcaggaggcgggcacgagaggcgcgcggggcgagggcgccgtggagcgcggggcgtggggacgcgcggcggcggcgccgcgcggaggaggcgcgcggggatcccggggccccgccgcccgcgcccaccgcgcccgccgcagagccgcccgcgctgctcagccgcctccctcctcgcgtctgcctctccgcgcgctcgcccccgcctcccggagccggtcccaactccgcccgcccggcccggctcacgtcacccgccttccccgcccctcgaacgggagctcgagcccctggcctggccccggctcctgctcgccgccccaccttgcgggggccggggtcgccgcgggtggtggggggcgctgtgcccagcaggggcgacagcgcaggcggggcctcctgcagcccccttccccatccccggtcgcgtcccggtccccaccttg

SEQ ID NO: 2998 - DNA, 365 bp, Homo sapiens
ggccggtggcgttcaccccgcaccgcgctgccccgcccggggcactatggcctggggctggactatgccctccccacctcagccggcgccccccacccacgcgcgctgagggtgcggtgagctgagtgcggggccaagcatgttctggcgtcgacttcgcccaggggcccaggacctggcgcccaaggggctccctggcgacggagacttccgacgcagcagcgacccgcggctgcccaagctgaccccgcccgcgctccgagcggctctgggcgcgcggggctccggggactggaggatcccggggggcggcgccgcgtggtggccggaaggggacgccaagcccggggtgggcgtcggacgcc

SEQ ID NO: 2999 - DNA, 201 bp, Homo sapiens
gcggaaagcaaggcgcgttcacagccgccctccctcctggaagcccgcgcccacccctgcgcggcggccgctccggaggcgtcgggctgggcgtgaggacgccgcactcaccactgggcccgcgagcgccgccagctcagccgcctccccccgcaggtccgggggcagcgcaccccgcaggccccacaagccgtcacgcca

SEQ ID NO: 3000 - DNA, 201 bp, Homo sapiens
gcgctggctgggcagctcctgggagatgaagcgacgcaggcgctccaggtactggctgtagagctcgatgtcgttgtgcccggcgccctccacccacagcggctccaccgccttggggcagcgctcgtagagcgccagcccgtgcgagaagtcgatcacctcgtcctccgtgccgtggatgatgagcacgggcgacgtgat

SEQ ID NO: 3001 - DNA, 201 bp, Homo sapiens
tcgccctggccgaagcgcagtccgagcgccgcgacgcgctccacgcgcaggaagccgtcggggtcgcggccgcacacctcgaacacctcgcgcaggcggcgcacggagcgcagcagagccgcgggggcgcccgaccagcccgcgccgcccgccatccgggccggcccgcagctcagcccggacccctcgcccgccgcgccc

SEQ ID NO: 3002 - DNA, 201 bp, Homo sapiens
cgccccgcgccatgcacacccattgtggtgatgagagctcgcgccccgtgcccgtcacggtcactgtgcgtccaataaaaacaaacactgccgaggagccgccgcgatgcggggcggacgcgcggcccggaaaggggagggggccctaggaagagctacacccgcgagccgggcctgggccaggggcgaggggagagcgcc

SEQ ID NO: 3003 - DNA, 201 bp, Homo sapiens
gtggccccctggtccccctaggcagctaacaccacaatcttccctgggagggggtccgcagaagggcgcgcgctgcttctcccgcttcccaagctgtagcggggcgggtcgggagccagggttagggtctggagacttgggaggggaccggtgccagaagcgaagagctagggttagaaagttaggtcaattaaggggggg

SEQ ID NO: 3004 - DNA, 201 bp, Homo sapiens
ggagaagggggtccgtgcaaatcccaggctgacgaccgcgcacgcgcccctcgggtcaccagccctgtcgctcttggtggggcacaccgaggagaccgccgtggggaaccggggaccggattgcctgacagccgagcgctgaagactactcttcctgagcctagggaggtctggctgccctgagccccctacccctgggct

SEQ ID NO: 3005 - DNA, 213 bp, Homo sapiens
ccctgcggctggctaggaggagctcctcgccgcccccattccagccgcgccgggcgctgggcccgacccccagcacctttggcactgatgtgcctggtgcgcgctgagacgcgaacgctctgcaagatgagcccttattcattcgttccttctttccttcatttgttcatcttacaaactgagtgcctggccactttggttcaggcaagaggc

SEQ ID NO: 3006 - DNA, 201 bp, Homo sapiens
gcccagcggcttgcaccgagagccaggagaggctcagaccggatcccgacccttcgaggcgcgggagcccacggagcgcggtgggcgcggcgctcgggtcgcgcagctaggtggggagcggcgcgcagccccagactcgcaggcaggcagcggcggactgcacttgcctcgccccgcagcgccccctgcctgccgcctccc

SEQ ID NO: 3007 - DNA, 201 bp, Homo sapiens
gcgtccgaggccggcgcggtggggaccgcgggcccaccaccagccaagcccagctacttaactatttgtagagctgctgcaggcacaggtccaggctttcgccctccacctcctcgcgggtgatgcgctctgacagcggtcgcgggagcgggggcaaaggcggcagctggggcggcggcggcggcacggccgagtgccccg

SEQ ID NO: 3008 - DNA, 201 bp, Homo sapiens
ccgcaaggggcacccggctctgtgcgcgggggcggcgggggctctgcgcggggccgggctgggccgggctgagctggcccgctccggcgccggggaccacgcgcgactggttagatcttgtcgtgatctctggaaaactgtgactatctcacatgtcctgcccagctcggatcccctgcgctaacgagccaggcccccctt

SEQ ID NO: 3009 - DNA, 324 bp, Homo sapiens
cggggtccgggctgggaccgcggggtgggcggccccgagagcgtcccgcagtggctggagccctgggcgctgcaaagcgtgtcccgccgggtccccgagcgtcccgcgccctcgccccgccatgctcctgctgctggggctgtgcctggggctgtccctgtgtgtggggtcgcaggaagaggcgcagagctggggccactcttcggagcaggtaagtggagccgaggggagccgggtcccgggcgcggccgcccccttccctccgccggcccggccgcggagcttctgcccgggcccccttcgaccgtctcccaggcccccacc

SEQ ID NO: 3010 - DNA, 201 bp, Homo sapiens
gagggggcggctggaggacccggaccctcaagaacctggccttgggttttgacccgggcggccggagagaaggcgaagaagaggccgagcagacaggcgcgcggcggacgcgagagaaggacgcgggcgaagcgtccaagacgttcgtccccagggtcgccgagccctcctcctccttcgcttggcgcggcagcaccgcgg

SEQ ID NO: 3011 - DNA, 330 bp, Homo sapiens
agcccagcccagccaagcagcagagagaacaggacggaggctcccatttcccagggactgcagcgcctccaaaccgcccatctgcgacggccccgcgagcgtgcgcagcccagcccctcccggacgtcctcgcccccgcccgggcacatcgtgctccgcaccgaggcagagaggggcacgcggatcccagcccctgcgagcccctctgcccgccgccacttcacaccccgcattgcctcagctgccgttccagaagatgcatcgtctggcgcgcaaagcggtgcacggtccccagcccgcgcgcagcagcctggaggggcgccagagtcc

SEQ ID NO: 3012 - DNA, 293 bp, Homo sapiens
gcgttccagcccgtggcgctgccggcgcagaccccgcgtggggaccggcgaggctaacccctcctgcggcccggggtcggcagagcacgcaaggggccgcgggccgcgtgggtttgggcgcgccgtggtgggcaagcggggccagcggagcgggaacccgcacaccctccgagcggagccgaggacaggcccgtgcgggccgcggggtccctctggcgccaggaagcggcggccgaaggagacaacgagaacgcagccccggctcagggaggcttaaaagctgagatgctgaa

SEQ ID NO: 3013 - DNA, 201 bp, Homo sapiens
accgccggcgtcggcagctagagcgggacccagctcccaccgcgtcctccactggagcccctttcggcccctcggcgagtgcggcccgtggggagtgggcgtcggcgcgaggaagttccccggcccgggcgaccccggcttctgagcggcccctccccacgtcgccgcccgccaggccgacggaggaccggggcggggacg

SEQ ID NO: 3014 - DNA, 201 bp, Homo sapiens
cggcgccccacgctctcctcttggagcaaatccgcctcgctctcctcttggagcaaatccgccgcactctcgcctgcaccgaaatcctgagcgccgccccgcgccacccccagcccgcgcccgcgctgccctcctccccgggccgcaggctgagaggctgggccgcactctggccacgctttgtccggctttagcgggata

SEQ ID NO: 3015 - DNA, 226 bp, Homo sapiens
tcggggctgccagggcgccgggttcgtgcgcggacactgggggcgcacccggctcccgggtcaggcgcggctggagacctcgaggttggggttttgaagcgcgcaagtattcccctccccatcgcgtctttgcaagtagtttgaagccctaagtcgttgtttacggattcccgtttccaactttttaattgaaaaaacctgccgaggagagtggaggcatcgccat

SEQ ID NO: 3016 - DNA, 363 bp, Homo sapiens
cacccgggcgcgggagcacgggcgggccgggggcgcctgggtcggcctgccgtggcccgggggctcggggcggcgcgactcacctggcgccctcggggccgcgattctcctcgggaggtgtctgcgaaggcggctctgccgcggtgggggtggggaggctagggcttcggaccgctggagttggggtcgcagccagttcctggcgagtgtttcctggctgctgccgcaggggcttgctttttcggatttcccctctaatctcgccggacttcttccccttcccccccacgcccgccaagttcatggcttctgcaatgcggtgggtgtggttacctagtaaattgtaactgtggtcccttgcaa

SEQ ID NO: 3017 - DNA, 201 bp, Homo sapiens
cctctcggagtgggggactgcgagggggtctcggctttacgaggtgcggaggaagagcccgaggcctggggcgaggcgcgcgggacagtggggctgacgcgtggcttcggcgccgcgcggtctcccgaatcccgagccccgcgcccggcgcggccggggtccccaaccgccctcccgctcgccgggacccccaccgggccg

SEQ ID NO: 3018 - DNA, 201 bp, Homo sapiens
ctcgcccggcgttgcatcttcccgtggctcggctgtaaggacctgcggtggaggcttggcggaggcgggcccgcgctccagagagagcgtcacgtcacccgagaaggcgacgctgggggctgctgagcctcccaactccctttggcgcgtcctgctcagaagccggggagctcctggccggcggctggcggggaagcgcgg

SEQ ID NO: 3019 - DNA, 267 bp, Homo sapiens
ggtgagctactgggacttcgctgccagggagcaagctggcaggcaggaagtagccaagatttgggggaatccttcccagggaacgaatacagagaaggacgcatctgaaaattccgccgcagccacctccctcccatgggaaagccccgacctcggcgggcccagcgccacccggctccccggggtgtggaacactgagcgaggcaggtgcggcgggagcatgcgcgcggggcgggcagggggcggctcccgcgcccccaccccgcg

SEQ ID NO: 3020 - DNA, 707 bp, Homo sapiens
agggaatggggagggtcacgcatactctgtgcggcccgagtggtccggatggcacagcccaggtgtccgggctaaagttggcatctccaaagtccagaacgcaacttgggcgcgccagtacaaactcggccttcggcttttctgaagccagtcaagttcgcacagggcccccagcgcctggaaatctgagaggcgtggaagggtggggagtcccgcgaagtctccagtccctgggtgtcctccggctccgcgggggagcgggcctggagctaaaccggccggccgtaggctggagtagcgggcgccggagcgcgcggtggggatgtccgaaaaggagttagaggctcagtcggagagtccgagaacacgagggatgcctaccttgtaacatggcctcaagtttcttcctgtccacgcggaagcgctcctcgctccactccgggctgtgcagggtcgccccggcgaccaagtcgtcctcggagccgggcactggggagtcggtgctgcgctcgctgttggagccggggtccgactgcgccgccaggtagccgggctctccctgggcggccatggtgggcgcgcagcgctcgggctcccgctgccgccgccgctctgcctgcgctgccgcctccgctcgccggccgggctcaactggctcccagcgccgcggcgctagctcgtccccctgcagccgccgacgccaccgc

SEQ ID NO: 3021 - DNA, 201 bp, Homo sapiens
tggtgctgagtgcgggccgggccgctccccggcggcggtgggtgggcgcgcgagggcggagggggccgggagctttggttccgaggcagcgaggagagacgggtaaacagcagagcgctaagccaagcccccaaagtgccaacagttgcagaagtccgaactccagcggctccaggggcgcgggcacagggtcctgggtcc

SEQ ID NO: 3022 - DNA, 201 bp, Homo sapiens
gctgcccggggctgctgcacaagccggtgacactgccctgcgggctcacggtctgtgagcgctgcgtggagctggggcccgcgcggccacgggcgcgggcgcgggcgcgggcgcgtgaacgtagtgctgagccgcctgctggagaggttcttcccggccgagtgcccgctgcgcaggctggagggtcaggcgcggagcctg

SEQ ID NO: 3023 - DNA, 201 bp, Homo sapiens
agccagcgcggcccccgggtccctgcgcttatggcgagggtcgcgggggaacagcccctggtaggtaacttgccgggcacccacctgagttctccgcaccgcggcccgaaaacctgggagcgtcccaggacaaagggccagccctctggaattagccgtgtgtgactagtgtgtgccagctcgtatgtgggggtcccagtg

SEQ ID NO: 3024 - DNA, 201 bp, Homo sapiens
gctgcgcaggcatcgggctccgtccgggcgccggggcagggttgccggggccagtaggtctctcgcgcctttcctggcggggctctaggggctggattgcgggtcccctctgctccttcttcggggccgagcaagctcgcggggggtgtccccaggcagcaggagggtgaggcaggataactcccaggttttgcagttttc

SEQ ID NO: 3025 - DNA, 203 bp, Homo sapiens
atctccaaagaatgacaaaataaagaagcgtacgttaggctcccaaggagacaccgcccccccttccccaccattcttcatctccattagattccctaccgcggaccaaagatgaacctgctaccaatcaagttcctgcccaagttattttatttcccgcagcccctccacctgccggggcggtgctcggcgcactctaggct

SEQ ID NO: 3026 - DNA, 201 bp, Homo sapiens
tgatcgggcgccgaaacgccgggagtcgggggctaagggctcgagccaggaggccccggagcagcagccgcccgctcctcacgccgccgccgccgcccccgcggttgcctggacacgggataaccgacttggggcctcgaccgcagcagagccggaggggtgggcaggcgcgggtccgggagacgcgcggggaaacgcgcg

SEQ ID NO: 3027 - DNA, 201 bp, Homo sapiens
ttattttaaagcggcagcgcacctccagagctggcctccctccccgcctcgggttcccggaccggctgcaggagcttccttccccgggtcgggcggcggcgtctggcgtcctcgggctgggccattgtcccatgtccttctctgggcgcctggcgcgtgtcccaccgccgccaccgcgcctaaaggccaggctggaagccc

SEQ ID NO: 3028 - DNA, 208 bp, Homo sapiens
gggggcgccccactgacccttcttggcgcttgctttcctccccaggctgcgccttcctcacctactgcgagcgtgagtcagcgctgaaggcccagagcgcgctgcacgagcagaagactctgcccggggtaagtggcgcccgccgtggcgcaagcggccgacgcgccgacagggggcgacttcgggaggccgggcggcggcgcggcgc

SEQ ID NO: 3029 - DNA, 201 bp, Homo sapiens
cactgatgaatgcgcgctcggatccccgggcggactccctccaagccggctcgcttttctagtctaaataaataaataaagccagatggaagaaaaaagcgcccattccacctccgccgccgccccgcccgccatccctgcctttgcttcgcccgcctggcgccctaatagagcatagcttggtggataaagcccccctac

SEQ ID NO: 3030 - DNA, 201 bp, Homo sapiens
gaaaggaaaaagcgatacctctgtttcgcacagagccaaacactggaagcacgagatagccgacgtggaccaggaccatcctggctcctcgcgcggcggcggcggcggcggctgcgcgcgggccctttgtggcgcggctccggggcgcgggcgcgggcggcggcggggctgcgggagccgccggggcgggaggcggagcgc

SEQ ID NO: 3031 - DNA, 595 bp, Homo sapiens
cctggctctcggcgctcggggccagcgcagcccggggcgagcggggcgcgggccggggagggggagctgcccgcgcactccatccccctcccccccgggcgggcggcggcggctcgctgtatatatctcggcgcaccccgccaggtcgcgcacagcgccccgagcccaggcgcctccccgcccccctcccgcgctccgcggcggcggcggcggcggcagcagtagcagcaatatggctgttgatgggtgtttggggtggcgctggcggcgggaggagctcccccgagcccctgcgccggctgcccgttgctagctatggcaaatggtggcggcggcggcggcggcagcagcggcggcggcggcggcggcggaggcagcagtcttagaatgagtagcaatatccacgcgaaccatctcagcctagacgcgtcctcctcctcctcctcctcctcttcctcttcttcttcttcctcctcctcttcctcctcgtcctcggtccacgagcccaagatggatgcgctcatcatcccggtgaccatggaggtgccgtgcgacagccggggccaacgcatgtggtgggctttcctggcctcct

SEQ ID NO: 3032 - DNA, 201 bp, Homo sapiens
ccccttccctccgtcccctcccctccccggagaagagagttggtgttaagagtcagggatcttggctgtgtgtctgcggatctgtagtggcggcggcggcggcggcggcggggaggcagcaggcgcgggagcgggcgcaggagcaggcggcggcggtggcggcggcggttagacatgaacgccgcctcggcgccggcggtg

SEQ ID NO: 3033 - DNA, 269 bp, Homo sapiens
cccaccgaccgcaccatctgaccgcgggaaacgaaatctgagctcaggaatttgaactgccccacgcacgttcgttcccggataaatctcctagaggaccgtgatttttccacttagagattatttagggagatgtcctggatgggacaagtagacaaatggcggcccgaggaaaatgcaggaaactctacattgtagacgcttaagcaccaactgtctgggccccggggcagggaacgggagacattatccaccggaaacatcacacc

SEQ ID NO: 3034 - DNA, 201 bp, Homo sapiens
cgcggccgcgaggcggggctggagggcgctgcgggctgcgcggaggctgcgggaagcgcggggagcacgcggagcccgactagcagggagatcgcgtcgcgccgggcacaggcacgggacccgcgctctaggagggcgcagcgagaggcgcactgcgcacccaggggctgcggtcccggccgccgtgcggtgacaagctga

SEQ ID NO: 3035 - DNA, 267 bp, Homo sapiens
tgaaatttagaggaaaataaaaatgcagcggttcctacggaggctcctggcttgcaggacatttgagggtggagacaaggatgccgcggagggaggactcgggagcccggccgcgccctccagcctcggcacccgcgctcagcgcgccgcgccccgcgtcccccgcgcgtggccgcctcccgcgggccgggccggggctgcgctgccatctagcggccgcgcgcccagcgccgcgccaccgcccctgcaggccgccggggctcctgc

SEQ ID NO: 3036 - DNA, 287 bp, Homo sapiens
ggtccagactccgcgagctccgggctccgcttacccggccggcggcctcctcggggcggagcgcggcgtctctggagccggcatcccggactccggcgccgccccgcgcaccgcccccgtcccagccttcagtggcgcggcgccccctcgcgacatccgcgggtccccaggagcgagccgaccctcggctgggtttggagccggggccaagtccactcggagggagcacggagcccacccagctgcccttgggggcaggaggcccaggccccactctgcacaccgcc

SEQ ID NO: 3037 - DNA, 201 bp, Homo sapiens
cgacctggcaccagcgcggaggccaccttgcgcagccgggcaggcacggcggctcccaggcactcccgcagcagttccagctcctggtccgcggcgccgcgagggcgagaacccgtgggcgccggcccctcctcccgccgccggtgccctgcaaagtggaggccggcgcccccggcgcccccgccgcgctcggggcaggcc

SEQ ID NO: 3038 - DNA, 201 bp, Homo sapiens
cggaggtctacgctgagctcgcgcagcgcgcacggcccgtcggcggcggtggcccccgcgctgcgctgtgcccgacccggcccgcgcggatcccgcccgcgccactccacgcgcaggccctgcagcgccttcaggagcagcagcgctcgcaggggatcgccgaggccgccggggccacctgggcagagcgcgagcaggcgc

SEQ ID NO: 3039 - DNA, 286 bp, Homo sapiens
gcgcgggaggcgccgggggccgcggaggcggggcggggaggggccggcggcggcggcggcgcgcggaggagaccgcagtgcggccggcgctaggacccgcgggggcctcccaggccgcggcgcctcccgctttcccccactccccgacccttcttcgcccccaaaatgaggaaacggagcaactcgctccaagttgtgcagccgggaccgcctcggggtgtgcagccggctcgcggaggccctcctgggggcgggcgcggggcgcggctcgggggcgccccctgag

SEQ ID NO: 3040 - DNA, 244 bp, Homo sapiens
aatgcttagcattatttaaaaagaaaaccacacacattagccaatgatatattctaaccctcaacaaagctggtatttttctctgattacagactttgccgtggcaaacccgggctccgacgacagaggcagcgcagaagctcgctcctaaatgagacaattttattaaaatcataattccttgcatttctatagcgccttttcagtggcggagatctcaggtgccccacgccagggtctacta

SEQ ID NO: 3041 - DNA, 201 bp, Homo sapiens
gttctaacccctctccgagaccccgggcggcggggatcttccctcgggtggctgcgtgcgcgctcagcaacccggtgggtggaggcctggagccccgcccgcggccgcccccgttgaccccccagtgtctctgtttgtcctccagagctcaggcagtcagtttcccgctaggaaggcagagcagcgagatccccggcccac

SEQ ID NO: 3042 - DNA, 372 bp, Homo sapiens
ggacccgccgcccaggcccgcgtggggaccgcagggaactcgcgccacgccgggggtcactgtccatcgcgaggtgctgaagtggctccgtgaccgccgcgggccgtggctgacatcgcggagaagttaggactttcacagtctctgccagacttgaaagcaagctggaaatcgatagctgtttcagctgtttcagattctaatctggtttgggtttttccccctttcatttgaaaatagactcagggcaatgcttaagagaattccaaccgacggaagtggccgggaaatcctgccttcggtactgagggatgttaccggagattcccctgccccaggcctgccggagtccaccacattcgctaatgccac

SEQ ID NO: 3043 - DNA, 201 bp, Homo sapiens
aaccctcccgtgctccctgcacaatctgggagagacgcagcgctgtgggtgcagagctgcccagagagggctccaggccagggcagggaagagacaggacgccgcggggcccggctgtcggcgctgttgccatcttatggctgaaggggactgaggccgaactgggcaaggagaagtcggtcgcagattgtggagctgact

SEQ ID NO: 3044 - DNA, 247 bp, Homo sapiens
ggggcaggaccttagaagttatccaatcagggacgctgggctggaaaccgtccaatcaggcacggggcaggagaggacagggcggcttccgggatgtggcggggcctttgtctctggctgcagttggagctctgcgtctcgtcttcgttcttctgtgtcctctgctgctagaggtccagcctctgtggctctgtgacctgcgggtattgggggatccacagctaagacgccaggaccccccggaagc

SEQ ID NO: 3045 - DNA, 201 bp, Homo sapiens
ccgttccctctctcgggatgtcggaccggcactctcaccatttctaggcttccagggggccctggcgtcttagctgtggatctcccaatacccgcaggtcgcagggccacacaggctgggcttctacgtgcagaggacacaaagcagacagacgaaaattggagcttcggcggcagcgagaaacaaaggccgcgccaaatc

SEQ ID NO: 3046 - DNA, 201 bp, Homo sapiens
ggaccctgagctggggaccgtccaatcaggcacgcaactggagcggacagggcggcttccgggatttggcggggcctttgtctctcgctgcagctggagcgcttggtctcgtcttccctgctttgtgtcccctgctcttagaggcccagcctctgtggccctctgacctgcaagcattgggagatccacagctaagacgcc

SEQ ID NO: 3047 - DNA, 235 bp, Homo sapiens
accccgtcccctgcaagcctgcaacaccccgcacccagacccgcaatccaggcggaggataaagggttgcagcggagggcgcagagcagatgctcagggcggggcagagggggcgggaagctggcgccacggtcgcggcgagggcgagcagccgcgcgctcccggtgctaggaggaatgcccgcagagcggaggctggcaggcgcgagaggccctaagcgcgcagtccgaccaag

SEQ ID NO: 3048 - DNA, 201 bp, Homo sapiens
gcggcacctcgctcccggctttgcgcgctcaccccggggcgcgccgaggccaccgcagggcacttacttggcacttgcttttgagtgtgcagatcgtcgcggttttcacttgggttttcaaacaagtttcagggagaaagaaggaggcaaaaaaaaaaaatccaattatgcaaatggactccggactgggaggcgcgggat

SEQ ID NO: 3049 - DNA, 201 bp, Homo sapiens
gccgcgccaacgaacgcaggcggcgggaggctcggcggcggggctcgcgttcctgcaccgcgaccgcgccagaaaacaccccggggctgggcggcgtctcggagacgcattcctttgttactcccaccgtctttggtaacgattattaatgccatcatgtcccatttcccctcaccttcccccgctcccagagccgcgccc

SEQ ID NO: 3050 - DNA, 201 bp, Homo sapiens
aaagagggagaaagagactaaaaaaagaaaaagataaggggagggggaaggaaggaaggagagaaggaggaagaagtctggggtttgctgctccaggagcgctcaggcagccggtgctggagcgcggggcgcccgccctcgccgggactgtcggcctcggggcctgcgagagcgccagagccccagccggcgcgcccgggc

SEQ ID NO: 3051 - DNA, 201 bp, Homo sapiens
gctcctgcgcgcggaaaggcgctggaggcggctttatagccggggaggccagcggcggcgcatctgcatcctgggagacgtctggacccagcccaagcccgcaggctgggcgagcggagacttttgatcttaccgtgtgggtgagatcactgtctcccggtctaaaagaaaagaaagcatgctgtgaacttttgaaacaaa

SEQ ID NO: 3052 - DNA, 201 bp, Homo sapiens
tggaacccacggcgcttcgcccgtcccgcgcccaggaatactgtgcgcctagcgcagatgcgtccccacgaccccctgcctggcccggggccatgtggccgcgcaccggcctctgaagcccccatctgactgctggggaaggcgcccagaactaggagcgggttggttggggactggtcctcgcgctgggtcgcttcgccc

SEQ ID NO: 3053 - DNA, 296 bp, Homo sapiens
ccgggggtgggggtaagcgccacgtgcgcgccaggtccttggtgtgcccggcaggcggcgctgcgtggctgcggctggctccgagggtgcggggggcggcgacccgggagggaaaacccctgcctcttcccggggcttgctctgcccgtcctttaaactcgccctacaccctccccgactcccgtccttgcaagcgttatctgcagcctcaccggccctcgcaacggtggtggtggttggtggggggtctcgaagcttgcctctggccagccggaccccggtgggagatggaggca

SEQ ID NO: 3054 - DNA, 201 bp, Homo sapiens
gccggccgagccccgggagccgaggctggaaacgctggagcgggcgctgcccaccgaaggcggcccgggaccgggacgcgggtccgagcgaccggagcgcgggctgccgtggcgctggtcgtagcccaggctgatgccgctggatcgggcgctgccgccaccgccgccgccgtcggaccccgccaggctggcccgtgggct

SEQ ID NO: 3055 - DNA, 201 bp, Homo sapiens
actcgccactgtgtacctggacgccatctgcagacccagcgcctgcggggattccggaaacgggagagcgggcttccggaaacggtgaccaatgggaaacgtgatcagatgttactaggcgaacagtccgtttccaggcaacacagaaggaagagacgctctcagtcaccctaaaatagacggagctttcagccaatggat

SEQ ID NO: 3056 - DNA, 266 bp, Homo sapiens
ggaaaccgctagctctgagcgccggactctttgtgctgggtgggagtgggggcccgcggtcctggtgccccaatctttggaggaggacgccgggcggggcgatgcctgtgcttgtggttccctgaggcagtgggagtggcgtgtgaaggactgtgagagtctggcgtgaagtgactgtcatttgccagacattcgtctggctgagtgtggccccgggatcgtgtccgtaagcggatttcgtggaggcgctttcccttttatctttc

SEQ ID NO: 3057 - DNA, 201 bp, Homo sapiens
caaagaagccgcgggtatcggcccaacaaggtgcagcgaacagtcgcccgctcccgcctcaactcacagcctcacattccacggtgccattgacttcctcgcacccagtcacacaggacgtggacaggcacacggggtgacagcctcgcactgaacggtaccaacctccactcgcaccggagtcacacagatggcctgcga

SEQ ID NO: 3058 - DNA, 228 bp, Homo sapiens
aggacacgctggacagttccgaaaagacacagtgggtggtcccgggcgtgggcaaccgggtgcggaactacagcgtacccggagctgcgaacccagacgcgggtgactgctgaccctctgccctgtcgtttccatttgtgcatgcaggtggcggttagttggggccagggaagcgtggagggtgggttccaatcgagtcaagaaaagcctggggtgtcctgaactctg

SEQ ID NO: 3059 - DNA, 248 bp, Homo sapiens
ccgggactgagcttctgcagccctgaggcctggaggcccgggcggtagtaactgtgccggaccaggttcgtgggtgcggcctgtggtgcagttggagaccgaggccccgcgcatcctcgtccgcgcttcagccacttaggctcggccgtagcgaaaaggcccaagagggaagtcagaggtgaacgccccaggatgaaggtcccctgcaaaacgctgggacctagatttggggtgggtgtctggggtct

SEQ ID NO: 3060 - DNA, 387 bp, Homo sapiens
aagccgaggtgctggaggacgtgttgcgggagcagttcgggccgctgccccagctggccgctgtctgccggctcaagcggctgccctcgggcggctactcgtccactgaaaacctccagttggtgctggagcggcggcgtgtggccaacgccaaggagcgtgagcgggtgagggatccctagggtcgacgtccgttccccccttccctgctctaccaccaaacacctggtcaacacccgggggtccgctcaccgcccacccccgctcgaggcgacttcgagctcccgaggcctcccacgcccccagcttgtcaggagaatggcagtggcctccttcttctgcacctccgtgcagctgctcgttggcggccgctgcggtggccgcctc

SEQ ID NO: 3061 - DNA, 203 bp, Homo sapiens
cgacctaggctctccagcccccgcccagtcccccgcgtgcgggcgccgggaccgcagtacctgtgacgccgaagcccagcaggccgcagacgggagccacgcgcggccctggcacagggtaaaaacctacgctcaggtaggcgggcagccacgatgtcgggcaagcccagggcagacccccggtggcgcacagggaagcagcg

SEQ ID NO: 3062 - DNA, 203 bp, Homo sapiens
tgcgaacaagaccaaggcgaggtgaggcccaggcccccgggactgacagcgccgcggcagggggctcgaggcgggagctggggaccccagcgccccccacgcgcgccccacgggggctgccgccaataaaggcggagggcaagggtgcgtccacccaagcaagggggacggtgggccgcccgggctgagcagcggagcgcagc

SEQ ID NO: 3063 - DNA, 312 bp, Homo sapiens
ggcccaggaggagccgcgccgggctcggttataagaggccggctagcaggcgctccgctagcacccgcccgaccccggcccggagcaccgggcgcccagcgcgggtgaaggcggagccgcagggttggcccccaaagggatgctctcgcccgagcggcgagaccagccccgctcgcccctcgccgcggccgcgccgcagccgcccacggccgccgacatggccctctactgcggcgacaacttcggagtgtattcgcagcccggcctgcccccgcccgccgccaccgccgccgccccgggcgcccccccggc

SEQ ID NO: 3064 - DNA, 407 bp, Homo sapiens
tctcggctcgcgggaggcagctgcaccaagaaggtgaggacgctgagcgggggcccgtgccctccgccgccgcagcccccactgccggcgcgcgccctccgcgcccgccacagcagcgcgctaggcggacgccgcgggaatttgacgctcgaggctcgcggcccctaatgagagtcccagaacacttcccgcccttgacggccagcggcagcgccgccgcctcccgcagagcgcccgcttctccgtttctagagccttagtctctcctcgagcgacctcgcagcctccctcccgtctccatccgccgccggttctgcagcccggctcctccctcagtctaggcgcgcgggctgtagtgggcgatcgcctttccccgacccctcgccgtgcccctgggcctcccgaag

SEQ ID NO: 3065 - DNA, 295 bp, Homo sapiens
attctgggccgcgggagaagtgcgtgcagcccgggcaaggccgggcggggccgggcgcgggcgggcggccgagggatgcgacagggccgggcacggctccgcatccccccgcactcggcgccgccgcctcgccgctctctcccgcttgcagggccgccccgggcaccccagggctgctgaggggcgggcgggccgtaaaagccacgagagaggggcggcagggcggcgcggcctgcgagcgccgcgggaccccgaggagcggcgcggggagtacaggggcgcgcggggcgggcgc

SEQ ID NO: 3066 - DNA, 435 bp, Homo sapiens
acaattctggccccacacatttcacatgccccgcacaaagaaacagaaagcgggcgacacgccctgggagggcgggctggcggcttctccagctcggagcgcgtggaggctgcgcgtaggggtccgggacgcgggacagggactccgcgcagcccaggcgccggggaaccggggctggagtcggggatctgagcccagcggacgcctcctccgcctggaggcccggcacggaccgggacaccagggcgtccgtggccgtggctcggcccctggctgctgcgggccgcggcctccagtgggtccccaggacccttccccacggcgggtactcaccgaggctgagaggccacgccgtgctgttggggcttctcgtcgaccacattcctgggcgtcagcccgggcagagaccgcggggactggccaggccgggccagg

SEQ ID NO: 3067 - DNA, 410 bp, Homo sapiens
tggctgtgccagccgatatgagcccctccctctctaggaaggcgcaggactcggggaagcctccgcggccaggccgcctgcctacccgcagaccccgggcgccgcccgcgttccctgcccttcacttcccaacccctgcgtggccccagggtccacattcctggagttttcctccccagtaaatagtgctgtcccccacttaacagcagaggcgcccaggagttcaggcgatgtgtccaaggccgaacagagggacagcagtgagctgctcaacctttccagctgcgcagccaggacacggctgggggcgggtggagatgtggcgcagggttagggtccgggtcccgggaagtaatgaccgagggcggtgaccactgtcttcagcttcccggcgggcttccctccaaggg

SEQ ID NO: 3068 - DNA, 392 bp, Homo sapiens
tggaagcatccgccccatcgcggggcttggcatctaggctttgggacctctgccattgccaaggatctcttcggggacccgagcccccgggctgaggaccgcgggggaccccaggtcgggacggagcctcctctggctcgctgtgcgcgcacgcctggaaaggcgggatttaaggcagcgatgctgcgggaggctctgcagtgtcaacgagcccccgaacggttccgcctcattccctctctgtgtgcctcgcaagtctctgcttagtaaaccgtcacagcttcggcgcgcgagagtggcgttggcacgtccaaaccccggggtcctcggccaggccaggggggcgggcgtgcggcggggccgggccgggccgggcgcgcccagcgggctcc

SEQ ID NO: 3069 - DNA, 203 bp, Homo sapiens
cccgaccccagtccgccgccgtcttctaggcggattccccagaggcaggtcccagtccccggcgcggggaggcggcgcgcttcagaggggcgcagggtgcgcgggggccgttggccctccgggcacttcccctttgcggtctccccgccctccttcggagctggtgcctgaggtcgctgggacctcagcctggcgtcttctct

SEQ ID NO: 3070 - DNA, 398 bp, Homo sapiens
gggttcggggataaagggtgacgtgtggtcctggggaaggtccgggatgagggagctgaacccagttgttccgcgcggtgcttagagtgtttcaccgcgcgcaataaatctccgtagacaccgcatctccaatgcggtgtccctctgtgtcagtgccccggcggctcttgcagggtgccaatgttacggctgtacaccgcttttccctcccatcatcctcacctgaacagacctggaggaggcggaaatggaaattagggcatgtccacaagctggattcgttagatcctcctgctcggcggtatgcttgtgcatgcctgcatgccggcaaggagccacggatagggaaggctcaagagctggccacctgagcgcagtagatgggctcccgcagtttt

SEQ ID NO: 3071 - DNA, 286 bp, Homo sapiens
gccggttcctccacacccacgtgcccctcgtgtgcgcgcccccggcctgcagatgctacaaggctggcgccgcctggatttccgggcggccccaccctccgcggccgctacgcctcgctccctgcattcagtctccttggcgtctccgctgcagcatccaagaccaggcgccgcctctgctagccgtgctgcccagcacgcctgagggccgctgccggcaggcctcacctcccgcccgggtcccccactcacctttccttctggacggtggggttcaagctctgca

SEQ ID NO: 3072 - DNA, 267 bp, Homo sapiens
ccccatctccttctcccctccctagtctggctgaagaacgtccttaaggaaatccgggctgctcttccccatctggaagtggctttccccacatcggctcgtaaactgattatgaaacatacgatgttaattcggagctgcatttcccagctgggcactctcgcgcgctggtccccggggcctcgccccccaccccctgcccttccctcccgcgtcctgcccccatcctccaccccccgcgctggccaccccgcctccttggcagcc

SEQ ID NO: 3073 - DNA, 260 bp, Homo sapiens
gaaatcacgataggtttgcaccaccgcccctccccctacgcccccgcccaggtctgcaaagccggttgcccctggctaataggcgcctttcctgctccacggtgaaaactagtctgtggtgcattgagatttgcaaaccattccctgaatgccaggggcgctgcaaaacagccgccgggtgcagtgggccgggcgctcggccaccctggctgcgatcatcgcagcctcccaaaggatgcgggcagatgcagacggctctg

SEQ ID NO: 3074 - DNA, 239 bp, Homo sapiens
gtgagcggggcacgagagtgcagggctccgctggtgtcctcctcccggcgcccgccggacccaccgtccccaccgctgcggtgttcgaacccgcggactcggatcggcggcagcagaagcggcagcggcaaagcacccgcagaatggggtatcgcgaaatagtttcttctcctcctcctcctgctggtggtgcagccgcgacagcccgtcttccaggcaggggtttggagcttgccttc

SEQ ID NO: 3075 - DNA, 846 bp, Homo sapiens
ggtggcctctggggcagacagagcaggacctgcttctgccccttgccctcctcgtcctcctctctccagcggcggcgaccgcagtaacagcggcagtggcggctgctgccactgctctgccgctgccgagccggtcacctgggcacccgcggagccgcgccgctgctaccgccccggcggcctcccggagtgcgcggagggggcggcggaggagcgagatatccatagtaaccgaggatgcgaggggcgcccagcagcagcgagtgcctgggagccaggaggaggcccccgcgcgccggcaacccccagtgctaggcgccctgcagcccccgcgcgccgcgcctgggcccgcatcgctctcgcagtgagggtccgcccgagcggtaagccctccccggcggccaagccgacacctcccccccgcctcgccgcccaccccgggcagcagccgcggaacaatggagagcgcagccagcagccctggagacggcgttcgggggaggacgcgccgccgccgccgccgctgccgccagggcaggcgcgcgccgcgtggagccgggcgggtgcgagggcgcgcggcggggggtggggggcacgcgccgcgcggggggcgggggcagtggggggcgcgcgcgcgggcccggggagctcgcggggagagcccggcgctcggcgcagcgcggcgcggccaagctccgcgcctctcccgcccttcctcggcgcgctcgccctcgcctcgccgctcgcattcgctgggggcgcccagaaagatgcacagaggcaacggctaggggagcggaggttcaagccacatgtctgcgtcctcgggggccagagcccgccagc

SEQ ID NO: 3076 - DNA, 526 bp, Homo sapiens
agctgtgaagaggcgtgggggccgcgggaactttcctctggccggtgcgatgaaagccgggcggacgaggtggctcaacggggctgagagtggttcggccgaggcgcgggctgagccctcagcacctggcctgagcggcgtgggcagcagcctgcaccgcggacacctccaactctgccgcgtctgcgccgcactctggccgtggcagcgattttccgggcatctctgaggccgcccttagtcccacaagcacttagccgcccatttcagagcagcggcgccgaccgttttaagaggagtcagttcccgacaccgcctcccacttacttctccacatttccaccgctggagggggtgagtgccgtggacaggcgctcccgtccggggacagctcagcggcggcagtcagcccgaccctcctccgcgcgggtcgcccaaacttgaccagcagagcgagcggctcagcgcagtagccgccttcgcggcttccagttgtagaaaagcaaagcgccgggaggaagcagca

SEQ ID NO: 3077 - DNA, 201 bp, Homo sapiens
gtttcccgcagataagtaaacaatctggacgtgaaatggaaatggtaattaatgcagtaatgctgttacacctcgagtgtgcaaatcccattgactcgccgcgccacggggggtgccgggcgtacggggaccggtggcgtgcgcccaggctgcccactccctccctcctctctccctcctccctaggtccccgggcggggc

SEQ ID NO: 3078 - DNA, 523 bp, Homo sapiens
ttctacgagaagaataagaagggctggcaaaatagcatccgccacaacctcagcctcaacgagtgcttcatcaaggtgccgcgcgagggcggcggcgagcgcaagggcaactactggacgctggacccggcctgcgaagacatgttcgagaagggcaactaccggcgccgccgccgcatgaagaggcccttccggccgccgcccgcgcacttccagcccggcaaggggctcttcggggccggaggcgccgcaggcgggtgcggcgtggcgggcgccggggccgacggctacggctacctggcgccccccaagtacctgcagtctggcttcctcaacaactcgtggccgctaccgcagcctccctcacccatgccctatgcctcctgccagatggcggcagccgcagcggctgcagcagctgcggctgcagccgcgggccccggtagccctggcgcggccgctgtggtcaaggggctggcgggcccggccgcctcgtacgggccgtacacacgcgtgcagagca

SEQ ID NO: 3079 - DNA, 276 bp, Homo sapiens
ccgcccaggcagcatcctcgcagcagccgccaacgagctgcagccgccgcctactgtccgcgccggctctcgcctcccggtgcctgccgcaccgtgggccgcctcgccgtgcccgatgggtgcgcttctagcgctgccgccgcggcgctcggcctcgggttcccgccgctgcgccgctagctcgccggcagcagccgcgctcactggcgcggacccggagcggctcaggcgctcaccccgggacggcccgtgacgtcacggagggagggaggtggc

SEQ ID NO: 3080 - DNA, 357 bp, Homo sapiens
atccttcccccaggcaggagcagacacctgcttgtccccacggcgcgccagcgccctgctctagccgtccctgggccagagctcgaaactcacccactgcgctcccaccccggcacagacagccctcaaagttgtccgtactccccagacctcgccttctgctcagcccccggaccccgcccaggggttgagttgacgtccgcgggtggacctctctggtccgctgcgcagggaactgacttcgggaatccagggcgcacagaggccaaagaagctgcggcaagggagggtgggcaaatccagcttgagcctaggtccttgccgctttcaccctcaagcctgccctgcctccctcct

SEQ ID NO: 3081 - DNA, 278 bp, Homo sapiens
tgccgcgctgccgccgcagtcagccgcgccgccgccgctgccgcagcgcgggcggccgcgcgccggtagcaggggcttggcgaggaagccgctgagcctcgcgcgctccgcgctcctggcggtcgcagcgctgcctattaattgattctcttattgatttatttaatttttaggagcggctgctcggaggcacgggtcttctcctaaacctgcagcgacgcccccggcgtgggcacaaaggctccgacggcggccggcgggggctgcccagcgcccgg

SEQ ID NO: 3082 - DNA, 336 bp, Homo sapiens
ggtgatgaagtttgggcagaaatcccctgtcggccgtccgctccacgcttccctcggggccgacactgccaacctctccgggcactgaggacacctctgcgccctggagcggtgggaggacgcggagcgccgttctctggcttccgacaccctgcccgccctctctagtgggtctgtggctgcgccctctcgaaggaagtaataaatctttctgaccttgggggtcagaggagacgcttcagttttccggaggggtgtgcgggcgggaccgtctttccgctttactggacctctggccggggctgctcttgtttcattgtgccccacatgcggagc

SEQ ID NO: 3083 - DNA, 311 bp, Homo sapiens
gggagggcggtaaggagtgcggaggtccaaacgggcatgagcacggggcggcccggccggaggcggccctgggcgcccccagctgcctccggctgcccccgctgcggcacccagcggcccatcggggttgcactgctgcagcggctccttgtgccacttgtagtccaggaggttgagcatagtgagcaccagcagcagtgcatagcccgcgcacaacaccagcgccttcctacggaacaccttcattccgagaggggacgcgggccagcggcgtcctgggcgccggggccactgcgggagcagggcacgcg

SEQ ID NO: 3084 - DNA, 201 bp, Homo sapiens
aacgccggcaccggctgggaagcttcggtgctccgggtccctcttggcgagggcggagaagtcggcggcctctgcctagaattctgtgattgtagggatcgagacatcaagggcgggggtgcagaggattacaagttccctagcgcgtctcatttgcacataaatgtgctttgcctcctaaccttgtctctgttacctgtg

SEQ ID NO: 3085 - DNA, 201 bp, Homo sapiens
ctcccacttcgcgcctctcggaattccagaactcgggtggccggcccctggaaagccgcagccggcgcgatgcattctgtagacctcaccctgctgggacggacctcctaatcttcagaaccgcgggccgcagggagttaaattgctgccttcctctccttctctcgtgcggttggtggcttgttttctaaaggaacgttt

SEQ ID NO: 3086 - DNA, 481 bp, Homo sapiens
ccggggccgcatcgccatggcgacctgctcacctgactcgctccgggtggactcgccgcgacccctgggcgttcaggcccctgagggcccaacgggcgacggccctccagctccagctgtgcgtctccgcccgggcgaggtggggctgaccgcggccgtctgcacacgtcccctctggtccgcgcccccggcctgggagggcggactcgcccaccccacgatggccccggctttggaagggactgtttccgtgacccgttctcccaacagccgctaacaaccccctctaacgtctcctgcgcggcccgctcctgagaaccctggctcgggagagcgacgcggggtcctcggggctgcgcaggctgcggcgccctgcccacgctggcccgagggcgcggctcgctccgggtcggctcacacacctacgcttcctgccgggaggcggctgggacgcggcggggctgccccaagtgcagtcgcg

SEQ ID NO: 3087 - DNA, 280 bp, Homo sapiens
gagccagccggaggggcggcggcggctccgcgcgcccagagcctcagcccatgaatgggactccaccctgagcgccccctcccgggcctggggaggcggcggcgcggcggcggggggcgccccgcaagcccgcggctctgagcggccacccgcgcagcaagttgggcgagttggcagccgcctgcacctgcctcctggccccggcccctgattccgcctccggccccaagcgcccgggttgcgccctcggctgcctcgcgaggtagccccaggaggccta

SEQ ID NO: 3088 - DNA, 252 bp, Homo sapiens
gcgtggggagcttggtatcttatccaatcagagcgctggattgagaactgcccaatcaggcgcgcagccggagaggagggggcggcatccgggatctggcgcggcttttgccttttgcgccagcgtgagctcggttagggtctccacggccgtgctttcacccctcagggaggcgtcggtgattcggtcacagcctcagcctccgtcgctctgtgacctgcgggtattggatgattcgtagctgagactccg

SEQ ID NO: 3089 - DNA, 239 bp, Homo sapiens
acaggcgatggacccctcgggctcccgggggcgccccacgtgggtgctggccgggggtctcctggcagtggccctggcgctggggggccgaggctgtctcggcgccagctcacgtccccgctggcgccccctcggcgcgcagccaccccgggatccccaggtggctcctaggtctgggcccggcctgaggatccctccggggcggagcggggcggggcccgagagcagcacgcaggtaa

SEQ ID NO: 3090 - DNA, 405 bp, Homo sapiens
agttcccaaccaggctcaaggagtcgcagagccggggctccgggcccgcaggacccagaagccacgcgccccgcgctccccgccccgccgctgtctgctcggccgacccacctggtgtcgcgtgcgctggcggcccgcgcggcagccaagccaaaggccgaggccgaggccgagcgcggcgcccagcagcacggcgggggccagcagggcgggcgccggccgcagcgcgtcccgccccagcagcagccgcgcgtcgctcttgcaggccgccccgccgcgggccatccggggcgctcaggctgccgccccgccgcatcccgccgcctgctgcaccgtccccgccagggcggcgacgcgggacttggagcccgggcgggccaggggcgcggcccgctccgcagactt

SEQ ID NO: 3091 - DNA, 237 bp, Homo sapiens
tcaagctgctgtcgcccaaggtcaccaagcagaactctctcaacgacgagggctgccagagcgacctggaggacaacgtctcgcagggtagcagcgacgcgctgctgctgcgcggggcggcggccgccgtgccctcgggcccgggagcgcacggtggtggcggcggcggcggcgcgcaggacaagcgctcgggcttcctcacgctgggctaccggggctcctacaccaccgtgcgcg

SEQ ID NO: 3092 - DNA, 204 bp, Homo sapiens
agccgagcagcagccctagagcctctcgcaagtctctctcacacttccccgccctcgccccaaaggagcagcagctccttcttgcctctccattgccgccgccgcaccggcggagctcctctctcgcgcgtctctcctccgatggagctcgggcgccgccgacgccgccgctgccccgaaccctgagcggggccgccccggtcg

SEQ ID NO: 3093 - DNA, 224 bp, Homo sapiens
ggtcggggtgcgcgcgtgtgcatgctgtgaatgcgttgcgcgatgtgcgcctctattccacacccagccggtctcttgcttgtgctgttcgagtgtggacgtgtgtacgcgttgcattcgctcggtgtggcagcgtttcgtgagctcctggaggcagggaaaggctacttgtgtttagaggttctgttgagggcgggaggggctcagccccagtggggagtcct

SEQ ID NO: 3094 - DNA, 278 bp, Homo sapiens
agcgggtttgcctcccactcccccagcctcgcgtcgccggctcacagcggcctcctctggggacagtcccccccgggtgccgcctccgcccttcctgtgcgctccttttccttcttctttcctattaaatattatttgggaattgtttaaattttttttttaaaaaaagagagaggcggggaggagtcggagttgtggagaagcagagggactcaggtaagtacctgtggatctaaacgggcgtctttggaaatcctggagaacgccggatgggagac

SEQ ID NO: 3095 - DNA, 232 bp, Homo sapiens
gggaaacaggtcggcgtgccgaaagacaccgagtaggtagaaataaggcaaactcacagaggcgcaacaggtccggtcctccgtggccagggcgagccgcggccccgcgtggcgcctcggccgttgccctcggaccctgagcggccactgttggggccctcgaaagaggtgtcggtcctctgggagtcggaagagctgtctgggtgggtttcgtcttgctttttaccccacc

SEQ ID NO: 3096 - DNA, 331 bp, Homo sapiens
tgctctgcctggactttaccgtggccgagaaggaggaatggtacaccgccttcgtgaacatcacctacgccgagcccgcgccggaccccggggccggggcggcgggcggcggcggcgcggagctgcacacggagaagacggagtgcgggcgctacggagagcactcgcccaagcaggacgcccgcggggaggtggtcatggccagctcggcccacgaccgcctggcctgcgaccccaacaccaagttcgccgccccgacccgcggcaagaactggatagccctcatccccaagggcaactgcacgtacagggataagatccggaacgcgtt

SEQ ID NO: 3097 - DNA, 231 bp, Homo sapiens
gctgcgccctgggcgcatctgcgcgcctggccccgcgccccgcggagagggcgatgggtcccggtcaggactgagccccccttcccctctccccagtcccgcctggcaccccctcctctgccccgagggcgagccacggtctgcgccgccgccttcccctccggtgcccccggctcgccgtcctcccgcgccctccctccccggacccgttcccggggccaccatggccgc

SEQ ID NO: 3098 - DNA, 201 bp, Homo sapiens
tgcccggccctgggcttagcccgccggcgctgctgggggcggcaagttccgcaccagcctctactcgcctcaccttccccggctgaatgagtgtcagcccgcgcactggggccacccagaggagacgggcaaagccgcggctccacgggctgcactactggccgcggagcccaggggagctgcaggagaaaccactgcgag

SEQ ID NO: 3099 - DNA, 201 bp, Homo sapiens
agctcgatgaccaggagctcccggccctcgaagctgcgccccaccgtgtaaatcctgctgatggcggtgcactgcagccacacggacacgagcgcctcgcgcagctcggggtagcggtggtactcgaaggagatgccgtcctcttgctgcagccgccggcgccgcctcatgcccgccgcgggcgccccgggctcctgggct

SEQ ID NO: 3100 - DNA, 219 bp, Homo sapiens
ccgctgcagccatgaggagaacccctacttccatggctggctcatcggccaccccgagatgtcgccccccgactacagcatggccctgtcctacagccccgagtatgccagcggcgccgccggcctggaccactcccattacgggggggtgccgccgggcgccgggcccccgggcctgggggggccgcgcccggtgaagcgccgaggcaccgccaaccg

SEQ ID NO: 3101 - DNA, 284 bp, Homo sapiens
gccgggggaggtggggccgccggggaggaggcgagggaaacggggagctccagggagacggcttccgagggagagtgagaggggagggcagcccgggctcggcacgctccctccctcggccgctttctctcacataagcgcaggcagagggcgcgtcagtcatgccctgcccctgcgcccgccgccgccgccgccgccgctcagcccggcgcgctctggaggatcctgcgccgcggcgctcccgggccccgccgccgccagccgccccgccgccctcctcccgc

SEQ ID NO: 3102 - DNA, 429 bp, Homo sapiens
aaagcatctctctcccaacccatgaacggatcccgacccctgctctgccaccattcatgcgtcccgcatccgaggtgtcgccttcacccacacgccccacggccccgcgaaactcggccctccagctcgcgggacgcgctgcctgccaggcgggcccggcggtacctcgggggcgggaggggtcggtcgcagggcccccagcctggcgcccgcggggcgtccgcagcgaaggggtgggtgtcgctcgtgaacgcagcagggaccagctcagcccgcgctcgcccctgggcctcggccaccgcctctccgccactttctcggcccctgcgtggaccggcccgtggcgggggctgctctgcgccctcgtccccgcagcagtcgcggacccccattaacgttgacgagtcagtgtcgcgacccggggagaga

SEQ ID NO: 3103 - DNA, 283 bp, Homo sapiens
aaaagaccgcggtggagaagatggggcgttctccgcgacactcggctgcccagaggtgcaaagccggtgggcgcacgcccggggcggccctacagccctcgggccgccagtctcagggtgtcgggctccaactaaggccccgaagcccccacgcacctgagggcattttgaccagctcttgcgggctgtcttgcggccgcagtgggttctgaaagtccattccggcgtagggtggaaaccggcgggaggcgttgctgattctcgattaaacaatagtgacgag

SEQ ID NO: 3104 - DNA, 241 bp, Homo sapiens
cgcgggtggcggcggctgtggggccgtctgggattctccgcagcactgaccctgcaacctcctgtgtctgcgcttcgtggtgaggggcggcgggatgcgcgcgatccctttttgactcagccaaacggaaaagctcgcgcgtcccggctggaaggtggaggtcaggcaggacccggcaaaggcacattccaaacgaagcagaccccattcctcacctgcagagggaaggcggtgtggacgg

SEQ ID NO: 3105 - DNA, 244 bp, Homo sapiens
gcagcagccccacgttgttggcgcaggcggcgcgcaggagggtcgccgtctccgggacgctttccgggacgccctccgggacgctctccgcgctctcgacgccgtgctcctcctcgtcctcgaaagggtagaaagagtcgtccgaggcgatgctgcgggtgtctggcagactcgagaagtcctcaaactcttcgtagtcagcggggtcctcctcgacctgcgcgccccggggtggggacggcgg

SEQ ID NO: 3106 - DNA, 225 bp, Homo sapiens
gcagggggcgctgcgctcgccgagctcggaggggccgccgggccgggcgctgcgcactcgcgtcgggagccgcctctcgcccgcggcgctcgcccctgccgcccgccagcatcccttgtcccgcggccgcgctcagacaacaaaagcggaagatgctgcagttgggcaaggtcaggaccttgccctgaagccgggcggcgccgcgcacgcctcttcccggactga

SEQ ID NO: 3107 - DNA, 249 bp, Homo sapiens
cgccgctctcgcggcggcactgggcatgctccgcacccggggccggtttcggcggcggggcggacgctccctcactagccgggcgcccgggccggccgccgaggtttaggtggaggctgaggctgccgcgcgccgcgggaggagcctcgccctcggcggctgaggcggcggcggcacaggtggcgcgggccgcgcgcggggcgcagctcgggagcgctcggcgccgggcgccgcggcggccccaggctc

SEQ ID NO: 3108 - DNA, 255 bp, Homo sapiens
cccgaccgggagcccagagccctgccagcgccgcactgtgcgccgcgcaagtcgctcgatctccccagcggtaccggctctaagcagtaaacatctgtgcgcttctgagccagggacgcgcgtggggggtgggcgtgcacgcgggtgggccagcgcagagtgggagcttgtgggtgctttccgtcgggatttccaactcagctgcctccgagagcctaagctgagcgccgcacgtgctcgtgccatctgctgtac

SEQ ID NO: 3109 - DNA, 243 bp, Homo sapiens
acgtttgcctgagccgtgttgccggggaccagcgacctttcacccctcccttcccacaggagcgccccggcccccgcccccgccccaaccgccggcgcgcgtcctcaccgcgcacgcgctcccctcgcgcgcgcacacgctcgcgcacacacgctccctcgcccccgcccgcggagttccccctcacccctcagccgccccgccggctgaagcatcggcgctgggaggcggcggcgctgctga

SEQ ID NO: 3110 - DNA, 201 bp, Homo sapiens
cggcctgctctgggctcgtgaggcgaggccgcagcgccccgacgccgggtgggcgtgtgggtggagtggagacttgggtccctcggcgcatgggagtcccgccgcctgcggtagggaaccgcctcccacccctggcccggcccgggccgggagccgtgtcccgcgttgactcggtgtaactctccagctcatttctctcca

SEQ ID NO: 3111 - DNA, 208 bp, Homo sapiens
gagaattgaaaaggaaggcgaggagcaggggctgcgggccgggcttttgttgctcgcggtccccgggggccgcgccgcgccgggccacgtgggggctctcgccttccgagcgggcgtcggtgggaaacctgcgcggcgagagacagggggatggggcgcttttgacgcgactgtggggtgcgggtagtcctggaggaggatgtccggc

SEQ ID NO: 3112 - DNA, 257 bp, Homo sapiens
tagcgctctcgccctggccatggagcggccggcgcccggcgaggtggtcatgagccaagccatccagccggcgcacgccactgcgcgcggcgagctgagcgcggggcagctgctcaagtggatcgacaccaccgcctgcctggcgggtaggcgggcgccggggctgcggggaggcgcgggaccggggctgcgggagcggcggcggctgggggctggggggggtaggaaggcgaggaaggtacttgcggagagctgaa

SEQ ID NO: 3113 - DNA, 350 bp, Homo sapiens
aaagtgcttgtaaagtctgagcagagtgcgcggggccgagcggggagaagggtgcggggtaccggggtgagatacaggaaagaggaggacggtggggagcggtagaagacagcgtccccaggaccagcgactctgtggctcactcggccactgggtctcggcgcaaaccctccctaggcagtgcgggcgatgctgactgcagacgtcgggcagggctttcgtgcgggcgggagcgggggaagccagtgcgcccgggcgtcagctagttgatgcgggaagaggctggggagctgcagggccgtccgcccccgggtgcggtgctctggcgcagggcctgggctgagccgttc

SEQ ID NO: 3114 - DNA, 216 bp, Homo sapiens
ccaccctgcccgctagtacatttcagagtctctaacccctccctgcatgcaagcccaggcagagtcctgccaggtttcacaccagagcacacccctgcacggactccccaggaccgcggcgccggctggctgcctcggccccccgcggccgcgtgagctccctcttggtggtggagggcgcatttcaatctggaaactcccagcccctaatttggt

SEQ ID NO: 3115 - DNA, 269 bp, Homo sapiens
ccgcgaagggcacaacctgagaagcccgtggcagcccctcgcagcgtcgggtgacacagggctcccccacccccaggagaagtgggcaggagagagggccgcccgctgctccccgctgcgtccagggatggagggccccaccacccatggaattgctggcccctctgcgtggcccgggacttcagccgtggcttcgcgtcaagagggtatttttcctaaacgaaaccgcttcgttcgttcgttcgttcgttcgttcgggcagcaatgcc

SEQ ID NO: 3116 - DNA, 258 bp, Homo sapiens
agcaaaactcccactaccctcccggtgcttaccagtccgctcctccaggcctctgggaccatctcactcaaaagcagttcctctcagcggggtccagatcgtccctgagatttcgctgagaaactttcagcgggttagcgcttgggcgctgggcgccgagtccgacatggctttctggatgccgttgatttgctcgccggctgttcagtctctgcctcatcccggggcgcagaaaggggacgggcaggggcccgatct

SEQ ID NO: 3117 - DNA, 224 bp, Homo sapiens
agcttccagggatatttgaggcaccatccctgccattgccgggcactcgcggcgctgctaacggcctggtcacatgctctccggagagctacgggagggcgctgggtaacctctatccgagccgcggccgcgaggaggagggaaaaggcgagcaaaaaggaagagtgggaggaggaggggaagcggcgaaggaggaagaggaggaggaggaagaggggagcaca

SEQ ID NO: 3118 - DNA, 256 bp, Homo sapiens
ggccgtgtagcccgccccgctcctccttccgaagagagatctggtgctggcatgggcaccccgcggccaccggagtggcttcccggatgagcctggcttcggcgctgacgctctggccctgggggctgcctggctggtgtcaggtagcggaagacgcctggagagtcactcgctccttcccccacccgcccccaccgctgctcgtgccaggacgcgcagtttgcagttgcagctcaggcactggcgcgggatggcg

SEQ ID NO: 3119 - DNA, 310 bp, Homo sapiens
ctccgccgctccggaggctggcggtgagggcactcgggcggcaggggcccgccgaggggtcgtggcacacgggtaagggggccaacccggaatggcttccgagcagctccacgtcctgccaaggacggtaggtgcaagggtcgggggactctctgacggggtcgtcccttcgggcacggggaggttcccaccgagccccaaccctgaacggggcagggggcagagctcttggcaggcaaggtctccggaggagggaacggctggggagtggcggagccccggagtggtggccctgttaacgccccttccc

SEQ ID NO: 3120 - DNA, 410 bp, Homo sapiens
aaggatccacccagacgcacgcccgcgcggagacgcacgctggcacacgcgctcacacacgcgagcacacacacgcgcacactacccggttcgtgcgcgcgggtcgctgttcctgttgcattatgcaaaggtggctgggaaagcgcgttgacttacatttacatagcccatcttctccccacagtatgtgactaatacgtatcccggggaggagggagcgcggctgggggtgctaatcggaagggaacagacagtgagtgccatcttgctgggaggttccagaagcaaagcgccaacgacgacagtagcggtggcctcagctccaccagtaactgccgctggcaggagcaccacacgctctaggagtttcccgggtatcaagtatgggtccagcccgtcccagttatcct

SEQ ID NO: 3121 - DNA, 274 bp, Homo sapiens
agaccgagggaacgctgctcatgcggtgagagccagcgcgggaggcggcgagggcgcggggagaccggggagggggtgggccccgcggcgcccgccgcccgcccccacgcgcgctgtcggtatttgcccgccttgctgcaacttgctgcagtgtttgaaagagtagtaggagcgcatggaggtggggccggggaaagaccaggcggagtggttgtggggtgagcgcggagtgggtggggaggcggcggcggtggggaggggggactggccccag

SEQ ID NO: 3122 - DNA, 201 bp, Homo sapiens
gccgccgccgccgctgcgccgctcttcacccagagcccggcggcgccgccctcctctcctcccgcgtggtggcggggcatggcatcaccacgggcaccgcgagggggccgccagcgcctgcggcgggggcagcggcctcatgtgcgccggcgggtttcaaggaggaagccggcggccgacggggcgcccgccagccagaga

SEQ ID NO: 3123 - DNA, 265 bp, Homo sapiens
ggccgggaggcgcggagccagccgcctacggagcccaactgtttgcatcggggaccggcgggcggggcgcgcccgagtggtctcgccgggaaagggcggcgggcgctggagaaggcgcctggcgcgaagctgggcggcgccccgagggcggaggacaggtggccgcgcgaccgcagccaggtagcgaacggctcgggggctgcgcagcgcggtcccaaagctcagcccggccccgggcccagctcgctgccgcctgccacgggag

SEQ ID NO: 3124 - DNA, 201 bp, Homo sapiens
gcgcagggggcagctgcgcataacgcgctcctggcagcgcggcggctgcgggcggggcgcgctccacgtgcttgaaggcggacgcctcttccggggggacggagagcagagggaagccgcgcagggccccagagcagggcaggccaggcggcggcggcggcggcgggtccccagcgagcaggcacttgggatggtggtggt

SEQ ID NO: 3125 - DNA, 362 bp, Homo sapiens
tttcaaaccgagtcctcgggtgtgcagacccgcagcggagtcgcgggagcgaggtgggaaatcctggccgcggcgccgggctccgcccgccggggggcgcggggcggcgggcgcatgcgcgtgcgcggtgcggccccagccctggctgccgccgcctgccgccgccgtcgcgatgcctattttagtcaaagcggctgcgggcttggggacccggcccgggcagcggagcttccggacccgccgacccgccgaggagcgcgcgtcgggctcccgtcgagcagctgagcccgtgtgccccgcgtcccgcgccccgaagctgccgctccgaactttggtcggcgctgcccaggctccccgccagg

SEQ ID NO: 3126 - DNA, 298 bp, Homo sapiens
cagcggagacggttaagtgttttttcattaactctccttccccggagctcaggggtgctgcatgggcggcgcttggacccgcgctctggagtcatcaggcggagcaaagccagcgcgctccgcggctcggaatccagctggctcgctaccctcccactcctgcgattttactcccgaccgcgctccagggcagaagcgcctgagctcccgctagtgggcatttaaagcccatgcccggcgggcgtgctgacgccactcgggggctgcggagcgggagggggcggtggggggcggggac

SEQ ID NO: 3127 - DNA, 295 bp, Homo sapiens
gaaggacacgcaaacctgccgagggctcgggggctccgggctgctgctgctgccagcgtcctgggaagtgacaggcattaggacctgctggcgcggcggcggcggcggcggcagctccagccgcgcccgccacacataccttcactcgctcggtgcacacgccgcgccgcgggcagtgccgcctgcggaggcgcgctcggggcccgcaggggcagcagcggcagcctggcagcgccgccgcgccctcgggcatctggcccgcgaagtttcgcccctgccgctctccgcgccgctc

SEQ ID NO: 3128 - DNA, 203 bp, Homo sapiens
ggatgcggccgcgcaggcgctcgctccctggcttcctggccgggtagcgggcgttcggctaccggagtccagcctaagggcccagccgaggtctccccgcgcgaggcggttgcgctaggtgagcgggtaccgcggccgcgcctcccttgtcatttactcagcggtcagaggcatcctgcgtctgggagtcccaagtgccttcg

SEQ ID NO: 3129 - DNA, 215 bp, Homo sapiens
agccccaaacctcacgccataaagccccgaagaggcgggttgggggcgggggccggggcggacttccaggggcgtggctgcgcgcctgcgaccccggaccgtgccaatctcgccgccgccccaaaacctgtgggaaaccccagtcctgccacccactcctcctggaggacgcagacaggatctgctctgcaggagcccaggccggccgatccgcg

SEQ ID NO: 3130 - DNA, 201 bp, Homo sapiens
gggcggcggcgcgcgggggacccactccgtttttatttgacctcgggtgactgcctattgtcatggtttgcgatctcgcgtggggaccgcccagggcctcggggccctggatgtcccgggtggcgccgccgtaatctccgtgccctccgcgccgcccccaccccgcccccacccgggccgactcgagcggctgcagcctcc

SEQ ID NO: 3131 - DNA, 340 bp, Homo sapiens
cccttcgagcactcgccccgggtccccctcaagcagctgtcccggccccggacccctacttgatccccccaaccgacctggcagggcacgcatacctgacgcccattttgcagtcgagcacacaaggtccgtcgaagccatcgagcaggtcctgcagctgcaggtagctttcgccgtcgcgctccaccacgccgtggaaggcaggcacgcagccgcgcagcgcgtcagccatcagccgcgccaggcagtagcgctccggctccgagcagcgcttcaggatcagcccgctggtgcccgccgccttaaaactccctgaggaccggcatccgtcagcgccgcc

SEQ ID NO: 3132 - DNA, 201 bp, Homo sapiens
ggcggagggacagagctggactcggaagccgcgggtgggagctgctcctcgcgagcccgaggctgctggcaccttgtcgcgggcagcccgcgccagcctcgggagtccctgggctccgggagagcgagccggggtcgcctggccacaaagatgcccgcgcgcccgccctgcgtacgggacccgccctgcgccctgagccct

SEQ ID NO: 3133 - DNA, 236 bp, Homo sapiens
aacgctcggccaggtcccagagttcccgcggagagcggggcgcctgctgggggcggccgggagggccgggccaggggcgcgggagaccccgcggggacgcgaggtgttgcgggttttgtgcggttggttgggaacgaggagaatgtgccatcaacagtgtccaatcgactgatcaccttgggtgctgtgtttcctcccttatctctctttacctttgggaaaatgcactgctcagg

SEQ ID NO: 3134 - DNA, 251 bp, Homo sapiens
gtgcctgaatctcccgggacacttagacggctggagcctcccgactccaaggcgggcgacggcaaagttaaacgccagcgcgctgcggtccccgggcaccgaggcgtccccgctcccgccacccacacagggcgccaagtgccccgacccgcgagtgacgaggacgcacaggctagtgacacgacccgtagccagcactgagcgggacgacggggcccgagcgcaggagggtgcgcggggagctgaggagc

SEQ ID NO: 3135 - DNA, 201 bp, Homo sapiens
tgagcagctcaggcagccgcggtggtcgtgaacggggcgggagtggggggtgcccaggccatcagaggcggccccgcggcctgcaccggctggagtgggcgactcagagtctgagtggagggggcggggggcggcgacagcggggggtcctggcagcgatggcctgaacctgcgccggtgggggatggggcgggggcgggg

SEQ ID NO: 3136 - DNA, 206 bp, Homo sapiens
gcgctggggaagggacctctcggaggcacggggcagcgtgcgggctgcggcagcgaccccgacccgggcccccgggctttgtcgggctgagcctgcgcccgctccgccgccgccaagttcctccaactttgcccgctgcgctcggatcgcgcgccaggcctgggggcgcagcaggggctgggggcgcacgctgcgcactcggggac

SEQ ID NO: 3137 - DNA, 201 bp, Homo sapiens
gctccggctccgggcgccgaccaggtccccttggcccccgccgcgcgccctccaacctgctgctgccgccgccgcgccccccaggctctgccagctacccgcgctctgagcccggggccagattcccatggaagcgccgcgatgttcgccccccggctgctggatttccagaagacgaaatacgcgaggtgagcggcggcc

SEQ ID NO: 3138 - DNA, 203 bp, Homo sapiens
tgggacttcctttccaaaaacgtaggcgttttcccgggtcgcagtcgcagtcgggagactgagggttagggcgcggccgcggggtctcctgggccggggcgcggcccacgtctcaggcctctgcggctctgaccagaagccgctgcgcctttggccgcttcccacccgtcccgtccccgcaatcccaggcccagggttacagc

SEQ ID NO: 3139 - DNA, 216 bp, Homo sapiens
taggggagacgaatcgattggctgcccggccgccggaacggcaggtcccgtcgctcccctcgcctcccgcattcccggcccggtcccctcccatcaccgcgtcccgccccaactcgcagtcagcatccccttcccatcctctccccgtccccgctgccacttccttccttggatgttggaagcgcagctggtattttcgttctcccaaccccccaa

SEQ ID NO: 3140 - DNA, 335 bp, Homo sapiens
gcccacccgccccctaggtgacccggcgtcctcgccgcgcccgctggaagtttgcaaactttctccgggggttccgccgccacgctgggaagctggggacgcggggggaggttcctggctcgccgtctccgctgccgcttgaccgcacttctggagggctccgcaccttgccaggtctctggaggcaaacacacacccccgattcataactggtccccgcgtcaggggactcgcgcgctcccacacacgcacgcacgccgggcggactcggcgccggctccacgttagcatccctccaggcgcgcggcgcggcggccaccgagcgctccggcact

SEQ ID NO: 3141 - DNA, 230 bp, Homo sapiens
ccgggcgctgacagacgacttttctcacttgtcagttttctcgcttgtcagcagagctgctggtaagtgagagaaaacagaggggcgcgaaggcaggcgcggccagggagtgagcggggcgctgggcgcggggcggagccgggtgcgcggcgtccgggtcaggccccaccgcccgcgccggctcccgctttgctcagccgccgcttttctctcccttctcactttctctc

SEQ ID NO: 3142 - DNA, 224 bp, Homo sapiens
agcgcagctatttgaaggctcccatggtccccggcgcctgcgtttgaagcccgccttcaggctttggggggtatttgcagaaaactcccagcagcggctcgccaaccagacctcagggtgcacggggggtggcgccggtaattatggcaactctcaaaataaaataatataaaataaagtaaccaacgttcaccaaccaccaccccatctcaccccctgtactg

SEQ ID NO: 3143 - DNA, 211 bp, Homo sapiens
gggacacgcagggggacacgcagggactgcccgcgcgaatggcttcgaacgcatgcgctccaccctacatttcacagtcgccatgacgaccgggaggtccgctcgtcaacggctagtcaacggctgcggggacaagtccgttgaggctgccaggcgagtcaggcctttctggacctcgcctgactcggatgggctgtgcctgaaattgacc

SEQ ID NO: 3144 - DNA, 205 bp, Homo sapiens
ggcggtgccaggtcggggcggggggcttctccacccagcacggggcaccaggccgggatgggacctttttccagaaagtcgattggatgccaggagaggcgtacggctgggggtttctttctttctctttcccctccctcccgcggttgaaccaaatcagaactgtcactcagggcttgtgagtcagaagggatcggattacacg

SEQ ID NO: 3145 - DNA, 398 bp, Homo sapiens
ggcgcgggccccggcgcgcccagcagctcggccagcgccagcgcgcccgccagcaggctgagaacggccagcgccttcagcgtggccgcctgctccagccgcagcgtgtagccgcggaacagcgcctccagctctgggcaagcgaactcctcgtcgcacgcccggagcccgcgccggcggcttgtcccggccgcccgctcggcgcccccgggctcgcccgcgccgcctccgccgccgcctccgccgcgcggcgcccccgccatctcagcgccatgcagcggccgcggccgcgggcgcgcccctcgccggcccggggcgccggggcgcgggcggcggcgccggggcgggcgggcggcgggcggcgaggcgccggggcgcggggcgcggggcgggcggag

SEQ ID NO: 3146 - DNA, 290 bp, Homo sapiens
catcgcgccgcggccccgcacgggatgcggcggccggcgctgtgtccgcgggccgggcagcccggctcggccgcggcgctgcgggacccgcgcgtaacccgtgggggcgcggcgcgggcgacacgtgcgggccgccaggagggggagggggacgcgcgccgccgggcccgccaccctgcacccggggccgctggtcggtcggggcaccctcacgctcgccccgctggcgagactggagggactcgggacatcgtaaagcactttccccagtgtctgggagcgcccgctgt

SEQ ID NO: 3147 - DNA, 307 bp, Homo sapiens
ccaccgcagccggttccggccggattcaaacagcctcttccccattctcgggacacccactccacgcactcaccatttcccagcctccagatgttccgccgtcctccctatggatctcccagtacctgcaggtcacaggataacagaagctatagtagagtcaccgaggaactccaggaacggaggagatggaacagtggagacgcgaactaggatcagagcccggaagctaggagacaaaggccccgccatattgaagaggccgcctcttcctctgtagctgcgcacttgattggacagtttcacg

SEQ ID NO: 3148 - DNA, 212 bp, Homo sapiens
gggggtggctgtgggtccgaagtggaggacgagcatggtttgggagataaggaaccgtcctgagacagagaaggctcccgggagcggacagagagtgggcgaaatcggtgcgcagtaatcgcggcgccagcttcagcgcggcccctggggcgcagtcccaccccgcctcagcagctgcggagccttctgacgagcctccgcctggcagcact

SEQ ID NO: 3149 - DNA, 375 bp, Homo sapiens
cagggcgtccccgtctggactacaggagaaagtttgggaggcaggttcaacttttcaacttggcggggaattcctctccctcttacacagtttgcagcgcgggggcggcggggtgacagtccccgtgcatgaatcagccacccctcaggctccgccccggcgggggtcggccggacgctcgccccgcataaagcgggcacccgggccgcctggagcagaaagccgcgcacctcctcccgccaggcgctttctcggacgccttgcccagcgggccgcccgaccccctgcaccatggaccccgctcgccccctggggctgtcgattctgctgcttttcctgacggaggctgcactgggcgatgctgctcaggagcca

SEQ ID NO: 3150 - DNA, 201 bp, Homo sapiens
ggcggcatggagcgcagtggctgggcccggcagactttcctcctagcgctgttgctgggggcgacgctgagggcgcgcgcggcggctggctattacccccgcttttcgcccttctttttcctgtgcacccaccacggggagctggaaggggatggggagcagggcgaggtgctcatttccctgcatattgcgggcaacccc

SEQ ID NO: 3151 - DNA, 356 bp, Homo sapiens
gggcggggcggcgcgcgggggcgggggagcggccgggacacgtgtggcggcggcgggggggacgcggcgcccggggctttaagaaggtgtggagcggggcgggcgctttcccaggcctggccgaggggcgtcgcgcagaggcggcggcggcgcacggaggcggcagacgacgcgctctcggcgcccgcagccccggtcccgcgctcccgcggcccaaagtaactttgggagccgccgtctcccgcggaacttctcggcgggggcccgctcccaggcccgctcccgagcccgttccgctcccgtccgccttcttctcgccttctctccgcgtggctcctccgtcccggcgtctccaa

SEQ ID NO: 3152 - DNA, 265 bp, Homo sapiens
atttccaggcaccactcgagtctgccaattccactttcgcttaatctcattttaaaatcctctacagatgaggctctgtcgctgccgcgaggggccgggcggccgcggcgggagggacagggggcctgggtgggaagggagcgcgagggcccctagcggttcgcggcctcgggcggattcccagaacgagtgcgggccgcccggactggcagactgcgagccccgaggggcgcgggacgcagccggctcagacaaagaaaccggc

SEQ ID NO: 3153 - DNA, 697 bp, Homo sapiens
gcggggaggcggcgggggcgggagcgggcgaggggccgcggtcggccggcgtccgggcctcgacccccgggccggccaggggcgcgccgagcagcaggccgtgcgccaggcggaaatgctccagcaggtccccgcgcaccgggccgttcggggggcagtaggggcaggcggcggcgggcaggccgagcgcgccgggcggtggcgcagcggggcacgagtacttcttgtgcgccaggtaggcctcgaggctgtggaagctcacgcggcaggccgtgcactcgtggtagtcggccagcgccggtgccggggctccggggagcgggcgccgcggcttcttgctcaggtcgatggggccgtcggccgcggggccgggcgagcgcgcaggggcgaggccggggccgcttccgcttccgcttccgggccgcggcgactcgggcgcgggggcgtggccgggcggcggggggggcggggcgccggccgcgtgcagctcgtagagcttgcggcgtctgcgcgtgcgcacaggcgcggcgggagagggggccgggggcgcggccggcccagggggtcccgggggcgcggccggtcggcgcggcggcgggtcgtggcgcgaggcgcagtagtaccgcttgtgcacggtgtaggtctcgtggcggctgaagcggatgttgcaggcctcgcacagcgtgcggctggggtc

SEQ ID NO: 3154 - DNA, 226 bp, Homo sapiens
gcagaggcgcgcagaaaacgcgcgggtggcgcgcgcggccacccagtgggtcccgcccgcgccgccggcgccgccgccgccgccgcacgtgcgccgccgcgagcgcgaagggcgttcggacccgcgctctgcccgcccgcctgcccgccggggccactgtggacttccaggtaacagccaagtgagaagccctccctatcaccgaaaggtgtctgcgctcctccca

SEQ ID NO: 3155 - DNA, 201 bp, Homo sapiens
tctagggaggatgggggtcgcgggggaagccgggcgcttcggggtcctcgacacccacatccccgcacggcgcacgctctgcctcgagtttgcgttctccgagttagcacggcgagcttgggatttccgtgcccctcttttgtggctttcgagaaacgccggagttccgtgtcctgctgggggttggggggatggagaaaa

SEQ ID NO: 3156 - DNA, 201 bp, Homo sapiens
cttggagatgtgatcccccaaaagtttagtcggcgaatgggagactgaagggtgacgggaagggggcaggcgcgctcggcgctctgactgggcgtgcggcggcaggattttaaagcgctctgcctcggatcgtctgccctgggtgacctcccggacctgccctggtggaatccggacttgccccgccgagatgacgaggta

SEQ ID NO: 3157 - DNA, 215 bp, Homo sapiens
agaggaggaaggaaggaggaaagaggaagacgggcggccggaggcgcggggctgcgcggcgccggccggcgcggcgctggaaggcgccggcgttaaccccgcgaggcaggcgacggagggggagcggcgctaatacataagagcactgcatcacgctaatcttctcccagaacagtatgcgtcagcagtacattcacgttctgactgaaggacaa

SEQ ID NO: 3158 - DNA, 252 bp, Homo sapiens
ccgccgctgctcgggctccggggctgggtggaggaaaggggtgttcggaatcgatccccattttccgacctttttgttggacattacgcccaccttggacgccgcaagagaagctgtcaagccccgcaggctctgattcggcgccctccgcgttcctcggctgctcccggcttccctgtgcctcggtggagtatttgcgttcggggctggggctggaggaggcagccacacgcgcgcacacgcacacgttca

SEQ ID NO: 3159 - DNA, 203 bp, Homo sapiens
ggcgggggagtgagcggagtttcccacaatgccccggtgcggtgcagccgcggatggatgctgcgggaaggggctgccatttgctgcccctgccagcggcgcgcggacctgcccgcgctcctgcagccgccgccgccgccgccgccagcccgcccggcccctgcagcggcgccgcctgcgctccctccgcggccgccggagcg

SEQ ID NO: 3160 - DNA, 201 bp, Homo sapiens
ggccggctccatgcggggcgctccgccgcgccgcgcccgcgctcctgcaccggggtgcggggcccagcccgacgcgcactcggcgctccgcgcgccctgcgggccccccaggccggcctcgggtgggctaggaccgcggcgctggcaggccggggctgagcccggctccccgcgctggagcctctgcgccgggtgccgccg

SEQ ID NO: 3161 - DNA, 201 bp, Homo sapiens
tgaaccccagagggctgggctttgatttgagtgccgatccgttaatgaggacgggaggataaggttgccgacgcagcggaaggtaggggggaagcgactcgaggacctgacgattatccccaggcaggggcttcccaagcaggcacggaaaccaacttcaccaaaccgcggagtggggactgggcccgggcggtgttcagc

SEQ ID NO: 3162 - DNA, 201 bp, Homo sapiens
ataacccccggaaggagggggttaaatgcggcagcggcgggcctgaaaagggccaggagcgtcgtaggaactggggtgcacaggccctcgcgtgcccagcgcttcgcctttccccgccccaggcctgccaggggcgcgcgtggcgcgggcagagcctggtgggtgggttggcgcggacagaagctctgccggggagcgggg

SEQ ID NO: 3163 - DNA, 213 bp, Homo sapiens
ccgaccgcgtctcctgcgctcgcccgcgctttccctgtcgcttcgcggttcaggggtgtgagtcacccggcgacagccccgccaggtcaccccggggcgcgtaggtggacacgcacaggaagatcgctatttttaagatttccatattgtttaccgtggggcgaaatcccacaattccttgcacaaaatgcataaataatattaaatgagctg

SEQ ID NO: 3164 - DNA, 385 bp, Homo sapiens
cttgcacgcatgagcaggtactcaacactttctggtccagctacatgtgacatgaggccactcacgctctttttaattaacccttatgacaatcatgtgcgttatggagaaaattaatggaggaaaaattacagagtcacccgaaacagttgcgctgcttatcacccggtgtttgagcctgtttcccctgtaattagattacatgtgaggcagccccagctaattgtctgtgccacccaccggggaactccagctctatctgtgaacacccaggccttcccgccgcaggacagatgttgggtgaggcttgcctcccacgcaaacatctgctctgttgttccgagtcagtcacgagagccagccggcttagacaagcaggggatga

SEQ ID NO: 3165 - DNA, 278 bp, Homo sapiens
agggcactaagaaaagaggggcatgcgagcctggaagctggagagagtccggggctccccagagcgggtgggacgccgcgtccccaggactccgcgccacgcgtactttctccaccccgacacccactgccactcccacagcggagcgaggggccccgccgagggcgagcgtaccccgtgcggctgagatgcccggaacgcctccccgcgccccggcttccccagaaggggccacagtcggcccgcgagtccccgggcgggggctgagccgcagtgcc

SEQ ID NO: 3166 - DNA, 248 bp, Homo sapiens
tcggcgcaggcgagtttggtccaagggctcggatcgggtttgggaaaagtttgtccctcgagggggagagcgagcggccgcgctgaggcgctcgcgctgcgcgggggcgtctcccgttgcctgcagggagcgcggcgcggacgcggcgggcggtccggccacctggaacgggcgctcgccctggctctcggggctgctcctgtcgccccgggaagtcgtcgatgggtcccaccgctggcggctcgcgt

SEQ ID NO: 3167 - DNA, 216 bp, Homo sapiens
tcgccgccgctggtgggtggcggcggtccgggtgctttctggattgcgcagtaaagaggcatcttgggagatggggccaaggttttagggggtgccactcgcgaacggttcatccgctagactaggggggctctttggctgtgcgtctggccagaactggccttgacgatggaagtttctggaaccaaagcgttgctttctctcccttgtgttata

SEQ ID NO: 3168 - DNA, 201 bp, Homo sapiens
gcacctaccagggcgtcccgtaaaaaacctcgccttcgcctgtctctgggaaccataggtaagctttgggctttcgaggtgcagttctaggtagagctccgtgctgggaggtgggaagggggcttgaccctggggactcaggcagtctggggacagttccaccaggggccggtgcctagaattggtgagggaggcacctca

SEQ ID NO: 3169 - DNA, 208 bp, Homo sapiens
cgagacggacaggaatcgaggagattcccctgtagcgctctccaccttccggacagaaatcctgtagaccacgttcacttctccactccgtgcatcgcccgtggcccgtgggcagcagctgctcccctgggatccccctcgcctgtccgcgagctctcgcacggccgcgtccctgctgctggggtcgctcgctggccctggctgctcg

SEQ ID NO: 3170 - DNA, 201 bp, Homo sapiens
acttggtttaatcgtcgccagccctaagtcacggcctcggctccctctcctcaactgtgtgggatcccgccgcctggtttcggccgggcggaggggtgacgtcagccgctcacacagtgccccctggccgctggagctcgggaaatctgtgcgctcgaacttggctccgccaagaagctgggcaaggatccgggctcctga

SEQ ID NO: 3171 - DNA, 364 bp, Homo sapiens
ggcggtcagcagggtccccgtccccggggagaagtgcccacgatccaagggctgtctgctctaggaacttcttaaagaattacagacactgagagcattcggggtctggtaggaagtgcagtgtatctcccagctttagggtaactaggacagcatgaatcttttaccttgtggtagaataaacggctagcgcctcgatgtggcgcgctcgacttttcctcacagagcctaaaagtcacgctcaaccaaactgcagcgttcccgcctcagctgggcaccggcctggaagcggcctggaatcagactggactcgaggaggtaagacctcggcagcgcgaggttaaccacaggcctcacccgcggc

SEQ ID NO: 3172 - DNA, 213 bp, Homo sapiens
ttctccaggtccttggcgctctcggcgcggctgtctccgcggctgtcctcgctcatggtcggcggcggtgcgcagcgcggcgctgcccgccgtgctgagcgctgacccgcgcgcccgctgctgcccggcccccggcggcgagaatggaaagttgccgcctccgccaactccgaggagagacagaagactttacatgctggggagaggctgggc

SEQ ID NO: 3173 - DNA, 201 bp, Homo sapiens
ggtttgcttttggaagaaccggttcctcagccccccgtcgccgcagttgtgacacaagtaagtgcagccgcgctgcccggggcccgccagggtcccccgcgcccgctccccaccgtggctcgcggcggccgcgctcccgccccgccccgctcggccgccccgccggcttctgcctccagttgggttgccgtgacgaggaga

SEQ ID NO: 3174 - DNA, 201 bp, Homo sapiens
cccacccatcgcgcccaaccactctgtacagttggcttttttttttttttaagtacagtttaagaaggcaaagggagataggaaagggtggcagcttgacgactcagcgatgcattttagaatcgcccttacctctccagtgtgaagtttcctgggagaggtgagccaaaccggacggccggcctctgcagccgcccagag

SEQ ID NO: 3175 - DNA, 296 bp, Homo sapiens
catcagccgggctggctgggcggctcgggagcccgagcggtggcggagcggcgagcagcgagcagcgcctgcgggagcggccggtcggtcgggtccccgcgccccgcacgcccgcacgcccagcggggcccgcattgagcatgggcgcggcggccgtgcgctggcacttgtgcgtgctgctggccctgggcacacgcgggcggctggccgggggcagcgggctcccaggtaagcccccgaccgaggtggggggcggcgggcgcggggggctcgggcggccgaggcgcggtcccgga

SEQ ID NO: 3176 - DNA, 201 bp, Homo sapiens
gtttccagcaggcttccatctcatcctcctcgtcgtccgccgagctgggttccaccaagggcatgcgaagccgcaaggaaggcaagatgcagcgggcgccgcgcgacagtgacgcgggccgggagggccaggaaccacagccgcggcctcaggacgaaccccgggctcagcagccccgggcgcaggagccgccaggcaggg

SEQ ID NO: 3177 - DNA, 297 bp, Homo sapiens
tgcactcccgacacggagttggtgctccgggaaggctgctctctgaagctcttcttgctctgctgtggttttgctcctccgcggactcctttcccgtgccgaggttcagtttctggttttaaggaataaattcgctggcttgaaagggagctacggcagaagtttaggggcagagcggcgggagcgcgcgatccgcgcggctggagctccgggggtatctggagagcagcgcgtccaagcggggccactggctccgcggctgcgcccctcctcctcccgcgccgcgcctccctcccc

SEQ ID NO: 3178 - DNA, 268 bp, Homo sapiens
gtgcagcggggtctggcgccggcccctcctcatcacgcgcccggcccagggtcgctcagccgccgccaccgccgccgccccttgggtcgatggagtcggcgcggaaggcccgcgcgccctgcgccgccgccgctcagtgccgccgccagcacctcctccgcccctccgcctcccgggctcatcccgcgggggcggcgtcacctcctcgctgcccaggcccgggcaccgcgggcgccccgcgggcggcagccgcccctcccgagcgcga

SEQ ID NO: 3179 - DNA, 201 bp, Homo sapiens
aaggagcgggactgcccctccggctggacgacagcgccggggactcgcagcgtgcgcgggtcggaattaaaaaagcagcccgggagcgcgagggctgagcggggcaagcatgggctgctcctcgcagcctctctcctgcccgaggctcgggctggccgtctgtctgtctatgactgtctagttgtcccttcgactgctcag

SEQ ID NO: 3180 - DNA, 201 bp, Homo sapiens
ccaactcgtccgcagctgcccgctctggattaagccgctccgcggctcgtgctaggcagtgggttcgcttcctccttccctctcttctttaaattgggacgtgcgaaggcgcagctgcctccccggggctctctccatcccccacacaccctgttttcgcttcttgtctctcaggttcgtggcggagagatgctgatcgcg

SEQ ID NO: 3181 - DNA, 201 bp, Homo sapiens
gccctggagcctagcagagctggagcgcatatccccgctctctctccttcgtctccgagtactaggcggacacatccgtacctcgaatgcctcagtgggcgcagagttcaccagaaatggatagccggattcctcggcgcctgctgggggcaccgctgccaggtgcttggggctcgctctcccggctttgctcgcacaggg

SEQ ID NO: 3182 - DNA, 201 bp, Homo sapiens
ggccgccgggcgctgcagtgggacgcgcgcggctgtgagcctgcgggacatgccccccgcgccggctccttgctggcggccatgaagaggcagaacgtgcggactctgtccctcatcgtctgcaccttcacctacctgctggtgggcgccgccgtgttcgacgccctcgagtcggaccacgagatgcgcgaggaggagaaa

SEQ ID NO: 3183 - DNA, 302 bp, Homo sapiens
cgcccggacgccggagggccccgacccccgcgcggctcatgcgcccgcgtccgccccgctgctccgcgaggcccgcgggacccctcccgccgccgccgccgcgcccgccgcccccggaggagcgggctggccgaccgccaccgcgccgtcccccggccgcccccgaagccgctccatcgcggtccctgccgtcctggggccgcgccccgctcccgcgccttgggggttgagccgagcaaacttcgcgcaccggccgacgcccggcggggaccccgctgcgcacccgcgcgcccgggtgggcg

SEQ ID NO: 3184 - DNA, 201 bp, Homo sapiens
cctccctggggcccttcatgccaggccccgcggctgtgtccgcaagcgcagatggtctcgggactcgggccaccctgacgccgcagacccagcacgctgcggaccgggcacgttggatctcgggacaagtgcggagggtcgggggctggaagggatccgagagcagagcccgcgtccccatttcacggacgcggccaccga

SEQ ID NO: 3185 - DNA, 220 bp, Homo sapiens
cggcccgccgccccgcacctgcgcccgcagccgcgcgcccgtccgcccgccgccgccaggccccgcggcccgggcgcccatgccgcgctctgcgcccgccgccgccgccgccgagagccgcggagcgcagcccgagggagcgccgggcgggggagccgagcgatcgggggcggggcggggggcgagagctggcccggggcccggcagtcgcccgccccgc

SEQ ID NO: 3186 - DNA, 347 bp, Homo sapiens
ggcggcacaccggcagggcggccggccttgctgggctctctgggcgccggccccgggggctcgggcggcccctttcggtcctcggcctggatccgcgaacgcgcgggcgcgaggggttgggacgcgggagcctcttgagtgcggagcgcggagccctggtgtcccggcgcactgcagccacactcccgggccgcgcgctcccgccgcctcttacccgcgccgcagggtcctcccctttgaggcgccgcccgcgcaccgccgggggggagggggcagcgccaacaaattggggagctcggcccgccgcgctcaggtctccgcttggagccgccgcacccgggacggtg

SEQ ID NO: 3187 - DNA, 201 bp, Homo sapiens
cgtgcacgccccgcttttattggctccgctccgtgaccacgcccccgcaaccttgatagactccacccccgaggacccttctcaggagcacagtgaccccgcctccacagggtccgctccgccacactgacccttccgtgtcgctcgcgggaccccacccctgtccgcctgctccggtgcccatggggaagcctggtgcca

SEQ ID NO: 3188 - DNA, 201 bp, Homo sapiens
cagactcgggggaattaggaaacgcgcccggcgaccctcgggcagtagcaccgggccaggtttgctttcggaaccgctgacgccactcgccgcctttcccgcctgggcctctcgcgggtcgcaggggtggaagcccgacctgggccagggcccggatttcttcctcccggcctctgcgccgccgcccccggtgccaggacg

SEQ ID NO: 3189 - DNA, 225 bp, Homo sapiens
ctgcagcctgggcaaccgagcgagactccatctaaaaaaaaaaaaaaaaaaaaaaactaaggctgaacccgggctcccgcacgcccgcacccacctgcgcggccatcacgcgctgcctctcggcgatcaggttgcacttcttgcactggcagtcgcgccacatgcagaagcgcttgtggcccttgagcggcgaggcgtagccgtggttcctgcagcgtgcgcact

SEQ ID NO: 3190 - DNA, 318 bp, Homo sapiens
ggccctggcagagcgcgcagcgagtcggggatgaggctctccaagctctcgttggcctgctgccggcgcagcgccacctgcgcagccatgacccgctgccgctcgatgatgaggatgcacttctcgcaggtgcagtccttgaagcggcagtaacgcttgtggcccttgagccaggacaggacgccatggttgcggcagcgcgcgcacttgggcgtgcgctgcaggggcgcccgtggcggctgcgacaccgggccgcccatgtacaggtagggggagccgtagccgttcatgccccgggctcccgaatgagttggcagc

SEQ ID NO: 3191 - DNA, 265 bp, Homo sapiens
gtggagggaaggagggaggaagccagtcaagtcctcagcgacctagcccagcacatcccgaactctgcaaagttctgctcggtcttctgcagcctcgggcgcctcaccttgctgaggccgctttcggcttcctctgacccaggctgggcgggaaaggtcgggccgcccccgcctggctcagatcgctggctcacccggcgggcgcgcgcagttgcattcagcgcagcgccactggcttcagtctgcagactgcgctccccttcct

SEQ ID NO: 3192 - DNA, 259 bp, Homo sapiens
gggccgcggggtcgggggcggccgccgcctggctgggggatcggggccgtgctgggcgccgcggagccgggacagcagcagtggcggcggggacagcgccgcggctggggcctcgcgcctcctggagcgccttctgcccagacacgacgacttcgctcggaggcacatcggccctggggacaaagaccagagagagatgctgcagaccttggggctggcggtaaggacctccacccggccctccgcggcctcccctccg

SEQ ID NO: 3193 - DNA, 201 bp, Homo sapiens
gagcgcagaccaggcctccagggcgcgggagcctgttgctctcccctgcaggggccgctcccggacgccccatccgccgttacgtggtcccgggatgtgcgggttgcggtagagagtgggcagcaatgctcctggtcctgcgttctcgccttagccgcggggaccccgaggcgagccgctaattggtaccggtgccccgtc

SEQ ID NO: 3194 - DNA, 323 bp, Homo sapiens
acgcgcctgccggggaagggctcgccggcgccgcgccttcgaggctcctgcggcgaaccgcgtcacgcgcgactcctggccgggggcgggaggcggcggcggcggcaggagaagcccaaggcccgagcggcccgcagcccccacgcctgcacccctccacccccgccagcccgatggttcgctccgcggcgtgcactggagcaagcaggtcccgctccgagcgcgcgcgctctgggaagtgctgcaagtttggagacctggagtgagctccgggcgctgctggcccgactgtccgcggtgtttccccggtgaggtcgcggggg

SEQ ID NO: 3195 - DNA, 201 bp, Homo sapiens
cagcggcggcggccgagcccagcccgtagggtgggaactgagacaggcgtcccacgctgcccaccgcggctgccgcggccgccgccgccgccgccgccacggccgccgcctcctgcatcttgccggggtgagacggctgctgaggctgcgactgctggggcggttgctgcgggggctgtgacgggaggtgcggaggcggct

SEQ ID NO: 3196 - DNA, 355 bp, Homo sapiens
cagcgccgtatagaagtcgcagagcagcggcgtgaagtcgcggctcggcgcgcaccgggccgccgcgaagtacagtgccaccaccttgttctgcagcgccgcctcggcctccaccgtcgcgcccttacaggtcaccaggtgccgctcgcccagaatgtcaaccatggcgcagacacgcagccacctgagacccgaggacacctgcaggaggatgatcacctgcggggaggcggcggcgagcgccgcggtgccccgcctctgtccgcaccaccgggcgctggacctctcaagacctgccccagatgcgcccacaccttggccaggcctcgcctgtggctggagcaattgtgttcgc

SEQ ID NO: 3197 - DNA, 201 bp, Homo sapiens
tgcacctgcgtcgcttttggctccttcaggaatgcgctgaagcttgtaatcagctttgtgaagccattgagtgcacggctgagtgaaacttccaaagctcgaggaaaacgggccggctgaatgggagccagcatggggcttctctccaagcctccgcgctgccaaattccagcagagcccctcacaatcgctccgcgcggg

SEQ ID NO: 3198 - DNA, 290 bp, Homo sapiens
ctgctatgcgcggcagcccgcgccggggccggcaccagcagcgcccgggcggatgcagcgagcccacggaggggcatgcttccacgcaccaagtataaccgcttcaggaatgactcggtgacatcggtcgatgaccttctccacagcctgtcggtgagcggcggcggaggcaaggtttcggcggcgcgcgcgaccccggcggcggctccctacttggtgtccggcgaggcgctgcgcaaggcgcccgacgatgggcccggcagcctgggccacctgctccacaaggtgtc

SEQ ID NO: 3199 - DNA, 201 bp, Homo sapiens
tcactcggcggaaacccgcgagccggcccttccgcgtccaagaagtttacttcctaagcctttttattatgatcttgaatgcggacaattggggccaaacgaggaaggacacagacccaaaagccagacccaggtcccagcgcgcttctgggctctaacctgggagactcgcatccagcccggcggaagctacagtctcta

SEQ ID NO: 3200 - DNA, 201 bp, Homo sapiens
ctctagcgcccaggccgactgcgccctgaccgggagccactgcgcccagcgcagcccgagggcgctgagctcggaggatgcggcgcggggcgggggtctcgggagcaacagagactgggatccgagggcccggcccgcgctgctgcccacgcagcgcttccactttggaaagagtgtctcccgcgcggcgggccggcctct

SEQ ID NO: 3201 - DNA, 288 bp, Homo sapiens
gcccaggagaacccgcaagccagcggcgcctgcgcccgagctgcagccgccctctgccgtccacgcgagctcgagagcggctcccggagtccgggctagcgccgagctgcaggcgcgcgcctaaccgctttgctgggctcacgcggtctgagaggtcggagcgcccaactgctggcacgcgagtaacggcttagttaagctcactcggtctgagaggtcggaggctgcgagtgtcgctgctgaaggctgtggtggaccgggctggatcgcggattctgagctacatcg

SEQ ID NO: 3202 - DNA, 212 bp, Homo sapiens
ccttgcgtggtagatatttagggataggccaatcaccacccccaatcatccgtctttgagaggcccaggatctgtctctatttgatggatagtggtgcacggattaaagacgacgcaggataggtaacctcctcctccaatcccccgggaccagggtagctctgaagacccccagaggcagccaagcagccccttcccgcagcggggagtga

SEQ ID NO: 3203 - DNA, 201 bp, Homo sapiens
gaggcagggaggcgggggtgcgggaggctccgcggctgcgcgggcgcgtgctggtggcctcggcggaggctcagtcccggcccgcgcccgcggcgcccccgctgcggcccgagcggcctggctgcgggatctgtgcgcacggatggcgcggccgccccggcagcacccgggggtctgggcgtcgctgctcctgctgctact

SEQ ID NO: 3204 - DNA, 246 bp, Homo sapiens
cgcccagctccgcgcacgcccctctgcgagtccggccgcccagcgcctcttcccgcccgagccgccgcctgcgctccggggcagccgctctgtctccagcgcgatgtggcctcgcctggccttttgttgctggggtctggcgctcgtttcgggctgggcgacctttcagcagatgtccccgtcgcgcaatttcagcttccgcctcttccccgagaccgcgcccggggcccccgggagtatccccgc

SEQ ID NO: 3205 - DNA, 201 bp, Homo sapiens
cctcccagggatggagcagctacgccttccgagtgtgcccattccaccgatggagcaaagtgaggctctcagctcgcccggatgtctctgcgccgctcgcggggcagctctcgcacagacacgcccgcaagcccccgacccgcccgccacccgcgcccagacacccgcgagcctctggggccgcagggacggtgcagcgcc

SEQ ID NO: 3206 - DNA, 201 bp, Homo sapiens
accccagatacacaggcagtcgggattcccgcccggtgcgcttgtctattcatccctctgcgtcaggctgggacgcgctccgtctgtaaaaggctcaaacgcatctcccgccgcggggcgggatctaggggcccaggccccggggtccagaggcgggtaactttgctaatctcccccagcggcggggaacgtcgcgcaacc

SEQ ID NO: 3207 - DNA, 358 bp, Homo sapiens
ctaacgggcccggtgcatcgccaccgcggccccggccccgcccgagctcggctgagcccccaggccgggctccgggccccgggcgctcgcggggcaggacgcctcccgccgaggcgcaggggcagctacattgcggggcgcctgggcgacggcgccaaagccagggtcacaagggcacgggacaagcggggcggggggagcaggagactaggacagaggtcggcgcccgccgcgggcgctttcacgccgcgggcatcgcccgcccggcttcagcgcccggggcgcaaagcaagggcgcaaactctgcccgaggcggcgacggctgcggtcggggttcaccctgaagccgctaggtgtc

SEQ ID NO: 3208 - DNA, 201 bp, Homo sapiens
gctgcgtgttcgccgcccacagccgcagccaaagagacgcaggcggccccacgcggcctggttcaccgccgcctgcagtgtccgcggcgcggggcgccccgaggctgggctcaccgtcctctccgcgtccttgaagatctcccgggcctcctcgaaggagcactgctcctccttgcactccctctccagggagcccggccg

SEQ ID NO: 3209 - DNA, 201 bp, Homo sapiens
cgcctccccgtccccggcccgagcggccgtcatcgcgggcgggcggcgctgcgcccgggtgcggctcctcgccggcggcggcggcgcggccgagaggtgcgggctccgcgcgggcgggacgcggggcgctgctcgcaggagcgaccaggtgggcgccgggccgaccgcagccgccgtcgcgccccctctcgcgtcccgggc

SEQ ID NO: 3210 - DNA, 201 bp, Homo sapiens
gccgaggcccagagccggctcctgcccgcaggcggcgaacggcaccttgctccgccaggcccctgcgggtgtgatccgtgacccgcagattctcccgggcgcctctggcccatgacgcgggggctgctcgctccacgcaggcggcttcgggatgctctcccgctcagatttcagcggcagaaacagcctcggattctctct

SEQ ID NO: 3211 - DNA, 277 bp, Homo sapiens
aggggagcaaaacggagcccccgggggcacgcaggcttcgtttctgggtgttggttttgcttttggttttttcagccggtgcagtgacccggaacagcgcggccgcttctccgacgcccgcggctccccactgcgccgaggcgagcgccacggctaaagcccaagcctcggcgcccgctgcgcctgccggagttctgcttgtccgagcaggcagcggggctcaggcacggcggcgacgtcgaagggccagtcggcagacagggctgggtctctgcgg

SEQ ID NO: 3212 - DNA, 201 bp, Homo sapiens
caccctgctctcagcccgatcctccctgcgcccggagcctgggctcggcgcgcaggagactgcgtgcactctggcgtccccgacctctgccagggcgcacggggactccagagcggatcctctacgagttctaataggaggccagggagccgggacatcagagacaaattcctccgaagtccccctccggttccactgact

SEQ ID NO: 3213 - DNA, 247 bp, Homo sapiens
gccgccacagtcgccccgagctcgcgcgcagccctagttgccacgcggatcccctgctcagactgcgctgctgaagccggcgcttcgcttcatacgggccgcgccaactcggtcgctgtgcacggtcgggtgcgaaactcctccgcgggctcacggggctgccgaggcggggccgcagcggccgtcggggctggggctggtcccggcctgagacagcttcatggaaggccaggctcccggcccttgc

SEQ ID NO: 3214 - DNA, 201 bp, Homo sapiens
cgccgccccgcgcgccccggccatcgccgcgccttccccgggcgccagggaaggtggccaggtggcctctgcccgccgcgccctgcgcctcgcgccgcccgccctgcgccctgccttgcccggctgcgtccctccgggctcctccgccgccaccgggaagcgccgtccggctctgagcgctgcgcgggctgcgcgcggggg

SEQ ID NO: 3215 - DNA, 201 bp, Homo sapiens
cttgaagccggcggtgtccaggagcgcgccgtcccccgcgcagggccgcctgcgggcacacgccagcgcccctcagcccgcgtcgggcgccctcgcggacgcgcgcagcccccggcccgccaggcccggcccgcgcagcgcagcccgcggccaccgcgacccaccgggcgggcgggcggccgggcgggggcgggcctggcg

SEQ ID NO: 3216 - DNA, 201 bp, Homo sapiens
caggtttggttccagaaccgccgggccaaggagaagaggctgaagaaggacgccggccggcagcgctgggggcagtatttccgcaacatgaagcgctcccgcggcggctccaagtcggacaaggacagcgttcaggaggggcaggacagcgacgctgaggtctccttccccggtaggcggagggatcgcggagctcggggg

SEQ ID NO: 3217 - DNA, 356 bp, Homo sapiens
ctgatcgtgatgataagaaggctggggaggccaagagaaaagggaagagagagtgcagctgcaaacccttctccgggcccgagaagcaccgctctcctgcgtgttcaactggcatttgccaccaacatgtctgtttttatttaaatggcccagagcaaggctctgactaaactagcattcccacgccaacactcagcagcgcctctggtttttggcagattttttccttagctgtcaaagcaaaactatagaagcgtcctggtcttacttaaggcttgttggggctttttgccttcccccggagacccgaatagctcgcagatgtgcggtacctgcttatgttcgtgctccgtgtt

SEQ ID NO: 3218 - DNA, 201 bp, Homo sapiens
agccgacacgcgcgatgcgcgagaaagcgcggtgcaccgggccgctgtcgcggcaaaactgcagtacgtggcggcacacgctgcccacgcggccgtacacgcagcgcgccttgtgggcgtcccagtcctcgcggcggcacaggcgcgagcagtagtaggtgtagcagctgtggcaggacttgaagtagaggcaggcgttga

SEQ ID NO: 3219 - DNA, 281 bp, Homo sapiens
gggctccaccggggcgcagggctggggaaccggagctccgcccgccgacccggagcaccgcccacgcagacccgccccgggcgagggaggggccgggcgcgcacccgcggggagggcggcgagcggggatcagccgaagtcgggagaggggcgcttccacggggcgggaaactggcgcgcgactctgggggaagtgcaggatggggggacaggggcgctcccgcgggggtggatgggggaccatagcggggctggcggggcaggggccggcgcacgaggct

SEQ ID NO: 3220 - DNA, 222 bp, Homo sapiens
taccgacccctcgtgcagcggcttcgccccgccggacttcaaccattgcctcaaggattgggactataatggccttcctgtgctcaccaccaacgccatcggccaggtgaggcggccaggcgggccgcgggtctgggggcgggcagagagcggcgagggcggggcctcacgcccgctgcacccttctcacatccccagtgggatctggtgtgtgacctgggc

SEQ ID NO: 3221 - DNA, 237 bp, Homo sapiens
gcggctcggaggcggccatgatcatgcacatgaaggggcggccggtgcgccggtccgtggggtagatggtggtgggcgtgaagcgcctgttggcctcgacgaactcgcaaagctgctcgtagacgcgcgggaactcgtggcgcaggaagacgccgcgcagccgcagctcgcgctggatgtggatgaaggccacctcgcgcgcgcgccggcccgcctcgccgtcctgatccaggcccg

SEQ ID NO: 3222 - DNA, 201 bp, Homo sapiens
ggcctggaacagagacctcagctgacccacaaggacggggtttgagatctggggctctttgtcacagtggcataacccagcctgtactgactaatacagccccctgtgaaccccggctccaacattcaaatcaaggtactcggctgcttcattaagctgtcacacgttcattcaaaagcactgctagattgaggaaccagg

SEQ ID NO: 3223 - DNA, 364 bp, Homo sapiens
gcgctcgggctctgcagccttctgctgctgctcgcgcccgggcacgcgtgccccgcgggctgcgcctgcaccgacccgcacaccgtggactgccgcgaccgcgggctgcccagcgtgccagaccctttccccctggacgtgcgcaagctgctggtggccggcaaccgcatccagcggatccccgaggacttcttcatcttctacggcgacctggtctacctggacttcaggaacaactcgctgcgctcgctggaggagggcacgttcagcggctcggccaagctcgtgttcctcgacctcagctacaacaacttgacccagctgggcgccggcgccttccgctcggccgggaggctggtgaagc

SEQ ID NO: 3224 - DNA, 201 bp, Homo sapiens
ccgggacacgccttagggaaaccgctcctgggcttggtagctgaacttagacgtcgagtgcagcccgcccggtgcgcgcggcgtcttactgccagatctcggaaatcagctgccagggtggggccgcgttttggcgacggccactcggccacccctgccgctcccgcctctcccaagagatttttctagcgggttaatttc

SEQ ID NO: 3225 - DNA, 201 bp, Homo sapiens
gcctcagaggggagccggggtggatctccatggaagggagacgcttgcgccagctcaggagtggagttcgtgctccaccggttccttaaactgcgagtacgaaatccccagaggggagctgagctggtgccccgcgtgcctctcactctccaccccccacccgcaggccagacctgcgctgcccaccccaggagggagcgc

SEQ ID NO: 3226 - DNA, 201 bp, Homo sapiens
ccgccccatcgatgcggagcgcgagctgcttattgtcttccatcatgctcaggattttggcctgggggcgagagaggtgacaaagagctgcatgatgcgcggggggcgcgcggccgggcacccccggctctacctgttgtgtcctccgcggcccggcttcgcccgcgccccgacccccaggcaccggcagcgccggttcct

SEQ ID NO: 3227 - DNA, 222 bp, Homo sapiens
agcgcacacacacagacacaggctcatatagacagactcggtcctaaaaatacgcactcgcagaggcaaaggctagcgcacaagcacgcacagacacaccgacaggcggcccccggacaccgcgctccctgccgcactcacggcccacgcaagggctcacacacggcctcacggaggacagtcataaaacacccagacacacgccacacacgcacgcgcgca

SEQ ID NO: 3228 - DNA, 201 bp, Homo sapiens
gttcatacatactagtgaaacggttaaatggcagtactaggtgctaagtgaccgtacaggcgtgttcttgtcagctgtgagcaagacaaggcagcttaccgctctcagggagcttagttctcatgggggtgtattcgtttgctagggctgctgtacctaagtatcaccaacccggtggcgtcaataacagatcttattgtc

SEQ ID NO: 3229 - DNA, 265 bp, Homo sapiens
ggcgggcgccggcggggcggccccccagtaagatgtgcgcggcgccgcggggcgccccccacttgcagcggcgctcgggagccgggcggctgggccaggcggcgccttcggggctgctgcgcgcccgcgcctagagctgccgccccagggagcccgccacggccgcgccccgggcacgctcggcggcgcccaacgatgaccgctccctggcggcgcctccggagtctggtttgggaatactgggccgggctcctcgtgtgcgcct

SEQ ID NO: 3230 - DNA, 242 bp, Homo sapiens
gcccccgccggcggcgctgcaccaccaccaccaccacacactgcccggctcagtgcagtgaccccgcgggccgggcccccgccggcgcgctgcagggcgcgggcgcgcagcccgcccgcgcggcctggactctttttgttcggttgctttggattttacaaaaaaaaaaaaaagcccagaaactttcgaacaaaaccaaacacccggacgaccctctccggtgagcggcgaagacagcccgg

SEQ ID NO: 3231 - DNA, 201 bp, Homo sapiens
tcctccctcgccttctctttgctccttcttttgctttgtggcctttctttcccttcccagagacacctgggagctgcccccaagctttggggcgccccgcggggccctgccaagggtgcgtgtgagagagggcggcggagccggcgccgggtgccaggggccgagggtgggagcgggagctcgtggccctgcgccctggag

SEQ ID NO: 3232 - DNA, 261 bp, Homo sapiens
cgggctgtacgcgcaggcggcctacccggggggcggcggcggcggcctggccgggatgctggcggcgggcggtggcggcgcggggccgggcctgcaccacgcgctgcacgaggatggccacgaggcgcagctggagccgtcgccgccgccgcatctgggcgcccacggacacgcacacggacatgcacacgcgggcggcctgcacgcggcggcggcgcacctgcacccgggcgcgggcggcggcggctcatcggtgggcga

SEQ ID NO: 3233 - DNA, 201 bp, Homo sapiens
ggggacccgcgcaggccagcgtgccggcccctcccagcccatcgctgccgccgccggggctgctccaagggagccaagcggagtgggagcgggtctgcgcgtctctgctctgcgcgcaggggcgggggggcccaggacggggcgccctttcccacccacatgctgatctaggatctccaagcggctcggcccaggacaccg

SEQ ID NO: 3234 - DNA, 337 bp, Homo sapiens
gtaagagcggtgcagccgagccggcgccccagaagccgagaggttacacaagtctacgcagagaggcgcaccggacacggtaattaggagcaattcacacgctctcgggcgcacggaaactacttgtcaggaaattttcaacgctcctcctcgcccacttttttccactcctttcctggcgcgccccctcccctcccagaggcacgcagtggagcttttggagtttcgaatctttcggacactgcagaatgcggggctccccgggcgcgggcccggccaatcagagcgccgtctgcctcccctggccaatggcaggcgccacattgttgtccaattc

SEQ ID NO: 3235 - DNA, 201 bp, Homo sapiens
aagttttgggtggcgcgcaaaggcgcaggcgagggccgccgcacagagccgcccaagttgtggccggagcgccagggcgacccctgggaaccccccaagcggaatcccccgagacaagcggctcttgctccctgacaccccagtcgaggccgagttgacgcgcagccatttaacccttcctgtcccggggaaacaacttca

SEQ ID NO: 3236 - DNA, 201 bp, Homo sapiens
atgagtcgagagggctgagcggagagtgtggtcctcggcggctggaggtaggagaatatgttgcgcccgcccgccgcggcgtgagaggctcgaggtgggcgcgccggggtaggggcggccgcgggcgcctgtccgtctagtgggcgctgcccggacctggcgaggtggtggtctgcaacactgtgcccgcactgcctactg

SEQ ID NO: 3237 - DNA, 201 bp, Homo sapiens
gcagcgccgcggcggccagcagcgccgggtagtggactcgcggtggcgcggcgccgggccgcggtgcccagggcgggagcagcagcacgaggcccagggcgagcgcccaggacagcgccagcatgcccgccgtgtggcgcctctggtacagcgcctggtaggtggcgggcgcccgggtgatgagcaggtagcggttcaggg

SEQ ID NO: 3238 - DNA, 201 bp, Homo sapiens
gccctaggagggaaggaggcgacggtgcccaaggacgtcggaagccggggatctccgcttccctcgggccccggctaggttaccagtgctggcccgcggcgcgggtgcccagttgcgcctgggacactgcgggcacggctgtggcggcaacggcagcggccgccgcgtcgccgacgcccggcaggactgagcgcacggagc

SEQ ID NO: 3239 - DNA, 386 bp, Homo sapiens
ggtggcatgtacgtttcacttaaaaagcagatcttcttctgcaactgccagcaagtggaaggatagcaaaccttatactacctcgagacctgtgcgctccgagcggtcctaactccgtcccgctcgctgttgctgttgctggtgctgctccggctgcagctgctgccgctccacgacctcggggcgctgaggcaacagggccccctccctctactccccatcccccccggctcctccacagaagcgccgtttccagtaactcctcgtgtacctcccacttctgccgccgtccatcccacccctctctcttctgtcccctccccaaaccgttcccaagcacacccttcgccgctggaagtgatcacaatgttgtttttcaacaagca

SEQ ID NO: 3240 - DNA, 201 bp, Homo sapiens
ccccccgccccccgcggcgcgcgccgctcccgggggctccgcgcccccgcgcccaggtccctcccccttggcgggcgctcacaggcggcgcgggcagcgcgagccccggagccccggaggcctgtgcgccctgagccggcatggaccccgagcactgcgcgcctttccgcgtggggcctgcacccggcccctatgtggcct

SEQ ID NO: 3241 - DNA, 201 bp, Homo sapiens
ggggcgacccggagctgcgcgccggcgcacgcgactccgctcgctcctcactccctgcctcaccaccagtcccaacctggctcccgcccgccgcgcgctcggggctcaggggagcggcgcggggacccaggtcccacggcggagagagcgcgcgggattgcgaagactggggccgagtgccgccctccctgcgccctggca

SEQ ID NO: 3242 - DNA, 309 bp, Homo sapiens
aggcgcagacgctggagttggagcggcgcttccggcagcagcggtacctgtctgcgcccgagcgcgagcagctggcgagcctgcttcgcctcacgcccacgcaggtcaagatctggttccagaatcatcgctacaagctgaagcgcgctcgcgctccaggggcggcggagtcgcctgacctggcagcatccgccgagctgcacgccgcgcccggcctgctgcgtcgcgtggtggtgccggtgcttgttcgcgacgggcagccgtgcggcggcggcggcggtggcgaggtgggaaccgccgcggcccagg

SEQ ID NO: 3243 - DNA, 203 bp, Homo sapiens
agcgcacactgccgtcagccagccagccgccgtcgcactggtctagccccgaaaacttccaggcggcgtagaggtgcccaaccttggccaccacggcgccgcgtcgccggcacgccgcgtgggcttcagacagcgtcagccgcccgggcacgaagaacacttggcctggggaccacagcgggtcaccgaccgagggcagggtg

SEQ ID NO: 3244 - DNA, 388 bp, Homo sapiens
ggctcggcccgcggagtcagcgctcctcccgcgccgacctcgggctccgggcggccgccggggggcgccgggcgcatccttcgctgccaactccccgcccgtgcccccgctcgcgcctgggccccgccgcactccagcagaagccattacagagaacaaactaccttcttgtctccgagatgggtccccggggaggaaggcaaattgcctgcctcgtgcataataagccaggcgtggagagcagcgcggaggaggccgcggcagccaccgagcgggcagagcctcccgcccccacccgccgcccgcgcctgccgagccccctgccgagcgggcggcgcgcaggtccggagaatctcaaaaggcttggaacaccgggctgcttcccggt

SEQ ID NO: 3245 - DNA, 241 bp, Homo sapiens
agttttctacctagatcgcgccagtgcgtcccgggtctcaccagtccccatcaggcgttgccctccccgtccctacccagctccctctctccgccctcccgcgagtgcactcaagcgccctcgttccacccaccttcagcgcttccccaagcctggaggagcgcccagagcagcagaaacagcaggcaccccatatcgcccggcgtggggacctcgcggagcgccgctgcgcgccgccctc

SEQ ID NO: 3246 - DNA, 232 bp, Homo sapiens
cgttttccctctcagcgctcaggctgggggcggcgtcggtgccagtctagtccagggcgaagcttccagggccggctcgggccgggctgcgggacccgccgtggagcgcaaagtgcctgaagcccccgcgcgcattcggccctgtcttcaaaggccccttagaaatgcaagaggccaggcgcagaaacacacacggacggcagttttatgagaaaatgcagataaagagccc

SEQ ID NO: 3247 - DNA, 214 bp, Homo sapiens
gcctctctgtttccgcgccccctggaccagttctggtggggagctggaaggcaccgagtgcgtcccggccaagaagggcggatagccttgtgcgagcagcgttcggctggcgcggcgcggggtgtttcttatgctaaaggaaaggatggatctcttgtctgtctagggtccttactttttaaaactttcctaattgcggcactggaagggattc

SEQ ID NO: 3248 - DNA, 250 bp, Homo sapiens
cgcagcggggtcgccccactgccgcatccttactccgcgccctgcgcgcttacctgcccacgaagttctcgagcaccgagctcttgccggcgctctggccgcccaccacggcgatctgcggcagctccagcaggcagctctgtcccagcgccgaaaacgcgtcctgcagacggttcaccagcgggatcagctcctccatctcccggttccccatcttgcccgaggggccggcgaccagctggtccctgct

SEQ ID NO: 3249 - DNA, 201 bp, Homo sapiens
tggccggtgaagccccaggacccgtccgcttggggttaaggcaaggggtgcggcacgaggagcgcagggagccccgagtcccaggcgcagacccagctgcggacccgccgtacagccctggtgttgcaagcgtggaccgtgggcgtaaggccccggcgggaggcactcggcccggccgcggccgggtctgcagggtcctgg

SEQ ID NO: 3250 - DNA, 467 bp, Homo sapiens
ccgggcaccggcgggagaggggggagaagcggcgtggagaggatctggcaagggtttgcctccaaatccagattatgacccaacactttggacgcgaagcgaagatgggaaacggccgcttgctgagagggggcatttgcagtcctcccagaaaaggctggggcaggagagcgtgcggccagaggggtgggggtaccggagggggggtctcacctcctgctctatagccgggtctctcccgcgaggcgctgggaagcatgaggcatgcagcattcaaaatgttttttgaaaaagacggacttgaagcttttttttacaaacacgccattgtactcacttcttattcagagacgggctgcgcgctccgagctgcacgggcaggcattttccccggctttgttttacaaggtggggagagcggggctggacgcgggagggggcgggggggggagcgtgagaagaaacga

SEQ ID NO: 3251 - DNA, 201 bp, Homo sapiens
cgcacagctagcgaagcgactcgagggtcagcgaataagcgctggattcccgcaggctccggcgaccccagacccggccctccggcgaagacaggaaaacgtgtgtcgagagtcgctggagggaaccgtccgcaaatcgaagaagaaaccaaatcagcagcgaacacctgcaaattagtgccaagctgtgagcccctcgag

SEQ ID NO: 3252 - DNA, 232 bp, Homo sapiens
ccgggcgcgggggaggcgtgggtgctggggcgggcgagtccagactctccgtgggctggcttgtgggtgtctctccggaaacaaatgaggctgcaggagcggtgatcggtctgactgctcctgggggctccgaacccgtgggtggagagggtaaggcggaggccgtggccagcacttttccagtgacaatgtcgtcggggaccttttccttcacttcctgggagcaccccag

SEQ ID NO: 3253 - DNA, 222 bp, Homo sapiens
cacgatctcaggcccgctgatgaccgctgtggtatgaatgaggtcaccgcattcggagaggtggatgtccagatgtggactcaggaaatggcctcatcccgaaagtctcgggctagtgggcgtgccctctggccagtgcctccacgcccgcgccagaagggcagcaggccctcgtagggtccggcgtctcacccacccgtgtctcctttgctgtccctagcc

SEQ ID NO: 3254 - DNA, 239 bp, Homo sapiens
cagcgccgcgccccacgcccgtcaccgtcgccgccgccctagcacaccgcaggcgtgagtctcgccgcgaccgggagagccctcccagctgtgcgctctcgaggcacctggtcgggcggggaggcgtcgggtcggggcgcacaggggccaggcgggggcgctgctgcccacttcccgcctcccgggcgtgcgctccgccccggagcccgcacctcgcgcccgcgctccgcctggaagcc

SEQ ID NO: 3255 - DNA, 209 bp, Homo sapiens
gctcactcgccgcagcagctcactcctgctcgccagggagctcagggcagcccctgaagctgccagatccccccacgcaggcggcggcgctctgcactgcggagccgcgtcctgggggagcagtacccccagccccggcgccccgcagccagacagcccccctcagggtggcagcattccccggctagggtgcagggacccccggggcg

SEQ ID NO: 3256 - DNA, 380 bp, Homo sapiens
gtttagacagacaaaaccatttcatcaaagtgcaatgggagagaggaagaggagtaatgagaaggcatgtgagcggggagaaagaaaaagcccgggaggcgaaaacgaaatccacccccttgcgcccatttctgccagaggtttgcaggacgtgtctcaacctggcatcccgagtccagaacaaaagccacgggggctgcggcatgggcagggggaaggcgcgcggtggctgacgcggggcaggggccctggcgagcgcgggaggggcggtcagcagccgctcgcggggctggactgggagccccgtgcgactccgggtctggcgcctgggtcgggggtggttcccgggcctccctcgggggtcgccgaggcccggcctc

SEQ ID NO: 3257 - DNA, 394 bp, Homo sapiens
ggcctccccccatgagggcttcgagcagatgaggctcaaaagccgccccaaggagccctccccaagcctgacccgagtgggcgcgaacttctacagcagcgtcaagcagcaggactacagcgccagcgtctggcttcggaggaaagacaagctggagcacgtaagggcgactcgctcccgggggcctcggccaggcacctgccgcatgcaccctccccgtggtggtggcatgagcgcgcgcggggcgcggggggcaggcgaggggatcctggcaggcgccgacgtcctaggtcggattcgggggcttctctgcctgcagtttcttgccttaatgaccgggctgcggggaggggagggcaggttccctttcaggctcttggtccctgccgacccg

SEQ ID NO: 3258 - DNA, 201 bp, Homo sapiens
cccggcttctccaccccggcctctcatggggtctccgggcttgtccgttgtgagcagcttcactttggggtgctggcgggatggctgctccgtgcagggcgctcgggagttcagatcccgtggaaatgtctggggcctcctcttgcccagaggggacagtgagcagccacgctgcgacatgtttgagggacccggacgaag

SEQ ID NO: 3259 - DNA, 557 bp, Homo sapiens
cgggggaaaggtcggcgttccagggcggggaggatctgggagtggagttcggagacaaaatcggggtcaggcagaggagccagagggaaagccagcaaacgcgagctcgggtgagagccaccggaatgcgggaacgcagcttagccgggaacagggttcccgacaggggtcgcccgtggccaggacgcggccgctgaacagaggtcgcgcggcggttcctgcccgagggacctcgtgggcgggggccacacggaggccgcgcacggtccccggggctggcgggggcaggtgggaggacctcctccgggcccgcgaacctgatctggcagcggccaggtgcctggaagcgtttttaaatgatagggttacaaagacatgttggccaggtttgtagttagcgcagcaacgtggtttgcaggagcgcagaacgaggctagacagggtcactcggacgccgtgctgtcagtgggtgggggccgggagcaagcggcactggcttggagaccccgcggcaggtgacccctcccacctgggcagcgaggctgaacgatggcgac

SEQ ID NO: 3260 - DNA, 212 bp, Homo sapiens
ctggagggagctgggggatcctggagggtgggaagtggctgattctcggtggccggacactcatccagagcctgatccgtactcgtgttttcttggaagcgccacaactgcggggaaggagtctttagaaaccgtgccagtttcaatatggcgggctaaggtggcttttaaaaactgaaaataaaggttttgaggtgggaaaaaacccagct

SEQ ID NO: 3261 - DNA, 201 bp, Homo sapiens
aatagctctcctcggcccctccagccctgcccaaggggcctggaaatgttcgcagcttcaagaaaggctctatttaagcacaggatggggtggggcgggcggggccaagattgccctggggattgaatttatctccgctcccagcgatccccggcggataaagcgcaagtttgtgcacacggtcgactgagccattggaaa

SEQ ID NO: 3262 - DNA, 201 bp, Homo sapiens
gggggagccaggggtcccccgcttggggacctccgtgctgggcatcccgcacgctttggacgcgcgcagcctcaccgggagcgaactttgtctcgcctgcgggtgccacggagaggggctgggaagccgagccagctctggcggcgactgggggcgtccctggctttctgggggggcgggggcgcgcattgttgtccagga

SEQ ID NO: 3263 - DNA, 294 bp, Homo sapiens
tttgaaagtttttgaagcggcccctttttctcctctcctctctccgcaggcagagttgtggtgtggctgggtggtctgcgtgggcgtccgggggattcgcgggcactcgggacgaggcgagggcgcagaaaacttggagcccaatcagcacggagttgagcttccgcgccccaaccttcaggtgaccccgcgcggcggcggcggcagcagcagtggcagcggcgaccggagcccgcagcagctccgagcgcctccgggaggacaggcggcgagctcggcgaatcgtcatctgcc

SEQ ID NO: 3264 - DNA, 244 bp, Homo sapiens
ggcgggcgtgagcggcggaggagccgggcgcggcgacacgcggccatggagcgggagccggcggggaccgaggagcccgggcctccgggacggcggaggcgccgagagggcaggacgcgcacggtgcgctccaacctgctgccgcccccgggcgccgaggaccctgcggctggcgcggccaagggcgagcggcgacggcggcgcgggtgtgcccagcacctggccgacaaccggctcaagacta

SEQ ID NO: 3265 - DNA, 303 bp, Homo sapiens
cggggcagccggggccgggagagcgggcgcagcgcggcggggatcggagccgcgggcgccgggaaaggtcctcgccaggaggggagggaactccgggagcgcgagccagggggaggcgcgtcggaaagcgagagtgacaagcagcctacaagccgaaaagttcctcgcgggaggcgcgcgccgcgtgggctccgactcagccgctgcgcgtcgccgtggcacacaggctgaaaagtttgcgaagccacagaagccaggcccggcgctcagggggccttgatcctgttcccatggccccagacc

SEQ ID NO: 3266 - DNA, 286 bp, Homo sapiens
cgcggaggctggttctggtagtggctagggagtggagaaagcaaaccagagccggttcggttaccgactctgcgaagccccctcgaccccagcccagcgcgggagggtggcggaaggtggtgcaccgcagcgtggtccccgccgctgccgccgcggctttgcaaagtgtcagcgggggcgaaagcgagagtttaaaggaacaggaggcccattgaatttcctaccggagctttcaggggctctggctccccagtttgtttttgttttttcagctcggggatctgtt

SEQ ID NO: 3267 - DNA, 261 bp, Homo sapiens
gggaaccgagaagaggaagaagcgaacgcgagtaggagcgcagcgctcttcggacctctgaggctctctttgcaacttgccacactcgcagccctcacccgacactgaacaacaaccgcggggaggagaggccacttgcagccgaggctcgcaaactgtcggttccactcgggcagcgccaacccggtgcccgcggacggtgacttccgagccccagcgatgcgctccactgggttcaaaacagatctaattccacagcca

SEQ ID NO: 3268 - DNA, 201 bp, Homo sapiens
cactgaaaggcagaaatggggagtaggcacccagttcgcggtgggcagggttccaggaggcagctcccgctcggcgatagcccccggggcgcaactccccgcaggacgcgcacctgccaggacagccactaagaggatgcggaggttgggggccctctcggggacaaaatcagggcactccaaggaactctctgcgcgttc

SEQ ID NO: 3269 - DNA, 201 bp, Homo sapiens
gttggattgggtgcggttgtacctgtggagtgggtggcccggtgactgccacccgggccagtgctgccagcagatgtgcacatcctgggcgggggctggcggccgagtgtcactagtaggggcggcggctaggcagccattcgccgccttccaagcccggcgctgcgcgcagggcttggagcactcggtgctgagacgcga

SEQ ID NO: 3270 - DNA, 201 bp, Homo sapiens
caagctgcctcctgccttgggcttctgacacctttacagcctctgaaagggtccccggagaccccagagagaggcgggtgtcgaggggctacgagctcgcggctgacacccgcgctgcggaagagaatggcactgattgagggctctggggacctgggtcctggcgccttggaccttaggaccatgcacttcccggggcgc

SEQ ID NO: 3271 - DNA, 201 bp, Homo sapiens
cgcccggcccgcgggtcccaactttaccgccgccggccgaaccctgtccgcccgcggcgcgcacagccggcgcccgcgcacacgcgcgcacaaaccccacgcaacccgcggccgccccgtcccgccgccgccgcagcccgcctgccgcgcgcccacagcccggcccgagtcgcggggcccgagcgacagcgacggcgccgg

SEQ ID NO: 3272 - DNA, 201 bp, Homo sapiens
cgcccggcgcagagccgcggctcctctgcctgcgcccgcagtttgcgccgcccgacacagtgggggtggaggcagctcgcttagctgggcgctctggtgcggtgtcgcgttcaaagccctacttttgcgccgagggtttgtgacctgcagagagcgaccgcctgacctcaagctggctgcagagcgaggtcagccgggaca

SEQ ID NO: 3273 - DNA, 201 bp, Homo sapiens
ccccgaggtgagccgccgctgcgtccatctgttctcgcagctggattgtggagccgcgtccggaggagcgctggacacggacacccccaaccctttctccgactccgccccctggccccttgcacacacactcccgccaggaggggaggggaaggctcagcaactgcctggcctggctctgacccaccggcccctccgcag

SEQ ID NO: 3274 - DNA, 201 bp, Homo sapiens
gcgccgcccacgccacccgccaccccgggtcgcggccccggtccgggtccagtggctgcgccgccccccgccagcaacgcccgcgcggaatgagcgcgccgcgctgcccgcgcctccatccgcagggctcggcgccccctccccgcccgccgcccctacagccgcgcgctcattggcccggccagcccacggggagccgcg

SEQ ID NO: 3275 - DNA, 201 bp, Homo sapiens
gcggaaccccgcggccgagagccggccggcccagctgggcggggacacggcggcctcgggcttgtgctccagccccagccgggccccctcgcgccgctgcggctgctgcgcggtgcggtcgtgacaagtcacagcaaacttgccctccgcgccgttccaagccaccaggaagcgcaaccggtgcctctggggatcggcgaa

SEQ ID NO: 3276 - DNA, 344 bp, Homo sapiens
ctttgaccagatgaacggagtggccggaggtaagccgcgtgtcttcgcaggcccggacctgcgcggcccggaggtggtggatggggtgcagtgggtgtgcgggaatcgcaggagaggattggggctccaggtggacggtgctgactgcactggctttgaagactggaagtgggtgcaggaggaacctgcgacagctgagaccagggcgcgcgggcagatgcgccaggtcgccagcaaaccggcgtgcgtgcgccccggcgcgcccagccccgggcgagcgcagggatgggggtggaagaggcgtccccccgggtttcgaggcttgcgtaggccctctggccggc

SEQ ID NO: 3277 - DNA, 201 bp, Homo sapiens
ggcgcttgcccgaggcgggagtcgctgggtcatgctcttgcccaccaggtcctccgaatccctggtagggcagcgtctgtccgtgtccccgacccctcccgcaggcaactcgcgcgaacctggggctcgcagagagcgagcgcccgcggacaccggctgaacagtctggaggctgcgcgagggggcgccgcggggagggat

SEQ ID NO: 3278 - DNA, 218 bp, Homo sapiens
cgggtgccgtggtgcggggtggggacagccaactcagcggggacggaggaagctgggggcagctgggtgcgtgttttgcaccgctcacctgccggggctcggctcctggcggtgggcgagagggagcacatccgcccatactttaggaacctgttggggagatgagttcgtggggtcagaaagaagggaaaaatcctttgggcaagggagagaataat

SEQ ID NO: 3279 - DNA, 234 bp, Homo sapiens
cgctgctgcccgccaccgccgccgccgtccggctaccgcaccgcacacatcaattattcatcgcccgtctccagcttcccgggcgaagccaatcataggcggaggctccgctaatggggccgccgccgccgccgccgaggaggcagccagccgcgcgcccgggcgcaagcgacagctctccagggacggggatgggccgggggcgcgcggggggcgggggcgcacggggcgcgc

SEQ ID NO: 3280 - DNA, 201 bp, Homo sapiens
tgaggcggagagaggccgcttcgcgcctggggctcccgaaagcggccagctgtcctcctgctccccctgagcggggagcgctgcgtctcctgcgggctgcgggagacccttccagactcccgggtgggaaaaccacactgagcgccccgggaggttgccagatacaatactgtatctggcacccctgcccgggtgcccccg

SEQ ID NO: 3281 - DNA, 201 bp, Homo sapiens
agtcagggccgggggcgcacgccggaacacctgggccgccgggcaccgagcgtcggggggctgcgcggcgcgcacctggagagggcgcagccatgcgggcggcggcggcgggggggggcgtgcggacggccgcgctggcgctgctgctgggggcgctgcactgggcgccggcgcgctgcgaggagtacgactactatggct

SEQ ID NO: 3282 - DNA, 235 bp, Homo sapiens
gcaggggtgccctgtccgcacgtacccacgacagtgagcagcatgttgtccagcagcagcgccaggaacacgatgaacaggatgagcttccgcgagcggcggctctcctgcagccagcggaccagcgccagctcgctcagggccatggctccggggctccgctgcgggcgcggtgcgcggtgaggacccaaggcggccgtggaccccccattctcccgtcccccaggccgcggaa

SEQ ID NO: 3283 - DNA, 201 bp, Homo sapiens
tttcccaacagggcgcgctggcccgcgagccggaggaacctccgcccaggccttgccaagcgcccacccggagcaggccgggggcagtgaaggatgcggcgggagcggcgcgctgcagttccgcgacgtggcacgtaccttggaagcgatgacccagatatcggtagcggtggatgagccaggggtagaaggtggacggat

SEQ ID NO: 3284 - DNA, 241 bp, Homo sapiens
agtccccggctcgaggctgcgtcaatccggcgccggatgctaatgatgaaatcaaaatgtcatccaagttaaatgcggggagtatacggcgattgggcgcgtacaatggcaaatgggattaggcaggcgaaggctcagccgagccccggccccgcagccgcctccgccaccgccccctcctcgccttccctcggattttggcgctttggcttcgggctataagagcccgcccgttattggc

SEQ ID NO: 3285 - DNA, 201 bp, Homo sapiens
gacgatctgggtgatctgggtggaaggtggtgcagcaggcaggcagtggggaggggcggggaggaaatctagggggagggggcgccgaggctggtgaggcgtcccttccgcgccagggacatgcaggcaccggatggctgcgcaggggttcctgcccgcctggctctgggtgcgcccgcccagccccggtgcaaatgcccc

SEQ ID NO: 3286 - DNA, 201 bp, Homo sapiens
ccgcctcgacccatcaggcgcgcagggcccgctcccgaaactcgcgcgggctctcgcagtcggccgcgcggcccttagccgcgaagagagcgtcgcgcacggtggcgccgccacagccgtgggccgccgcgcccaggtagcgctccagctgcccgcaaagctcctgcagcgccgcctcgccggggcccacgcgcgccggcc

SEQ ID NO: 3287 - DNA, 217 bp, Homo sapiens
tcaaggctggcttgtgccagaacggcgcgcgcgcgcgcacgcacgcacacacacggggggaaacttttttaaaaatgaaaggctagaagagctcagcggcggcgcgggcgctgcgcgagggctccggagctgactcgccgaggcaggaaatccctccggtcgcgacgcccggccccggctcggcgcccgcgtgggatggtgcagcgctcgccgccgg

SEQ ID NO: 3288 - DNA, 201 bp, Homo sapiens
ctacactgcgcaagagatcgcaatgaagtccgtagatctccaggctggagccgcagagcgaggtggcgaggtggagaacgcggggctgggcctggacagcggccctggggtcgtctggagtcctcgctccctcaacccggaaggcagcggactgacatctgcgccgaagtcgcgcgtaccccacggagggtcgggaccctg

SEQ ID NO: 3289 - DNA, 201 bp, Homo sapiens
gaggggtggtcctgccccacccagggggtgtcgtgggcaaaggccctggggccacctgcctggtgccttggagggcgtagggcaggagccgccgaggcccgcgggccactgtggggcgcggaacttcagaccaggcacccgcggctcaacttccgggccaggggacccgcgggggccttacgaacctgtttggcccatttg

SEQ ID NO: 3290 - DNA, 201 bp, Homo sapiens
acccggggccggaggcaggcgcgtaaccatggggaccggggcgggcgatggcggcgggcgggctcctgccgcagggtggggatggctcttccagccgggcggccgccgtcacactgcagagcgtatttaaagagacacctcgctccgcgctcgctccccagcaccagaccctcgcccgaaaacgccgccgggcggactgca

SEQ ID NO: 3291 - DNA, 317 bp, Homo sapiens
caccgcccgggtccccgcctggttacagcatcaggccacagtgcgctggttcttgatcactctcctggctcggtggccgccccccgccctctcccagtccgcgtcgctgttctgcctcaggccccggtgcggccccaagtcccagcccagggcccttaggtccctccaggcggcggtggcggcactcacctgggtcgcggagccggggtctggcacggtcccgcaggtggtaaatgaaatcctggcagctgtcgtgctccagggccccacgggcacagagctcggccagcagctgcagcgcctggtgacagagcgcg

SEQ ID NO: 3292 - DNA, 221 bp, Homo sapiens
atttacagcgacgggtaaccacgcgggaggagcaggtcaactcccgacagtggaggtgaagatgcgtgcgcctcgcgcaccttgtccctcgcgcgacgccgtccgcgccgcccgcggttcggtcgggagcggcagcccgtgctccggttccggttccggttccggctggcgtctgcacctgcgaccaccgtgagcagtcatggcgtactccacagtgcaga

SEQ ID NO: 3293 - DNA, 201 bp, Homo sapiens
gtgggcggccaccatcccctcagagcacctggtatatcgggttggggttcgcacccgcagggcactgcggggcggcgtccggtgactgggtggggtcgccgctgctctctccctcgctgggggcggcagcctcttgcctgcgcggaggcgactcagaaggcacgtccgccagcaggagggcgggcgccgcagggctctcgg

SEQ ID NO: 3294 - DNA, 201 bp, Homo sapiens
gccttcccgaaacggagacttgccatcttttcagagggcggggaagctcacaccactctctgctttatagtgtccgtttcgcctcgcttgctggcccttcgcttacccgagacattccaggcacggctcgcactggagagggccgcgctgctgctgcgaccgcacggcgcccggggcaggaacatgctcgctctcccctgc

SEQ ID NO: 3295 - DNA, 201 bp, Homo sapiens
accgaagctaggtggaagcaaatgagcctggatcctgaggcgcgcctggcttggagccgccaaacttgctagcgggcggcgggggaggtggctcggcagcgccgggtgctgcgctcgcatatgcgcccgggaaggcagccccggccgccccgcccccagcccgccccccaccgctggcgcggcggcggcggcgtggggctc

SEQ ID NO: 3296 - DNA, 201 bp, Homo sapiens
tgcgctttctctctgccatttcgatgctgggagtggcgctctggccctggcgtctcctgggcaagcaccagccggcggtatctgcggaggtggctggcacgttgttattttttgaaatgagtgaggagggaggtctagatttaggcggccttacgcgcccgccttggcattagcagactgggaattgccgtggctatgccc

SEQ ID NO: 3297 - DNA, 230 bp, Homo sapiens
cctcccggctgcagaacgcctctcgttgccggagaaggggctcagcaaaattgactcttccttatttgtttccatccataattgatggggagatgagaacgtaacacatctcagcaccgagctcttgtcgcctggcggagaccctgtccaagacgcttccgtaaagcatttccagtcggggaacaaagcacggaaagttgctgggtagagcggccgggaggagacaccgg

SEQ ID NO: 3298 - DNA, 201 bp, Homo sapiens
gacagtggcagaggcgaccgcccttccccccatcatccataccccagccccagatctctctcttttcctcccggtgacactaagtcccagaccggcggccgtacttggccttacagtgcaaaatgtgcttggcgaggaagtcgaggcggcgctgtagcagctgagcgtgggggtctgcaagggcggccagctcggggaagc

SEQ ID NO: 3299 - DNA, 201 bp, Homo sapiens
cgaaggtcaccggctgcgtcttgaagcgagactggcgcggccgccgcagccggccccggcccttgggcagcttggcgggccgcacgggctgcgggaactcgtcggccaggcacacgaagtgcggcatcaccgcctggtaactggagcagatgcccatcagctcgccgggcttggcggccatggcgcctccggcgtctgcgg

SEQ ID NO: 3300 - DNA, 201 bp, Homo sapiens
tgctgttgctgctgctgctggcgctggcggcgcgcgcggacggcctggagttcggcggcggccccgggcagtgggctcgctacgcgcgctgggcgggcgcggcgagcagcggcgagctcagcttcagcctgcgcaccaacgccacgcgcgcgctgctgctctacctggacgacggcggcgactgcgacttcctggagctgc

SEQ ID NO: 3301 - DNA, 201 bp, Homo sapiens
agccccgagccgccagctttcaggcctgggggccgccgtccccggagctgctggcgcccacccgcttcgcgctggagatgttcaaccgcggccgggctgcggggacgcgggccgtgctgggccttgtgcgcggccgcgtccgccgggtgaggacgcgccgggggcgggggcgccaggcccgggtccaagggataggagctt

SEQ ID NO: 3302 - DNA, 201 bp, Homo sapiens
ttctgacgcggggctggggacgcagacactcttggctccggcagcccagcgcaacccctgaggtcgggcgccgcctcccgccttcagaaactcgggctccgagcgccgaattccagcgccttcgcccgtgggcacagggcgcgcggtgcagccacagggggcccgagacacgcgccccggcctggcccaggctggggaacc

SEQ ID NO: 3303 - DNA, 201 bp, Homo sapiens
cggcgactacctgctgggcatcaagcggctgcggcggctctactgcaacgtgggcatcggcttccacctccaggcgctccccgacggccgcatcggcggcgcgcacgcggacacccgcgacagtgagtggcgcggccaggcgcgaaggggcgggggcggggggcaacggccgccgggccaacccgctcagtcacactctga

SEQ ID NO: 3304 - DNA, 201 bp, Homo sapiens
gttgtaccaagttacaatcccacccacatggtgtgagaactccctgggcccctcctcctcagcaagacttggtatttcctgatatttaccagtctaatgcgtgggaaatggtgtctccttttaacttgcattttctctgattcatagaaagctgctcccagttccggttcatcgaccactcagctttccattttctgaatg

SEQ ID NO: 3305 - DNA, 201 bp, Homo sapiens
gccttcccggtacccgcagccccgacagctcagccttccccacctgaaagttccacctgaggtctccctcaactctgccctcctgcattcttggcgtcgcggggagtcaggggttaaaccccgtggcccgcgtggccccttccccctccgcagccccctcgcctccactcggcgccgcgcctggagcgtccgtcccggaga

SEQ ID NO: 3306 - DNA, 201 bp, Homo sapiens
ccccgggggtgccgagccggcggggggtgaggtggctgcgccggcggccgggctaggaggtgcgggcactgggggcgcgggaggggacgtggcaggccccgcgggggccacggcgatcccaggggccaggaaggtcccgctgcgggcacgcaatctgcctccgtccttcttcacggagccgtcccgggcaggcggcggcgg

SEQ ID NO: 3307 - DNA, 268 bp, Homo sapiens
agctggcgctggacaagccgggcaagtcgaagcggaaggtgaaccaccgcaagtacctgcagaagcagatcaagcgctgcagcggcctcatgggcgccgcgccccccggcccgccctccccgagcgccgccgacacgccagccaaacggccgctggccgcccctagcgccccgacagtcgcggccccggcccacggcaaggctgccccccggcgggaggcgtcgcaggccgccgcggccgccagcttgcaaagccgaagtctggccgc

SEQ ID NO: 3308 - DNA, 614 bp, Homo sapiens
atcggccggggctgctgccgccgggggcctgggctttccagccagctgtggaccaaacggtcttcccttacccaaattaactgcgccacgcgcaggcggcgcacgggttgggcttgggaatggggaccgcgaggcttcagcatcccgatgccctgaaagtctccccgcctcggggatttgtctctgtgttgcagctggcaggggccgcctgaagtgggagcagcgcctggagaaggcgggaggagcccggcccgggggacgggcggcgggatagcgggaccccggcggcgcggtgcgcttcagggcgcagcggcggccgcagaccgagccccgggcgcggcaagaggcggcgggagccggtggcggctcggcatcatgcgtcgagggcgtctgctggagatcgccctgggatttaccgtgcttttagcgtcctacacgagccatggggcggacgccaatttggaggctgggaacgtgaaggaaaccagagccagtcgggccaagagaagaggcggtggaggacacgacgcgcttaaagggtaaaggaaccggttccctcctttggtgtgggtctcccaagtttcaagatccagaacaacgggcaggatgactct

SEQ ID NO: 3309 - DNA, 201 bp, Homo sapiens
agatgcactttagctcagcgactcccactggcggaatcctcgcgctcaccgcgcgccgcgccaagatggtccaggccacctctactgcctccccgccagcgcccctcagccccctacacttgccctgcacacacactggcctgtagaggggattcgtcccgaaccgcccgggagtggggcctgagctcggagctggtgccc

SEQ ID NO: 3310 - DNA, 201 bp, Homo sapiens
gccctgcttcctttacaagaggctaagccgacaccacgcgagtgtgtacgcgctggggactgagcccccgaagcgaagccctgtcggaggagtttcaggcgggagtgggaacggctgggcgtggggtcagcaacggcgccacccggtagggtggggggagccaggcttgtcagagccagagcgcgtcaccgtcgccgcgag

SEQ ID NO: 3311 - DNA, 201 bp, Homo sapiens
gcactgcggagtagcgaggtagcgcgcaagcaagccagggcaggggccgggggcaggggcgggggctggagctatggccaggggtggctgctcaggccgcgtgagctgtcctccccactcgcacctggccgtcaggccacccggccatcagaagcctttactcacaccttgtctcttacctggaccgccggctggctgcaa

SEQ ID NO: 3312 - DNA, 201 bp, Homo sapiens
ggggaccggccgcagggcggggtttctcttggcggtgagtgagcgagaccgttaggctgaagcaccgggagactgtcctggcagctcctggccgccacccgcgccgcaataaaagcctctcgcggcttcccgcccagccagcttcgcactgattggtcgccgtgggagggacccgagttggctggaggcggcggccgagcg

SEQ ID NO: 3313 - DNA, 201 bp, Homo sapiens
aagccccggcgcgcggcgctcgctgggcggtgcgcctcttcccggcccctcactcaccgcagccgagccgggcactgtggggtgggtgtgcgtgcctgtcggggggtgtgtgcctgtgtcggggaggggtgttgctggggaactgttgctctccgtatcacggcggcagcgacagcatcgcccggcagttcgcagtacccg

SEQ ID NO: 3314 - DNA, 261 bp, Homo sapiens
gcgcccggcccaagcacggtgcgagcgtctcggggaggcggcgagcgagtcggtgcggagcgctccgtgcgtccgggtggttccgcgggccggcgggaccgtgcgcatttcaagcgcgtgcgggagtgtgcgaggcgctgtgcgagctagcggcgggcgcgccagggtgggaaaggcatcccgaacgcatcaggtgcagagaccggcacccaccgagagcggccgggagcgcacggcgagctccggtgtcaccgccggtcc

SEQ ID NO: 3315 - DNA, 201 bp, Homo sapiens
gtctgggttccaggctatcgcagaggacgtgcccccgggcgcgcagatggcgggagatgaggcggccgaactccgcgcccttgcgtggtggagcacacacgctccaacaagctcagcgtcacctgttcagccctctaacttttctccttctcgccccggggcggcttctctctccctttgccctggctgttgccctggccg

SEQ ID NO: 3316 - DNA, 201 bp, Homo sapiens
ggcccacgcactgcccgccggcccacgcgggagcctcgaggggcgaggcggaggctgggcgcagtccttgcagccagcagccacctccgcgcgctccgccgcggtccagctaattacctgctgcggcggcggccgtgccctttagggtgcattagtattcccgccgcgggcgctgccctcgcggcgtcggcaccgatgccc

SEQ ID NO: 3317 - DNA, 201 bp, Homo sapiens
caggcagtcccgcgtggcggcggccgggacagctgggcgcgctggcaggagagcaggcacagcgctccccacaggcaggatgacgcgggctccgcagcccgtcctcccacgctgccccgcatcactgcctcggccctgacgtgcgtgcgacagactcaccgcaaacagtccccagcgggagcacgaggccgggacaggagg

SEQ ID NO: 3318 - DNA, 201 bp, Homo sapiens
acacagctttaagggactgagcggcccggacgggatctgaaacctttggaggaccagccacgtccgcacagcccgcccatgcgcgctggcaccaggacccgcaggctgccagcggcgagtccccgccgcggttcctcagggcacccccggagaagggggcggccctgaggaatctcctgcactccggatgccctattttcc

SEQ ID NO: 3319 - DNA, 219 bp, Homo sapiens
gccgccgcctcctcgggagtcggagccgccgcttctccagtgggtgcagccggggtcccgacgggggtcgggcggccaccggggctggagctgcggccacggaggcttttgcgtttgcgccgcgccgagggcagggacagggactggggtgaggggctgtcccggaacgtccacagctggcgctggccctcccctgcctgacagcttcctggcccgggg

SEQ ID NO: 3320 - DNA, 268 bp, Homo sapiens
tcagccgccggcgaggccacccgggaggggcgggagccgcctgccagccactcggcagccctcctggggctcccctcgcgcgcccgcttgtttttcttccgctgcgcttcctcgcttgctggcgtctttgccttagcgggactcggcagccaggggccccagggggcggtgcagcaaactctcagcggtttgcgttcagcagaccaggttggggagccggcttggcgctgcagggaggtagagagcgggaggaagaggcagtggtagg

SEQ ID NO: 3321 - DNA, 201 bp, Homo sapiens
ggctgccctcgggcgcaccctgcggctcgggcacctgcagggcgggcagcggccggttctccatcatgttggccgccggcatgggggccgtcgcctctgcgctccccctgagccctccgccagcggcctggttcgcgtctccctctggctgttccccaccctcggccccgcggcacactccccaatcctggggccgaagga

SEQ ID NO: 3322 - DNA, 517 bp, Homo sapiens
cagcgcctactgccggggaagactcggacgaaaaccgaggcaaaccaaccattaaaaagtgcatccaataagaatttttccactcaggccctccgctgccgagacgcggcagactcccagagcggctcacccactcatcgaagcggattctgggcggtttcgggctgacccgcgctgtcagggcgcggactccattccgggcgcattgttaggagaaggggcccctcggggcggcgcgcctcgaccctgggctcccggtgcccgcagagggcggagatccgcggcgccctaggccacctatccgcatcttctcgagccaaacccccagcgcttacccggacccgacggcccaagcactgactcccaggcaagagtcgcccttcctggtccccagggaactgacactaccgcgggacgttccctctaggacagtcagcaggtcccaggagcgcagcacgcaacagcgcagagcagacccagacttttcccggggtgagacccggaggcccgcgctctg

SEQ ID NO: 3323 - DNA, 226 bp, Homo sapiens
cgtcggggggtcctgcctcccgggaggagaaggaaccggccgcctccgcccttctccccctccaggcgcccccgggagggggccgctgggcggcggaatcgcgcctccgctcggggagccaccacgcggctttttcgcggaattttgacgtcatccacacgtgggggaaggggctgggagagcaagaggaagcggcgggggagggggccgcggctgggagagcgcg

SEQ ID NO: 3324 - DNA, 201 bp, Homo sapiens
accccggaggcagagatgagagcgcctcaaaacttttttcccctaccccaatctccgaggagtaggtgggtgcacagtgccggcggcggcggggacgcgcggcgcggagcctggctctgggaggcagtggccgcttcagcagccgaacctctcgcggctccagcctccgcgcccagcagcccgcggctcgcctcccggaaa

SEQ ID NO: 3325 - DNA, 212 bp, Homo sapiens
tgcgcagtggggcggaggaggtggcgatggccgggggaggcggggggactgctgtttatttgcagctgggccaactccgcggcgcaggcggcggcggagcgcggggagctcgcggcgggtccagctgccgcagcaccatgcccgagcccccctccgggcagacgccgcgcgccgccggggccccggtaggggaggatgccagacgcccggga

SEQ ID NO: 3326 - DNA, 388 bp, Homo sapiens
ggcagccgcagcctcctcgcgcgcctctccttcccctacgccctccgctcccgccatggggccaacgtggggctcctaagagttgccggctctcagcggcgcaatctccagccaaagtcaccgcgggcggactatggcttagggcgccagaggggttagaggtacgggaagaggaaaagacggctaactgggaaaaaaagagaaaacgaaagaaaagccaaacgatgagtttccacaaggaggacggagtgaacagtctgtgccagaaggctctgcacatcgtcaccgagctgtgcttcgccggccaggtggagtgggagaagtgctcgggcatcttccctcgggacaggggcagccagggcggaagcagcacaggtaaccgggaggg

SEQ ID NO: 3327 - DNA, 201 bp, Homo sapiens
ttttttctctcctgtctttcaagacacgcgcccgaaatcgaggggtgagagcaaagaccgcccatcaacttagcaccttggatttagagctttcaatcccgaaaggaggttggcattgcccgggtcatcgagagagggagggagaagagctgaggctgcaacggctcctgggctccctagaccgggtttggcatccaggag

SEQ ID NO: 3328 - DNA, 201 bp, Homo sapiens
ttacttcccctggaagcccatcagttgctcaagtgacaaccaacaccggagagccagggttcgcccaacaggagtacgcggagacaccccagacgacagcgcgtcccccccacccccaccccgccctccgggcgctccaggccagcgtccaccagaccccacgcctgggggactgcttgggctctagcgagagtgccacgg

SEQ ID NO: 3329 - DNA, 212 bp, Homo sapiens
aggtgcagagacagtggagatgaggccctgatgcccggctctggtttcacgcgggcagcgtcagctggtcggtgtcacggagttcccgcgtcctccgcccgctcagcccccgcggacccatccactggggttgctccgcagcgcgactctctctcatcccgggggagggctaagggcggcggtggggggcggggtgggggggaagcggcggg

SEQ ID NO: 3330 - DNA, 250 bp, Homo sapiens
ccctccgtgtcttccgcagggtaggtcacagtcccccagatctccgcccaggtggcaaagaagatggagctgggggccgcgccccggcggcgcggggcccgaaggcgaggccgcccagcccgcaccccaccccacgcacggcacacgccgccgcggcccctgccacgcacaccctcgcgctgctccgcccacgtgggcgccggggaggaggctcgagagatgggaagaaaggctggcacccaccctcctg

SEQ ID NO: 3331 - DNA, 488 bp, Homo sapiens
ctgcaaacactggaggaaagctgcgttgcctcaattaaatacgctcccccaaaatacggagatgcggggagtgggggcccgggaaagaaacttttaaagcggcagtgtccttttaagaaggggcaaaaaaatctgtttatggccaccctccttccgctttaccttttctcctcttgacagtttcggccctggctgcccgagtcgggggtgtgttttcggtccctctcagatctgggcggggggcgggaggagtgagcgacctgggaagtcccgggggtggagagggggcgctccggggtctgggggcgacgtggacaccttctttggagcacggcggtgcgtttgggatttgaaggaagggccgaaggaagcggggtgcgggcgggcgagctgttcgccaagttgtctggcgggcgcggcgaggggagatgcgcaagtttgcagaccgggggttcggagcccggcgcccaggctggcggggggcgtgt

SEQ ID NO: 3332 - DNA, 201 bp, Homo sapiens
gcagagctgcagctcctgcggctcctcctctcccgctgcccagccgagctttgggctcccagtccaagctctccgcaccgccgctgctgctgccgctaccgccgccgccgccgcgcgctgccagagccgcctcctcgcctctctcctcctcccccggccgggttcccccctccctctgctctccctcccttctcctcagcc

SEQ ID NO: 3333 - DNA, 364 bp, Homo sapiens
actgcgcatgtgggcttggggcctgcgcgcaccggaggctgcaggcgctggggagggtgtggggggctgtgcgtggggctgccctcaccggaagctgcacgctctgggaagcgcagaggcgggggtgctgctcgcgctggggagcacgtgaggggacactcagggactgcccgcgcgaatggcttccaacgcatgcgccccaccccacatttcacagtcgccatgacgaccgggaggtccgcaacggctgcggggacaagtccgttgaggctgccaggcgagtcaggtctctctggacctcgcctgactcggctgggctgtgcctgaaattgacccagctccaccatactccttgattatgaga

SEQ ID NO: 3334 - DNA, 220 bp, Homo sapiens
gtgtaatcttttggttaaaatgtcacagctaagactaaacccgaagaaaagaatgaaaccacgggaagttcttcagacagtcgccgcaaggttatgggccgaagtggtgcaggggcggcgcccggggaagcgactggcagagctgtgcgcactgggggtgctgcaggcgctggggagagtgtggagaggctgcgtggagctgcgcgctcggggtgggggc

SEQ ID NO: 3335 - DNA, 201 bp, Homo sapiens
gcggctgagctcgcggagctgggtgagtgtctgcggctgaccggcccgtgggagcagggagcgcacagccggctggtgctggagggtcacggggacttacggggcaccgcgggagccgccgagcgcagggaagccagcaggcatctgcagtgcggagcctgcaaggctgaggcaggagatcgctcgaggcggggagggcgg

SEQ ID NO: 3336 - DNA, 201 bp, Homo sapiens
tctgagggcccgggcagccacccgcacttccccgccacgcggagaaagccgagcacacaggccgcagggtgggggtccgcggggagagggtggaagcagcgggttctccgcgcctggggtggccgctgccccacccaggcccccgtctgccctctacccttccagaccaatcgctccctgcaggtgccaacgcggtgcccc

SEQ ID NO: 3337 - DNA, 201 bp, Homo sapiens
gctccagttctcatctgctcaggtgtccccggcgccttggcgaactcggccactccagttcctcacgtggtgagcactcagggcagcgggtcgattttccgaggtcccatacctgggtttgaggggcgcggctcgcagcggcgggtgcaggggcgactgccagccctcaccccgcctcggggtgcgttcggaggccgacac

SEQ ID NO: 3338 - DNA, 358 bp, Homo sapiens
acccagggccactgcagctccggggcaccccggaggccacgacccgcgagtagatgtcccggaagaggctctccatgcaggctgtcaggtagatggcggcgtgctcgtggatgcgcagcgccacgcggctgtccaccatccagcgatacacgcggcccacggagaaggtgaggccgcagcgggccgacttgccgcggcccaggcggtcgccgccggcgctgctcatgttgtagagggacagtgcggccagcgcagccgccgtacagtgcgcggccaggccccaggacagcacgatctccatggcgctctggatctcgtacttggtgcacttggcgaagcgcaggctcaggcgctgcgc

SEQ ID NO: 3339 - DNA, 201 bp, Homo sapiens
agcgcttctccatggtcgcggcagctaatcgatgactgaaccgaacaaagagcagcggcgagatcaattcctaatacctatcgatgggcagcgggcggccgagccccggcgagccccggcagccgccgcccgccgccccagggcgtccgcctgcccgcccggggacctccccaatgcgcccagggcgcgcccgggggctcc

SEQ ID NO: 3340 - DNA, 328 bp, Homo sapiens
ctccttagccccgctggcctgggagccgggagcctcggaggagtctcccgccaagcttccttggctacgagcgcgcctggttctggtctgggagcagaccgtgcgcccgagtggggcacttgcccgaggtcggggactgtgaaccgaaagattccatctagccctgctgtcctcctggtattgcgatttgggggcgggtcactttacctctctgaattccgccccccgccttgcttatggaaggttgtaagcctctctggggtccgggatccctctttacctccacctttcgagcagagaaacaggcgatgccccctccctccctgcg

SEQ ID NO: 3341 - DNA, 201 bp, Homo sapiens
gaggtgtgtgttggaggtgggcagtcgccgcggaggctccagcggtaggtgcgccctagtaggcagcagtagccgctattctgggtaagcagtaaaccccgcataaaccccggagccaccatgcctgctcccccgcctcaccgccggcttccctgctaggagcagcagaggatgtggtgaatgcaccggcttcaccgaacg

SEQ ID NO: 3342 - DNA, 319 bp, Homo sapiens
gggcgcacacacacgtccacccagacactccgcgcgctccctcgcgcttttgcttgcccgcccgccgccgcctgctttttccctcctgctttcgccggtcgccttctccttctttttttttttttttttttttttttttttttttttttttttttggtaccatagagttgctctgaaaacagaagatagagggagtctcggagctcgccatctccagcgatctctacattgggaaaaaacatggagtcagctccggcagcccccgaccccgccgccagcgagccaggcagcagcggcgcggacgcggccgccggctcca

SEQ ID NO: 3343 - DNA, 201 bp, Homo sapiens
ccaagctcaactttacgccttcctcggtgcccgactctgcggccgaatcgcaactgcgagccgcaggtaatggcggagtctttggcactgccagctgtccgcggctgggggcccgaggctgggagggctccgctcccggaacatcgctccggcctggcctccaactttgcgaggagcctccttgcgctctcctcccgcggt

SEQ ID NO: 3344 - DNA, 370 bp, Homo sapiens
ctggaccctcggggtgcgggcccctctccttgtcctgcttttcagcatctttggcaattgcgcaaagttgcttgggttgcaatggtggggtgcagggggcgctcggctgctgcacctgttagtgctgggcccaggttgagaggcgacctccagcccccacaataatgtcccgggctctctggtttgggtcctcgcagcgcccgattgaccgccagcgatacgacgagaacgaggacttgtcggacgtggaggagatcgtcagcgtccgcggcttcagcctggaggagaagcttcgcagccagctgtaccagggggacttcgtgcacgccatggagggcaaaggtgaggcgcccccaccccgggccgccct

SEQ ID NO: 3345 - DNA, 201 bp, Homo sapiens
cccctccgccccaggcgccgccaagtcccagcactatgcgcccctccagatgtccgaaagcgcctctccagggcagcctatgtccctctgtgtccttcccgcgacgggccgggcccaccactccacacctcccgggtccttccatgtccatcaccgtgtgcctctccagcatcccccctcccctccaagttccaacatagc

SEQ ID NO: 3346 - DNA, 201 bp, Homo sapiens
gctgggcgcaggggccgccgcccgaggaccatgggtgggccagcgcctcgccgggctgctagctggcggggaccgccggcgcctgtgccgggccgcgcccgaggctgcgccgtccgtgccgcagcggccaatgcggcagcatccgcgaacgccaccgcggcgggccccgctggcccgggctgcggcgtgggggcgggggac

SEQ ID NO: 3347 - DNA, 201 bp, Homo sapiens
gtgcagcgacgcccagcccccgtgcggccagcgcgccgcgtcggcggatcctgcagcccagagagcccagggagcccagggaggggagcggggcgcgggcggggcagtgtcgcataaccgcaggcgcgccccgcgccgcccccgccccgggcccaccctccctcgccgcgcccctcccagctcacccacggacgagcggat

SEQ ID NO: 3348 - DNA, 263 bp, Homo sapiens
gcgcggcctcgcggggatcccgcgggcgggcgggcggccgggcgcgcgcggggcgggggcggcgcgcgcgcggggagcgtgtgggccgggcgggcgcggcggggaaagctgggcgcgcgagccgaggctgctgctcacctgcagccgcgccgctcacctgccgcggagtgcgcgccccgcgccctcccggcccgctccggagcccggccgccccccccttgccacagcgggcaactgcgccgacatgcgacacgagtagccca

SEQ ID NO: 3349 - DNA, 201 bp, Homo sapiens
ggcgggagaggagccccggccgcgtggaccctagcttgcgcggcaatcatcgcgccttgactctaggcccggctgctcagggaaggacagcccagggcgcgcccagcgagcttcagggggtacggaagtggttagggcagatttcagggtgaacaactaatattttacttaccaattcgttaaaaacaaagaaaacaaaac

SEQ ID NO: 3350 - DNA, 201 bp, Homo sapiens
tgccggggccgcgctcccgggcccgcgtcgccagcacctccccacgcgcgctcggccccgggccacccgccctcgtcggcccccgcccctctccgtagccgcagggaagcgagcctgggaggaagaagagggtaggtggggaggcggatgaggggtgggggaccccttgacgtcaccagaaggaggtgccggggtaggaag

SEQ ID NO: 3351 - DNA, 201 bp, Homo sapiens
aggggtcaggagcggcgggacagcgcgggaagagcaggcaaggggagacagccggactgcgcctcagtcctccgtgccaagaacaccgtcgcggaggcgcggccagcttcccttggatcggactttccgcccctagggccaggcggcggagcttcagccttgtcccttccccagtttcgggcggcccccagagctgagtaa

SEQ ID NO: 3352 - DNA, 201 bp, Homo sapiens
cgggcgccggcgtgaacccgcgtcccccggagcccagcgccgtgtcctcaggccccggccctgacctcagggcgctcaggtggaatggccccgcagctgcgcgctgctcccgcgcccccgccttgccccgcggaaatcgcccccgacagtcaacccgaccgggcgcgcggcgcccccggccggtccccgcccgaccccgcg

SEQ ID NO: 3353 - DNA, 215 bp, Homo sapiens
gaccctcccgcgcacacgcacatgcacacgctgcgcgctctcacgcgcatacacacgccctccctgccgcgctcgccgccgcggccaccatcgcggagccgagccctgcggagcgggaaccgaggccggagcggggaccggaggcagccgagccgggggatgccggcccggagcggagccgcgcgcggacggcgcgcccgggacggtgagtgtgg

SEQ ID NO: 3354 - DNA, 201 bp, Homo sapiens
ccgcgtaatccctgaagtggtcggccagggcgcggttggcccagccgccgtaggcgtcctgcaggcgctggggcaggtcccagtggtacagggtgaccacgggctgcacgcccagctcccgcagccgctccagcaggcgccggtagtagcgcagcccctcgcggttggggacgcccgcgctgccattggggagcactcgcg

SEQ ID NO: 3355 - DNA, 201 bp, Homo sapiens
ggacgggagctgcggggagggcggccgggggactccgcagagcccgctccgcccgcagccgcggggcgccgagggcagggcgggcgctcagcttggccccgccgccccgcccgcagttcctcgaaaggcggccgccctgccctggccagcctggcccgacccgggggcgttgcgtgcgggcggccccggggctgctggcac

SEQ ID NO: 3356 - DNA, 201 bp, Homo sapiens
aactcaacacttcctctctcccttctggagtcactttcccttccggaatatgcaagctctgggtggcccagccctgccgccagactcagtttccaagtgcgggggaaggagatgggcgctctcagccgcgatcccctgggaaggtggccactcacctgcgctctgaaatagaagaacagggcgacgctgcagacaacctgg

SEQ ID NO: 3357 - DNA, 217 bp, Homo sapiens
attggctgaagttcccccagcgatttgcatgaaccgagagggagtgtcttctgccgccctcccttcaagagcgctctgactgcagcctcccagggaatgcgcggccgagggaatgcgcgcagctcacaggccctgggagtgagctggtgcccggcgacctggcacccgcgcctggatatggggcgtctacatcgtcccaggagcagcaccagctaca

SEQ ID NO: 3358 - DNA, 317 bp, Homo sapiens
agcaaaagcctctatttgcagcaccgggcatgttgtccgtttaacgcgctccggggatctgctggctcgtgctcccaacccaggggtggctatacgtctcgcgcctctgttcctgggtagactcccccatctgtgcattttggccccttcacttagcaaagagatgtgcgaagtgtgcgcctggagacgagccgcctcggtgacccccatccgcccgcagcggtggccctggttccccggatccgcgcccgcgccctgcgggtctcccgcgccgcccttgcccgccggaccacccgggctcagagggtcgctcgctt

SEQ ID NO: 3359 - DNA, 201 bp, Homo sapiens
gaggggaggcacggagcgggaggagggggacgcggagaagactgcctggccccgccggccccgccaacgtgacggtcagccccgccgagcgctcgcacccgctcacactcatgatcactcgcacactcgctccaatacgtgttaaggcgcgatcgcggggtccctggcagccttcgctgcaccctcccccccacaggggta

SEQ ID NO: 3360 - DNA, 201 bp, Homo sapiens
ccgcccaacacggagacgcggagtcccatagcggtggcagaaagtgagcaccaactcagcaacagggggaaggaaggggacgccgggcggccagtgggacgtgcggcagccgagggctgcagcctgcccctgcagcgcgcccgcgcttacctgcgatctcctggtaggggatgtccgccaggctgaatcccttggcaccgt

SEQ ID NO: 3361 - DNA, 201 bp, Homo sapiens
cagccgggccgagcgcgctgcctgagctgagccgccgtaggtgaggggcccgcgtccccgcccgccctgggcgccgcgcctggcactgatcctgccggtcgcccactgtcgccgccgccgccgcccgcgggcaccatgacagctctgagcgctggggttacaggttggtcaccgccgccggtgcccgggaggctgcggcgc

SEQ ID NO: 3362 - DNA, 201 bp, Homo sapiens
agtgtgactgatgcattcattatttaataactccggggtgaaacttgaggtgaacggtttcaccctttcatactcaggaatggaactagtcctcggtaccgtgcacagtctgacctcacgctcgcacgctgggctcccggcctcctggcagtgcacttaagtgtaccccgcgtgtgcccggcggactcccgtgcacaccgc

SEQ ID NO: 3363 - DNA, 201 bp, Homo sapiens
gcgcagcttcactccggatggttcctgtcctcccgcgggtccgagggcgctggaaacccagcggcggcgaagcggagaggagccccgcgcgtctccgcccgcacggctccaggtctggggtctgcgctggagccgcgcggggagaggccgtctctgcgaccgccgcgcccgctcccgaccgtccgggtccgcggccagccc

SEQ ID NO: 3364 - DNA, 221 bp, Homo sapiens
agtccaggtctgcgctcacacgcgcggcgctcacacgcgcggcgcccacctggctgcagtcccggccagggccagcgcgccgcggctgaagggggcgctcggactcctctggggcggcgcgcagccgggacagtctcgcatgacgcccgcgctccagcggccccgggacgcggcctcaccctcaacccctggcggtctcagcctcggtctttgtgtctcgg

SEQ ID NO: 3365 - DNA, 311 bp, Homo sapiens
gccccgccccgcatccgcacacaccttttccgccgctgccctgagcgcagcgacaagggcccccacacctccgcggcccgcaatgctccggggccaagccgaggcagggaggcgctcccgcagctcctgactttacaacccgcgcgcgtgtgcaccgagccgcgggcacaccgcgaacacacacacacacacacacactcgtgcgctcccgccctccgcccggcccgggctctccgaacttacctccgaggcgccccgggcgcagggcccgcccttctctgcgggtctccagcggctgttcggcagtggtc

SEQ ID NO: 3366 - DNA, 308 bp, Homo sapiens
ggtggcgggcagtgtggtgatggcctttgaggaggtctgcccggagcgcatcgacctgattcacaaaaactaccggaaactctgtaacctgctgatcgacgtggaggagtggggccaggtggtcatcatcagcatgctcacccgctacgcccgcacgcagttcctgagccccacccagaacgtaagtgggcccagcccaggcagagcgggccgaagtgtgtcccggggaggcgcccacagacccgtcggtctccccgtccaggaatccctactagaggagaacgcggaaaaagccttctacggctcag

SEQ ID NO: 3367 - DNA, 201 bp, Homo sapiens
cgagaactctgcgggtccagaacgcccgcgcggacgcttctcttacggcgccggaagccggcgccgagtctgtcaccgggcatccctctgttgccttgacgacggcgggcgctgtaagagtggagaagctgcaggtgctgaggcgcggtgaaagaaaccctgggagccaagagcacgaggagctggtgtctgtgtcacatt

SEQ ID NO: 3368 - DNA, 201 bp, Homo sapiens
aggtgactccggccctggcgaggcgcgatccggctatgcgtgtgtgtgcctctccccggagaggaccccggccgccgagggcacgcggggcccagctaccgcccgcctcccaaccagttgctggctcgtttcgatggtgcaaattgtttttttttgctccccactaaatagcaacagtttggccacgctcaagtggaataa

SEQ ID NO: 3369 - DNA, 201 bp, Homo sapiens
gggacttggtgactttagcaccattttttccttttccttttttttttttgcctccccaccgtctgttgcaaccctgcaaagtctcggagtcggagagcgcgcctcgcttccagagcccccggacccggcgagtcagcgatcgccgagccggccaccatgcccggcagaccgcgccactaggcgctcctcgcggctcccacc

SEQ ID NO: 3370 - DNA, 630 bp, Homo sapiens
agccccttcctgccactcggagcagagcgcgccagcgcgaggccgggccggccgcctgcgcagcgccgggctaattttaactgttgattacatcttcagcgtgtcctttcataggtctcatttgtaattgagacgaatgattacagtggggcgggaaggagcagctgctcattaattaatttctaattaaaagtgcctctcgttctcgggtgactaaagagaaacaccgttcgctgggcgatattgactcggatggaatttatttgctaacgcccggaggaatggcccctccgtccaccgcgcggccgggactgtcctggcccctcccggcctgagccgccggcgagtgaccggcgagtctgcggccaggccgggctgcgcgaggtggggctgacgtcagagcctcctccgcttcaagccgcgcacatctgacttgacgggttcgcgcgactcgtttttttttttttctttttcgtaaaatatgtatttctgtcgccgctgcgaggccgctcggtcccagagccccctcgagcctccggaatgcgaagttaaaggaatcgcggcggccaccgctgctcactttgttacccggttagaaaagtttgcggagcgcggggatggactaaccgg

SEQ ID NO: 3371 - DNA, 201 bp, Homo sapiens
gagggcggggcgggcggcggccgcgcctctaatcccggcgctgcgtgtgggagcggccggatcagggaattagcgctgtaacttcggattagtaacgctcgctaaatgagtgcctaattccgacccttcatgcttttcagcgtcgcggctgagtcctaggaggcctcctggccaggctccctccgcgctctggtcccattt

SEQ ID NO: 3372 - DNA, 239 bp, Homo sapiens
cccgtgaaccccgcccggggacaccccacagcagccgcgcccccaccctcctctccccaaaccgtcccgggcccctgtcgccgccaccttctgccaaaccgtccccatctctccagcggagctacagcggggcgcggcgcacacaaagggggtcggagggtggagagtacagaaggagggagagatcccgccagggctcgtggcacgggcctgggagcagctatttacccgatttcttc

SEQ ID NO: 3373 - DNA, 201 bp, Homo sapiens
gacgtcagccgcgcgggtcccccgagcccgcgccgcgcccagggacctggcccgccccctgcgcccccactctcttacccctcccagaaacacagcacgcgggccctccccatgcaggccactccctacggagccccaggccagctttggggcggtgaaacgaaggtgtcaaggcatagtactcctccgggaggctggaca

SEQ ID NO: 3374 - DNA, 221 bp, Homo sapiens
cagctgccaacttcgcgcgcggagctccccggcggtgcagtcccgtcccggcggcgcgggcggcatgaagactagccgccgcggccgagcgctcctggccgtggccctgaacctgctggcgctgctgttcgccaccaccgctttcctcaccacgcactggtgccagggcacgcagcgggtccccaagccgggctgcggccagggcgggcgcgccaactgcc

SEQ ID NO: 3375 - DNA, 201 bp, Homo sapiens
gcggggaggggatggggtggcgggagaactgcccctccccccagccacaaacccatcaggttcccaaacctttcctggatcctcttctccgcgcccccgcgagcccgggatccaggggatggagaactcggggcggaggagcgccgagccaggcgggagggaggccgagccgtgggcgggaggcggaccggcgtggggctg

SEQ ID NO: 3376 - DNA, 246 bp, Homo sapiens
gccccgggggcccctagccaagcaccgcctggtgcccccggcccagggtcgtgtgagccggaggctgagcccacgcaaggtctccacctgcacagaccacgagctggagaaccacagcatgtactgcgtgcaatgcaagatgcccgtgtgctaccagtgcttggaggagggcaaacactccagccacgaagtcaaggctctgggggccatgtggaaactacataaggtgagtcctaagaaaaccca

SEQ ID NO: 3377 - DNA, 223 bp, Homo sapiens
ccgactatgactatctggacctggacaagatgagcctatacagcgaggcggacagcggctatggctcctacggggggttcgccagcgcccccactaccccgtgccagaagtcccccaacggcgtccgcgtgtttcccccggctatgccgccaccggccacccacttgtcaccggccctggccccggtgccccgcaactcctgtatcacctgcccccagtgtca

SEQ ID NO: 3378 - DNA, 201 bp, Homo sapiens
ccagggcacggcgtcagcggattcacggagaaggagaaaagccccactgccgtgcagaagcctaggcccgggtgagacgcctgcgaaggctgccagcagcggaagagaaggggcgtcctccgtgctgcgcagcactcgcccgcggtaggtgggcgcggagctcagagctgggagccaaacgcaaacgctggcgagaagccc

SEQ ID NO: 3379 - DNA, 244 bp, Homo sapiens
gccccgctgctccagcggccgctgccttagaaaagttaacgagaaccagatgtggtggccactgccgaactttctcagagccggtgattggtccccagccgagggcctcagccaattagcttgctgggtgggcctggagtcccgccccgcccaggcgcccgcggagatccaggttcgaggctggcgcggcgcggagagtgggctggaggccggggcgggacgcgttgtgcagcgggtaagcgca

SEQ ID NO: 3380 - DNA, 201 bp, Homo sapiens
tttgcccggctcgctgaaggctggctctgggcctgggggcagtgcccgcgaagggctgcgatggcaggccccgctgccacacggcatcgagggtccctccgcctcggcgccaggcgcacgcccttctgccacatccctcgcggggcgcgccgccagggccacctgccctttcaagccccgccaggcagccaagggtgagga

SEQ ID NO: 3381 - DNA, 457 bp, Homo sapiens
ttgagggaggggccgggccttcgggcctgcagacccgccaccgcgcgtgcgcatgcgtcggccgcgagcccccgggtgcaggcctgggcggctccggcccgcgcacttgtccaggcgctgcggctcagcgcgccccaacctccagctcgggcggagagcgggggcgggactgaagcaccgtgttcctcaaagtatcctctcgccgtcggcagccctggcctcgcaaatgctccagcgcgctcaggcgcacgcagagactggcgcggcagcctccgggccaacggcacgcgagcaaagctggttggcgacctgggacacgcagtagaagttgaggctgcaccgactcccgccgcttcgggggaggcatgggcccgggcaggcctaggaggaagctgcacagcccgaggcccgggcgggagtggcgggccgcgggcaagggaacgtatatttggaaggg

SEQ ID NO: 3382 - DNA, 244 bp, Homo sapiens
gcgtcccctctgcgcgcggcgaggccgagacgtctcccgcggtgacagcgtgcaaggcggagacccggcgcgctcccagcccagggaaagcccaggcgacgcgaccgcaagcccgagcccaggtccctcggagccgccagggcgcgccgggctgcttgccttcctgccccttcctgcaggaatcccccgccgcccgcggccgggactccgggcctctcccgggcgtagattccagtcaccgctc

SEQ ID NO: 3383 - DNA, 206 bp, Homo sapiens
gagcgcagcggcggggcatggaagaagagggttgggggcgcgcgttacctgcaaaggttctcgaggtctccttccagccctggtggtaatcccgctcagcgccgcgccctcccccagatccaaacttttgctgggtcctccgggtggcggcggcggcgacggcggcggctgctggagccaagccctgtcgcccgcagcgtcggggc

SEQ ID NO: 3384 - DNA, 203 bp, Homo sapiens
agagagacagcatgagaacgcgcagagctgcaccccgcgggggccgggcgccagcagcaccgcgctgccccacccacggcgcgtctgctccccgcgctgcgcgcccagcggggcgccgagccccagaaactttagcacatggccggtccggcggccacggtggccgtagctgccctgctcttcgagcgccccccactgcttcc

SEQ ID NO: 3385 - DNA, 266 bp, Homo sapiens
cgtgaccactccccgccccacccccggggcggggtccgtcagaaaccccaagcgctcgcaatcgcctcccttcgtgggcgggatggggaaactgaggcccgaggccgccccgctggttggtgcaagaaccagcctgcaacccaagtcctgagctgttggcgccccgccccgtgcagttgaacccaacccacccggggctgtgggcagcgctctcttggggctgacacgttatcccgagcctgaggaccaagatcggagtgacctgg

SEQ ID NO: 3386 - DNA, 242 bp, Homo sapiens
cccgaacctccccaaacttggcggcccggggcgcgtgggggggacgccccgttacctgcgcggccataaaggagagatccatggtgtcgctgcagccagcgctcgagtcctcgctgctgccgctgccgctgcgggtcagccgcctgcacagttggcggggatcgggctgagcagcgagcgtccggagaccgcacggcgcactcggctgtctctgggcttctggctccagatctctactaggc

SEQ ID NO: 3387 - DNA, 201 bp, Homo sapiens
caaagcaaaacaggacaaacgaccgcggcgcgtcgacgcttggcgggtcacggtcacaaagcgggtctcagagccttcctcaggcggcggcaaagggggcgcccgaggtcaccggcaagagacagattactggcgcctcgggaaaacagagtggggaagggcgagactgtgtgcccatccacgttcgcgcgggtctgagct

SEQ ID NO: 3388 - DNA, 201 bp, Homo sapiens
acgctggcgaatgactatggaaacaacattcaacagcagtgttttctatgccaggtacacaaccgccttggcgtgggttgataaccatgcctatctcaccgcgtggcactgagccgaccgcacacccagggccccggtctccagggctcgcttactcgcttactgcgtgaagcatccatccccgcaggagccggagcagga

SEQ ID NO: 3389 - DNA, 312 bp, Homo sapiens
tggtcgtctcctccgcggccaggcgcatcctgcagcgcccagaccgccgcgtccccacccgcgtccccaaccgcgagcgctcgcctgggccgggccgggcgcccgagattcgggagagattaggggcccgcaaagcagaagagcagattcagaaagaaaaaaaaaaaagcgagaagtgcgagaaaaatatactgaattcagctaaacacacggcagatgaaaaaaataccttgctcagaagccaaaaacgagctcccgagccgtgagacactgttgcgcccccgccaggcgtgcaggccggatgttaggggg

SEQ ID NO: 3390 - DNA, 203 bp, Homo sapiens
gcgctggcagggggaggcttcggcaacgcctgggggcttcaggccagcctcctccgggctggaaggcaccgcacaggggcttccgccaacttcggtcctcgcgcggtcgggacacggccacacctgcccgcgggggtctgcctcccaggccgccgcaggccccccggagcctaagaggaccccacaagcagccaaagccagcg

SEQ ID NO: 3391 - DNA, 201 bp, Homo sapiens
tcccggggcgggcggcgaggggcgggagcccagagagtgccccgcccttgcccagtgctgggcggcgcgtggggggggtagggtccccgcttccccacgcggccccgcgcactccaaggaccccaacctgttaggtgagtccctgccccggggaggggcgctgggggcggcggcgaggatctagttgcgcgcgcgcatgcg

SEQ ID NO: 3392 - DNA, 283 bp, Homo sapiens
gtggcaaggtctggggattgagaggcccggtgagtgccagtcccgcaggctgcgccggtgctcggctcttactccagcccgggggccccaggctcctcgcgggctctggggcgctggtgtccgcgcagccccagtcgcttccgcagccaccgccgctcggctccgcggaggcggcgcgcagcgggggcgcccgggcgctgtccccctgaggcctcgggggctcagggtggcccgcagtgccactggccagggtctgcgactcctggggcccgccgccgccgct

SEQ ID NO: 3393 - DNA, 201 bp, Homo sapiens
gaacgccttccagcccggcctggcactggcgccggtgctcttcatcctggccatcacggccttcagggacctgtgggaggactacagccgccaccgctccgaccacaagatcaaccacctgggctgcctggtcttcagcaggtgagttgggcgggcgggcgagcgagcgcgcggtggcgcagggcagggcgccccgggaac

SEQ ID NO: 3394 - DNA, 247 bp, Homo sapiens
aggcgcagacctacgagctggagcggcgctttcggcagcagcggtacctgtcggcgcccgagcgcgaacacctggccagcctcatccgcctcacgcccacgcaggtcaagatctggttccagaaccaccgctacaagatgaagcgcgcccgggccgagaaaggtatggaggtgacgcccctgccctcgccgcgccgggtggccgtgcccgtcttggtcagggacggcaaaccatgtcacgcgctcaa

SEQ ID NO: 3395 - DNA, 427 bp, Homo sapiens
cagcgcgcctcgggctccgcgcgccgccagctcctggcccgcccgccggccccgccgcgcccgccagccccgcagcggagcctcggcccggccccgggccgccgccaccacgccgcgcgccgtactccgcgtcaagaatggggcggccaagctgcccaagccgcccgccgccgccgccgccgccgcggccgaggcgcccggcgccggcgcgggcatggagcgctcgcagagccgcctcagtctgtccgcctccttcgaggcgctcgccatctacttcccgtgcatgaactccttcgacgacgaggacgcaggtaagcgcgcggcccgccccccagacccccggggtgtcccgggatccaggtccggtagccccctccccgacccgtgcgccctcctccccacccccaatcccctgggaaggcgcccc

SEQ ID NO: 3396 - DNA, 246 bp, Homo sapiens
ctcgggggcggctgcacgtggccgtggccctgaactccctgcgggggcctcgaaacccgcctgcggggaggccagggcgacagaggactcgggagtcaccgctggtgcgtggcggcgtggagcgcgcttgttacggccaaggtgcgggtccggcttcggttcatcccaaggggtcaccgggatgcgaagtccgggacgttcgccgccgcggtgaccccggcgggggcgcatcccggctgtgggccg

SEQ ID NO: 3397 - DNA, 384 bp, Homo sapiens
tggtggcggaatccccggggcggccggaggcggcggccggggagtcgagaagcaagtactagcgctccaggaccgcgcgcgccgccccgcgccgccccgcgccgcccctcggtccagagcccccacccccggcctgtgagcctgcggcgctggtggagcccggctccaggaagaggagctcacccggtcccccctgattggacagcagcgaggtcccaccgggcgcctccgcggcttaaaaccgaagcgggggcgagggggaggtagagcccgccccctgcgcgtcgcggctgggagggagaggaggtgggagagaaggaagaggcggaggaggcagcgggcgccgaggctctgggacccgcaggcaagccagaccgacgcgca

SEQ ID NO: 3398 - DNA, 415 bp, Homo sapiens
cggggggggcaggggtcccgggccgcggggtgcgggggctgcgccaaaccctcgcggggcgtcccgggcgcacggagggctcggcgcccacccgcccgacggcgttccactcactggcgcccacggcccgcaggcaaagcgtggaaggagctgaacgcggcggagaagcggcccttcgtggaggaagccgaacggctgcgcgtgcagcacttgcgcgaccaccccaactacaagtaccggccgcgccgcaagaagcaggcgcgcaaggcccggcggctggagcccggcctcctgctcccgggattagcgcccccgcagccaccgcccgagcctttccccgcggcgtctggctcggctcgcgccttccgcgagctgcccccgctgggcgccgagttcgacggcctggggctgccca

SEQ ID NO: 3399 - DNA, 543 bp, Homo sapiens
cgctggaagaaaaacttcccgcgcgccggcagaactgcagcgcctccttttagtgactccgggagcttcggctgtagccggctctgcgcgcccttccaacgaataatagaaattgttaattttaacaatccagagcaggccaacgaggctttgctctcccgacccgaactaaaggtccctcgctccgtgcgctgctacgagcggtgtctcctggggctccaatgcagcgagctgtgcccgaggggttcggaaggcgcaagctgggcagcgacatggggaacgcggagcgggctccggggtctcggagctttgggccagtacccacgctgctgctgctcgccgcggcgctactggccgtgtcggacgcactcgggcgcccctccgaggaggacgaggagctagtggtgccggagctggagcgcgccccgggacacgggaccacgcgcctccgcctgcacgcctttgaccagcagctggatctggagctgcggcccgacagcagctttttggcgcccggcttcacgctccagaacgtggggcgca

SEQ ID NO: 3400 - DNA, 227 bp, Homo sapiens
tccagggcgcagacctcccactgcttcccgggtccctcccgggccttctttctgattctctcccttcccttctccgagttcctgctcacattcaggctgcgtctcggcctggctgccaaacagaacgacgttcttgcgcagagctgaccaggggtggcggcgggaggcaaggctcccggcaccggaaagcaaagcaaagaaaaaggcattgcagccatcgctcctgg

SEQ ID NO: 3401 - DNA, 323 bp, Homo sapiens
ccctgctccgcgattggcgggagccggagcctccctgaacccggcgcccacaccatgggctgagcccgtcggcgccgagggagttagtgcgacccggctcggcgcgcacggccaaggcacgcgcgctggcacacgcgggcgcggacacgcgcggacacacacgtgcgggacacgccctcccccgacggcggcgctaacctctcggtaagtccagcgccccacgcgacctgcccggctcccacgctggctacagcggctgcggggacggggaggaaggcagcggggtggccctaggggctcactctgcagggctcttccgacgg

SEQ ID NO: 3402 - DNA, 279 bp, Homo sapiens
ggcgcagaccacctggaaggggctgtggatgtcgtgcgtggtgcagagcaccgggcacatgcagtgcaaagtgtacgactcggtgctggctctgagcaccgaggtgcaggcggcgcgggcgctcaccgtgagcgccgtgctgctggcgttcgttgcgctcttcgtgaccctggcgggcgcgcagtgcaccacctgcgtggccccgggcccggccaaggcgcgtgtggccctcacgggaggcgtgctctacctgttttgcgggctgctggcgctcgtgcc

SEQ ID NO: 3403 - DNA, 261 bp, Homo sapiens
tctccgtcggtggaggtcgcggctggcggagaccgccaagccagaggaggggatccgaggtcccggctgggcgaaggttctggagggggagaagacggccgaggcgtggaggggcagccgcggcggggcgacccttacctgctcactgcggggcctgtccgtggggccggggcagactccgcaaaggacgcgcagcctgcaagtccgcggcccgcgcggcgcggggatggggagcgtgtgcgccgaggagcgcgcgccgag

SEQ ID NO: 3404 - DNA, 364 bp, Homo sapiens
tgtacgcgcgcgtggcccgacgcgaggcccggccggcccgggcccggggcgagattgggggcctgtcgctgtcgccatcgcccgagcgcaggaaaccgccgccacctgaccccgccaccaagcctaaggtgtcctggatccacggcaagcacagcgccgctgcagctggccgtgcgccctcaccaccgccgccaggctccgaggccgcgcccagccccagcaagaggaaacggacgcccagcgacaaatcggcgcatacggtcgaacacggcagcccccggacccgcgacccaacgccgcgccccccggggctgcccgaggaggcgacagccctcgctgcgccctcgccgcccagggcccgagc

SEQ ID NO: 3405 - DNA, 242 bp, Homo sapiens
cagggtggaggcggtgcctgactgcccctctgcgtgtgccctgggaggtgggtttgctctggggacagaggtgctggacgtgtaggagcagacatgccgcgcgctccgaggaagcgccggaaccaccagaagcacagggacgcgggtgccgagagtccccagcactgaaaacggggatctcctcttctgtaagggattttcttcccttgtcttaacccacttctctagactcaagggacgcc

SEQ ID NO: 3406 - DNA, 285 bp, Homo sapiens
cagtcccgggccggggtggctgctccatcctcgtggctcagggaggaggcgttgggtgcgtatgcttaggggtgtgcccgctgccagggctgcagcggccgccacctccaaccagctgcaagccgagctgcccacctgggaccgggccggcccggcgggcttggctcccggcgaaggcggcggcgttggtgcgcggcggctggggcgcgggacgcaggcagtgcgtggcgcggctggcgtcttcgggcgccgccaccgagcgagggtgcggccccgggcggccgt

SEQ ID NO: 3407 - DNA, 222 bp, Homo sapiens
cgccaccgctgccgccgcctccccgcggagtgacgcgccctgcagccaaccggggcagccgggggggaggtccgggaggggtcctgggcggagccgggccgcccccttatcccacgggctcggggctgcttctcccgaaaacttcagccctaattgtcctgggaatgtccgaggtagagaaagggagcgagggagcaagcaagaagctggaggatcagtgcc

SEQ ID NO: 3408 - DNA, 201 bp, Homo sapiens
gtagcgctccctggccccgcgcgtcgcccgggggtcgctggctcggtgcgtgtggccgcctcgccgcctggttggagcctgctccgcggcgcagggctgcgctccgagggtccgctggctcggtggcctggggtttgcccggctcagcggctcatggtccggcccccgcgccccagcccccgccgccgccgccgccgccgc

SEQ ID NO: 3409 - DNA, 298 bp, Homo sapiens
ccggctctgggtggcggcgtcggggcagcgcgctcggccgagccggggagaggagcgcgggagacccggagcggagcggcaggagagcgcggagcgaagcggcaggagcagctcacagccaggagcgctctcccgcccccaacgccgcgctcccccctccaaaacggtttaaaaaaatccaccaattgcatggccgcgcacccccaaaaaggcacccgccgccacctggtcccggtgaactccaggaggcggaggaagggcgcggggtgggtgcggtgacaccgtgggaggtggtccc

SEQ ID NO: 3410 - DNA, 272 bp, Homo sapiens
cactcactccgacccgaggctgtctacccggcctggcatgtcccggcgctcctggggcccctgtactccgctggttcctcgctgtggtgtcccgcagcccgaccatttctgtgcttctaggagcccaccctgggcggcagggaggcgttgcgtggggctcacgagttccacgctgtcatctccaccagctcctacctcccaggcgcctgccctcccgcactgtcaggttctgcctccgcagcatttggcagatctgagcccggtccctgtca

SEQ ID NO: 3411 - DNA, 201 bp, Homo sapiens
cttagtaacatctgcagggctggctccccggccgcccaccccgccagcctgggtttctgtgtggagtgcgtctctgtgcccctggccagccgccggtcacgtgcacttcctgccaggggctggcaggctcctcacttgcccaaaccagaaatacaaggcacagtggccttcagctgagggatggcactctccctcatgctc

SEQ ID NO: 3412 - DNA, 251 bp, Homo sapiens
tacgctcctcgcgtccgcccgcgtctgccctaggcctccaccgcggcttcctctgtccccggggccgccctgctccccacagaccccactctcgggggccgctcccaggacccccgcccgctctctcctgactcggtccctgcccgccccgcctcccttcctcgggctccctacctctccctcgccggccccgacctcgggggcgctccggacctgctccccgaatatctccagctccgccttcagcctgc

SEQ ID NO: 3413 - DNA, 249 bp, Homo sapiens
cggcggctctcacctggagccgcacctggggcgccgagctccggggccgcggaaagaatgcgcgccgcccgtgcgctccgcctgccgcgtctggccacccgcagccgccgcgtccgcacctgaccatggagtgcgccctcctgctcgcgtgtgccttcccggctgcgggttcgggcccgccgaggggcctggcgggactggggcgcgtggccaaggcaggtgccgccgagcggagctccgagagcgggt

SEQ ID NO: 3414 - DNA, 249 bp, Homo sapiens
tctctagagctaacttttcagacctggaggtctccaaggcccccgcaactcagtgagtctcggggcaccaacaaatccccgcgggggtcaccgcgcccgcgaacgcagagtccacacgtggattcccgcgcctgtgatgccccgacccgtcccgggtccccgcacagacaatgccgcgcgtccttcccgcagccactccgggacccgcgccccgcgccgcccggacgtccccctgcgtctgccggggac

SEQ ID NO: 3415 - DNA, 201 bp, Homo sapiens
ggccgcggcggccggggccggtgccggcgcctccttgggcggcagcggcgaggagatgggccccgccgccgccgtggtgtccgccgtgatcgccgcggccgccgcgcagagcggcgcgggcccgcactaccaccaccaccaccaccacgccgccggccaccaccaccacccgacggccggcgcgcccggcgccgcgggcag

SEQ ID NO: 3416 - DNA, 201 bp, Homo sapiens
atggcccaggcggccgccccgcgcgccccagccccgccgcgcgcctgagcccggtgcggcgccagaagacagcgcgcagccgcccctgagtcgtggaggcggggaccaagctggaaggagcagcgactcccggaccgagtcgcgagtgtgcgccgtccgccgcccgccggatcccccggaccccccgaccgtaagtgccgt

SEQ ID NO: 3417 - DNA, 251 bp, Homo sapiens
accgcgcagcccgcgccccactgccgaccggaccccacgctgttgcccccagcgctgcgcgccctgcgcggacccgcgctgctggacgccgccatcccgcgcctggggcccacgcgagccgcgagcccctgcctgctcctgcgctaccccgatcccgcgccctgcacccgccccgggcccgcgccccgcgcccgcacgcaacggcacccggccctgcacacgcggctggctctacgcgctgcccggcgccg

SEQ ID NO: 3418 - DNA, 201 bp, Homo sapiens
ggggccccgctgagctgagccttgcgacccggtttatgtgacgtgagttccacctcaatctaagtgtgaggaagcgaacagcgttctgaaacgcagaaacgtgcccattcgaattgttaacgcgagcgcagagcccactgacaaagcaaaataagacaaaccgggagtcagaaaactcagcgacccacaggatccaccgtg

SEQ ID NO: 3419 - DNA, 201 bp, Homo sapiens
tttcagaacccgcgggtcacccgggagctcctcccgcagtaccagccgaaagctcccagtgccgaggagggcgggcagctgccctccccgacctcgccccgcccgcgcggacgcccccggccccacgcggggaccaccccgggactcccgccggaccccgcgcgcccgcggccaacctgcgtgcacctgcgccccgcgcca

SEQ ID NO: 3420 - DNA, 201 bp, Homo sapiens
aggccgagtccgcacggcgcccccgtgcagccagcggtcagtgaccgcgcggcccgggcgctccccgcgcgccctagctccccagacggggcccggacgcggacgtcttctctgcagttctgctctgatcgctagggatgggctctgggcacccagcggctgagggtggggagcggccagcgcctgatgtccagttcctca

SEQ ID NO: 3421 - DNA, 337 bp, Homo sapiens
gtggccccgccccagggccgcggggaggcgcccccgtgcggggcggagttgtcaccgccccctccccaatccccggggactgtggccccttcttaagcccgcggcgcctctagctgcccctcactcgtctcgcccgccagtctccctcccgcgcgatggcctcggcgctgagctatgtctccaagttcaagtccttcgtgatcttgttcgtcaccccgctcctgctgctgccactcgtcattctgatgcccgccaaggtcagttgcatctccaggcagcccttcggacacccggcgtcctgtgcccactaacgggcaccgatcccgggagccctgag

SEQ ID NO: 3422 - DNA, 201 bp, Homo sapiens
tgccctcggcgtcccacgtgtggcggcggccagcggcggcccaggaggcagccggtgagcgcctgcgagcagagtggcgggggccgctgacaggtcccgcgcagcccagcccagcccagccacgcggctcacaggtggggtccaagagcagtttggagcaacccggcgctacggagaggggtggacggctctgcacgggcc

SEQ ID NO: 3423 - DNA, 201 bp, Homo sapiens
ttctttgcggcgaggtcgcctgatgaattcaagggcaccagtgctccgcgagaactttctgtgggttgtgacgagaaccaagcggagcgcaaccctcaccgcacccggacaggatgcgctgcgcaatctgccgtagtttccctgccctaccccgggtggtccgaagctgtaaccctgccaattccctatcatacgccatgt

SEQ ID NO: 3424 - DNA, 201 bp, Homo sapiens
tcctgcagctctgtccagatccggaagccgccgaggaagggaggaaggcgggggtggggagagcgcgaccttaagcgctggcgggcggcgaggaggggccgcagcggcccgaggaagcgcctggaggcgtcaggggcgccgagtccccagggaggccgcgctctcgggaagtttcccatcggttgcccggagcaggatcgg

SEQ ID NO: 3425 - DNA, 1216 bp, Artificial Sequence
  Description of Artificial Sequence: Synthetic polynucleotide
taaggtggggatygggaygygatyggggatggggaagggggttgtaggaggtttygtttgygttgtygtttttgttgggtatagygttttttattattygyggygatttyggttttygtaaggtggggyggygagtaggagtyggggttaggttaggggttygagttttygttygaggggyggggaaggygggtgaygtgagtygggtygggygggyggagttgggatyggtttygggaggygggggygagygygyggagaggtagaygygaggagggaggyggttgagtagygygggyggttttgyggygggygyggtgggygygggyggyggggtttygggattttygygygtttttttygygyggygtygtygtygygygtttttaygtttygygttttayggygttttygtttygygygtttttygtgttygttttttgttagttttygggtygyggtygtttgtagagygagygtttagayggagttttygggtaatttgagtggygtygatyggyggyggagtttttggtagagtttttygattyggtagygyggaggggattygygttygttygygtygygttattttaaattttaagtagygtygttttatyggygyggagtttyggttggaggtaagagtygygygtygggagataygtatygtgagyggtagygtygtyggttttttttttygtygtttyggagggygaagtygyggttttttagttttttgttgygtygygatagygtyggaataygtttygtttygttgtygttttygttgtgtygtyggyggagggggtygygagtttygygtttyggtyggaggatgtgygttttygygggtygtttagtttgagttatgygttttaayggyggyggygygtyggtyggtatggagtttygygyggtygygttttgattygttgtgygtttygyggtyggygggyggygggaggyggyggatygagagtyggagatyggygtygygggayggaagygagygggygygggygtygygtagatggtttgggygagttaggtttgaggtttygtttttygaaaygtgattatgtggatttaatagtttttaggatttaggtgagygattyggtyggygtygggtgygtgtgggygygtgggtgttaggttgggyggaagyggygtttttttttatgttgtaaattaagggattttttttygtttt

SEQ ID NO: 3426 - DNA, 365 bp, Artificial Sequence
  Description of Artificial Sequence: Synthetic polynucleotide
ggygttygaygtttatttygggtttggygttttttttyggttattaygyggygtygtttttygggattttttagttttyggagtttygygygtttagagtygttyggagygygggyggggttagtttgggtagtygygggtygttgttgygtyggaagttttygtygttagggagttttttgggygttaggttttgggtttttgggygaagtygaygttagaatatgtttggtttygtatttagtttatygtatttttagygygygtgggtggggggygtyggttgaggtggggagggtatagtttagttttaggttatagtgtttygggyggggtagygyggtgyggggtgaaygttatyggtt

SEQ ID NO: 3427 - DNA, 201 bp, Artificial Sequence
  Description of Artificial Sequence: Synthetic polynucleotide
tggygtgayggtttgtggggtttgyggggtgygttgttttyggatttgyggggggaggyggttgagttggyggygttygygggtttagtggtgagtgyggygtttttaygtttagttygaygttttyggagyggtygtygygtaggggtgggygygggtttttaggagggagggyggttgtgaaygygttttgtttttygc

SEQ ID NO: 3428 - DNA, 201 bp, Artificial Sequence
  Description of Artificial Sequence: Synthetic polynucleotide
attaygtygttygtgtttattatttayggtayggaggaygaggtgatygatttttygtaygggttggygttttaygagygttgttttaaggyggtggagtygttgtgggtggagggygtygggtataaygatatygagttttatagttagtatttggagygtttgygtygttttattttttaggagttgtttagttagygc

SEQ ID NO: 3429 - DNA, 201 bp, Artificial Sequence
  Description of Artificial Sequence: Synthetic polynucleotide
gggygyggygggygaggggttygggttgagttgygggtyggttyggatggygggyggygygggttggtygggygttttygyggttttgttgygtttygtgygtygtttgygygaggtgttygaggtgtgyggtygygatttygayggttttttgygygtggagygygtygyggygttyggattgygtttyggttagggyga

SEQ ID NO: 3430 - DNA, 201 bp, Artificial Sequence
  Description of Artificial Sequence: Synthetic polynucleotide
ggygtttttttttygtttttggtttaggttyggttygygggtgtagttttttttagggttttttttttttttygggtygygygttygtttygtatygyggyggtttttyggtagtgtttgtttttattggaygtatagtgatygtgaygggtayggggygygagtttttattattataatgggtgtgtatggygyggggyg

SEQ ID NO: 3431 - DNA, 201 bp, Artificial Sequence
  Description of Artificial Sequence: Synthetic polynucleotide
tttttttttaattgatttaattttttaattttagtttttygtttttggtatyggtttttttttaagtttttagattttaattttggttttygattygtttygttatagtttgggaagygggagaagtagygygygtttttttgyggatttttttttagggaagattgtggtgttagttgtttagggggattagggggttat

SEQ ID NO: 3432 - DNA, 201 bp, Artificial Sequence
  Description of Artificial Sequence: Synthetic polynucleotide
agtttaggggtagggggtttagggtagttagatttttttaggtttaggaagagtagtttttagygttyggttgttaggtaattyggttttyggttttttayggyggttttttyggtgtgttttattaagagygatagggttggtgattygaggggygygtgygyggtygttagtttgggatttgtayggattttttttttt

SEQ ID NO: 3433 - DNA, 213 bp, Artificial Sequence
  Description of Artificial Sequence: Synthetic polynucleotide
gttttttgtttgaattaaagtggttaggtatttagtttgtaagatgaataaatgaaggaaagaaggaaygaatgaataagggtttattttgtagagygttygygttttagygygtattaggtatattagtgttaaaggtgttgggggtygggtttagygttyggygyggttggaatgggggyggygaggagttttttttagttagtygtaggg

SEQ ID NO: 3434 - DNA, 201 bp, Artificial Sequence
  Description of Artificial Sequence: Synthetic polynucleotide
gggaggyggtaggtagggggygttgyggggygaggtaagtgtagttygtygttgtttgtttgygagtttggggttgygygtygttttttatttagttgygygattygagygtygygtttatygygtttygtgggttttygygtttygaagggtygggattyggtttgagttttttttggttttyggtgtaagtygttgggt

SEQ ID NO: 3435 - DNA, 201 bp, Artificial Sequence
  Description of Artificial Sequence: Synthetic polynucleotide
yggggtattyggtygtgtygtygtygtygttttagttgtygtttttgttttygttttygygatygttgttagagygtattattygygaggaggtggagggygaaagtttggatttgtgtttgtagtagttttataaatagttaagtagttgggtttggttggtggtgggttygyggtttttatygygtyggtttyggaygc

SEQ ID NO: 3436 - DNA, 201 bp, Artificial Sequence
  Description of Artificial Sequence: Synthetic polynucleotide
aaggggggtttggttygttagygtaggggattygagttgggtaggatatgtgagatagttatagttttttagagattaygataagatttaattagtygygygtggttttyggygtyggagygggttagtttagttyggtttagttyggtttygygtagagttttygtygttttygygtatagagtygggtgttttttgygg

SEQ ID NO: 3437 - DNA, 324 bp, Artificial Sequence
  Description of Artificial Sequence: Synthetic polynucleotide
ggtgggggtttgggagayggtygaagggggttygggtagaagtttygyggtygggtyggyggagggaagggggyggtygygttygggattyggtttttttyggttttatttatttgtttygaagagtggttttagttttgygtttttttttgygattttatatatagggatagttttaggtatagttttagtagtaggagtatggyggggygagggygygggaygttyggggattyggygggataygttttgtagygtttagggttttagttattgygggaygttttyggggtygtttatttygyggttttagttyggatttyg

SEQ ID NO: 3438 - DNA, 201 bp, Artificial Sequence
  Description of Artificial Sequence: Synthetic polynucleotide
tygyggtgttgtygygttaagygaaggaggaggagggttyggygattttggggaygaaygttttggaygtttygttygygtttttttttygygttygtygygygtttgtttgttyggtttttttttygtttttttttyggtygttygggttaaaatttaaggttaggtttttgagggttygggttttttagtygttttttt

SEQ ID NO: 3439 - DNA, 330 bp, Artificial Sequence
  Description of Artificial Sequence: Synthetic polynucleotide
ggattttggygtttttttaggttgttgygygygggttggggatygtgtatygttttgygygttagaygatgtattttttggaayggtagttgaggtaatgyggggtgtgaagtggyggygggtagaggggttygtaggggttgggattygygtgtttttttttgtttyggtgyggagtaygatgtgttygggygggggygaggaygttygggaggggttgggttgygtaygttygyggggtygtygtagatgggyggtttggaggygttgtagtttttgggaaatgggagttttygttttgttttttttgttgtttggttgggttgggtt

SEQ ID NO: 3440 - DNA, 293 bp, Artificial Sequence
  Description of Artificial Sequence: Synthetic polynucleotide
tttagtattttagtttttaagtttttttgagtyggggttgygttttygttgtttttttyggtygtygttttttggygttagagggatttygyggttygtaygggtttgttttyggtttygttyggagggtgtgygggttttygtttygttggtttygtttgtttattayggygygtttaaatttaygyggttygyggttttttgygtgttttgtygatttygggtygtaggaggggttagtttygtyggtttttaygyggggtttgygtyggtagygttaygggttggaaygc

SEQ ID NO: 3441 - DNA, 201 bp, Artificial Sequence
  Description of Artificial Sequence: Synthetic polynucleotide
ygttttygtttyggtttttygtyggtttggygggyggygaygtggggaggggtygtttagaagtyggggtygttygggtyggggaattttttygygtygaygtttattttttaygggtygtattygtygaggggtygaaaggggttttagtggaggaygyggtgggagttgggtttygttttagttgtygaygtyggyggt

SEQ ID NO: 3442 - DNA, 201 bp, Artificial Sequence
  Description of Artificial Sequence: Synthetic polynucleotide
tatttygttaaagtyggataaagygtggttagagtgyggtttagttttttagtttgyggttyggggaggagggtagygygggygygggttgggggtggygyggggyggygtttaggatttyggtgtaggygagagtgyggyggatttgttttaagaggagagygaggyggatttgttttaagaggagagygtggggygtyg

SEQ ID NO: 3443 - DNA, 226 bp, Artificial Sequence
  Description of Artificial Sequence: Synthetic polynucleotide
atggygatgtttttatttttttyggtaggtttttttaattaaaaagttggaaaygggaattygtaaataaygatttagggttttaaattatttgtaaagaygygatggggaggggaatatttgygygttttaaaattttaatttygaggtttttagtygygtttgattygggagtygggtgygtttttagtgttygygtaygaattyggygttttggtagtttyga

SEQ ID NO: 3444 - DNA, 363 bp, Artificial Sequence
  Description of Artificial Sequence: Synthetic polynucleotide
ttgtaagggattatagttataatttattaggtaattatatttatygtattgtagaagttatgaatttggygggygtgggggggaaggggaagaagttyggygagattagaggggaaattygaaaaagtaagtttttgyggtagtagttaggaaatattygttaggaattggttgygattttaattttagyggttygaagttttagtttttttatttttatygyggtagagtygttttygtagatatttttygaggagaatygyggtttygagggygttaggtgagtygygtygtttygagttttygggttayggtaggtygatttaggygttttyggttygttygtgttttygygttygggtg

SEQ ID NO: 3445 - DNA, 201 bp, Artificial Sequence
  Description of Artificial Sequence: Synthetic polynucleotide
yggttyggtgggggtttyggygagygggagggyggttggggatttyggtygygtygggygyggggttygggattygggagatygygyggygtygaagttaygygttagttttattgtttygygygtttygttttaggtttygggtttttttttygtatttygtaaagtygagattttttygtagttttttatttygagagg

SEQ ID NO: 3446 - DNA, 201 bp, Artificial Sequence
  Description of Artificial Sequence: Synthetic polynucleotide
tygygttttttygttagtygtyggttaggagtttttyggtttttgagtaggaygygttaaagggagttgggaggtttagtagtttttagygtygttttttygggtgaygtgaygttttttttggagygygggttygttttygttaagtttttatygtaggtttttatagtygagttaygggaagatgtaaygtygggygag

SEQ ID NO: 3447 - DNA, 267 bp, Artificial Sequence
  Description of Artificial Sequence: Synthetic polynucleotide
ygyggggtgggggygygggagtygttttttgttygtttygygygtatgttttygtygtatttgtttygtttagtgttttatatttyggggagtygggtggygttgggttygtygaggtyggggtttttttatgggagggaggtggttgyggyggaatttttagatgygtttttttttgtattygttttttgggaaggatttttttaaattttggttattttttgtttgttagtttgttttttggtagygaagttttagtagtttatt

SEQ ID NO: 3448 - DNA, 707 bp, Artificial Sequence
  Description of Artificial Sequence: Synthetic polynucleotide
gyggtggygtyggyggttgtagggggaygagttagygtygyggygttgggagttagttgagttyggtyggygagyggaggyggtagygtaggtagagyggyggyggtagygggagttygagygttgygygtttattatggtygtttagggagagttyggttatttggyggygtagtyggatttyggttttaatagygagygtagtatygattttttagtgttyggtttygaggaygatttggtygtyggggygattttgtatagttyggagtggagygaggagygttttygygtggataggaagaaatttgaggttatgttataaggtaggtatttttygtgttttyggatttttygattgagtttttaattttttttyggatatttttatygygygtttyggygttygttattttagtttayggtyggtyggtttagttttaggttygttttttygyggagtyggaggatatttagggattggagatttygygggattttttatttttttaygttttttagatttttaggygttgggggttttgtgygaatttgattggttttagaaaagtygaaggtygagtttgtattggygygtttaagttgygttttggattttggagatgttaattttagttyggatatttgggttgtgttattyggattattygggtygtatagagtatgygtgattttttttatttttt

SEQ ID NO: 3449 - DNA, 201 bp, Artificial Sequence
  Description of Artificial Sequence: Synthetic polynucleotide
ggatttaggattttgtgttygygtttttggagtygttggagttyggatttttgtaattgttggtattttgggggtttggtttagygttttgttgtttattygttttttttygttgtttyggaattaaagttttyggtttttttygttttygygygtttatttatygtygtyggggagyggttyggttygtatttagtatta

SEQ ID NO: 3450 - DNA, 201 bp, Artificial Sequence
  Description of Artificial Sequence: Synthetic polynucleotide
taggtttygygtttgattttttagtttgygtagygggtattyggtygggaagaatttttttagtaggyggtttagtattaygtttaygygttygygttygygttygygttygtggtygygygggttttagttttaygtagygtttatagatygtgagttygtagggtagtgttatyggtttgtgtagtagtttygggtagt

SEQ ID NO: 3451 - DNA, 201 bp, Artificial Sequence
  Description of Artificial Sequence: Synthetic polynucleotide
tattgggatttttatataygagttggtatatattagttatatayggttaattttagagggttggttttttgttttgggaygtttttaggttttygggtygyggtgyggagaatttaggtgggtgttyggtaagttatttattaggggttgttttttygygattttygttataagygtagggattygggggtygygttggtt

SEQ ID NO: 3452 - DNA, 201 bp, Artificial Sequence
  Description of Artificial Sequence: Synthetic polynucleotide
gaaaattgtaaaatttgggagttattttgttttatttttttgttgtttggggatatttttygygagtttgttyggtttygaagaaggagtagaggggattygtaatttagtttttagagtttygttaggaaaggygygagagatttattggtttyggtaattttgtttyggygttyggayggagttygatgtttgygtagt

SEQ ID NO: 3453 - DNA, 203 bp, Artificial Sequence
  Description of Artificial Sequence: Synthetic polynucleotide
agtttagagtgygtygagtatygtttyggtaggtggaggggttgygggaaataaaataatttgggtaggaatttgattggtagtaggtttatttttggttygyggtagggaatttaatggagatgaagaatggtggggaagggggggyggtgtttttttgggagtttaaygtaygtttttttattttgttattttttggagat

SEQ ID NO: 3454 - DNA, 201 bp, Artificial Sequence
  Description of Artificial Sequence: Synthetic polynucleotide
ygygygttttttygygygtttttyggattygygtttgtttattttttyggttttgttgyggtygaggttttaagtyggttatttygtgtttaggtaatygygggggyggyggyggyggygtgaggagygggyggttgttgtttyggggttttttggttygagtttttagttttygattttyggygtttyggygttygatta

SEQ ID NO: 3455 - DNA, 201 bp, Artificial Sequence
  Description of Artificial Sequence: Synthetic polynucleotide
gggtttttagtttggtttttaggygyggtggyggyggtgggataygygttaggygtttagagaaggatatgggataatggtttagttygaggaygttagaygtygtygttygattyggggaaggaagtttttgtagtyggttygggaattygaggyggggagggaggttagttttggaggtgygttgtygttttaaaataa

SEQ ID NO: 3456 - DNA, 208 bp, Artificial Sequence
  Description of Artificial Sequence: Synthetic polynucleotide
gygtygygtygtygttyggtttttygaagtygttttttgtyggygygtyggtygtttgygttayggygggygttatttatttygggtagagttttttgttygtgtagygygttttgggtttttagygttgatttaygttygtagtaggtgaggaaggygtagtttggggaggaaagtaagygttaagaagggttagtggggygttttc

SEQ ID NO: 3457 - DNA, 201 bp, Artificial Sequence
  Description of Artificial Sequence: Synthetic polynucleotide
gtaggggggttttatttattaagttatgttttattagggygttaggygggygaagtaaaggtagggatggygggyggggyggyggyggaggtggaatgggygttttttttttttatttggttttatttatttatttagattagaaaagygagtyggtttggagggagttygttyggggattygagygygtatttattagtg

SEQ ID NO: 3458 - DNA, 201 bp, Artificial Sequence
  Description of Artificial Sequence: Synthetic polynucleotide
gygtttygtttttygtttyggyggttttygtagtttygtygtygttygygttygygttttggagtygygttataaagggttygygygtagtygtygtygtygtygtygtgygaggagttaggatggttttggtttaygtyggttatttygtgtttttagtgtttggttttgtgygaaatagaggtatygtttttttttttc

SEQ ID NO: 3459 - DNA, 595 bp, Artificial Sequence
  Description of Artificial Sequence: Synthetic polynucleotide
aggaggttaggaaagtttattatatgygttggtttyggttgtygtayggtatttttatggttatygggatgatgagygtatttattttgggttygtggattgaggaygaggaggaagaggaggaggaagaagaagaagaggaagaggaggaggaggaggaggaggaygygtttaggttgagatggttygygtggatattgttatttattttaagattgttgttttygtygtygtygtygtygtygttgttgtygtygtygtygtygttattatttgttatagttagtaaygggtagtyggygtaggggttygggggagtttttttygtygttagygttattttaaatatttattaatagttatattgttgttattgttgtygtygtygtygtygtygtggagygygggaggggggyggggaggygtttgggttyggggygttgtgygygatttggyggggtgygtygagatatatatagygagtygtygtygttygttygggggggagggggatggagtgygygggtagtttttttttttyggttygygtttygttygtttygggttgygttggtttygagygtygagagttagg

SEQ ID NO: 3460 - DNA, 201 bp, Artificial Sequence
  Description of Artificial Sequence: Synthetic polynucleotide
tatygtyggygtygaggyggygtttatgtttaatygtygtygttatygtygtygtttgtttttgygttygttttygygtttgttgttttttygtygtygtygtygtygtygttattatagattygtagatatatagttaagatttttgatttttaatattaatttttttttttggggaggggaggggayggagggaagggg

SEQ ID NO: 3461 - DNA, 269 bp, Artificial Sequence
  Description of Artificial Sequence: Synthetic polynucleotide
ggtgtgatgttttyggtggataatgtttttygttttttgtttyggggtttagatagttggtgtttaagygtttataatgtagagttttttgtatttttttygggtygttatttgtttatttgttttatttaggatatttttttaaataatttttaagtggaaaaattayggttttttaggagatttattygggaaygaaygtgygtggggtagtttaaatttttgagtttagatttygtttttygyggttagatggtgyggtyggtggg

SEQ ID NO: 3462 - DNA, 201 bp, Artificial Sequence
  Description of Artificial Sequence: Synthetic polynucleotide
ttagtttgttatygtayggyggtygggatygtagtttttgggtgygtagtgygtttttygttgygtttttttagagygygggtttygtgtttgtgttyggygygaygygatttttttgttagtygggtttygygtgtttttygygtttttygtagttttygygtagttygtagygttttttagtttygtttygyggtygyg

SEQ ID NO: 3463 - DNA, 267 bp, Artificial Sequence
  Description of Artificial Sequence: Synthetic polynucleotide
gtaggagtttyggyggtttgtaggggyggtggygyggygttgggygygyggtygttagatggtagygtagtttyggttyggttygygggaggyggttaygygygggggaygyggggygyggygygttgagygygggtgtygaggttggagggygyggtygggttttygagtttttttttygyggtatttttgtttttatttttaaatgttttgtaagttaggagttttygtaggaatygttgtatttttatttttttttaaatttta

SEQ ID NO: 3464 - DNA, 287 bp, Artificial Sequence
  Description of Artificial Sequence: Synthetic polynucleotide
ggyggtgtgtagagtggggtttgggttttttgtttttaagggtagttgggtgggtttygtgtttttttygagtggatttggtttyggttttaaatttagtygagggtyggttygtttttggggattygyggatgtygygagggggygtygygttattgaaggttgggaygggggyggtgygyggggyggygtyggagttygggatgtyggttttagagaygtygygtttygtttygaggaggtygtyggtygggtaagyggagttyggagttygyggagtttggatc

SEQ ID NO: 3465 - DNA, 201 bp, Artificial Sequence
  Description of Artificial Sequence: Synthetic polynucleotide
ggtttgtttygagygyggygggggygtygggggygtyggtttttattttgtagggtatyggyggygggaggaggggtyggygtttaygggttttygttttygyggygtygyggattaggagttggaattgttgygggagtgtttgggagtygtygtgtttgttyggttgygtaaggtggttttygygttggtgttaggtyg

SEQ ID NO: 3466 - DNA, 201 bp, Artificial Sequence
  Description of Artificial Sequence: Synthetic polynucleotide
gygtttgttygygttttgtttaggtggtttyggyggtttyggygattttttgygagygttgttgtttttgaaggygttgtagggtttgygygtggagtggygygggygggattygygygggtygggtygggtatagygtagygygggggttatygtygtygaygggtygtgygygttgygygagtttagygtagattttyg

SEQ ID NO: 3467 - DNA, 286 bp, Artificial Sequence
  Description of Artificial Sequence: Synthetic polynucleotide
tttagggggygttttygagtygygtttygygttygtttttaggagggttttygygagtyggttgtatatttygaggyggtttyggttgtataatttggagygagttgtttygtttttttattttgggggygaagaagggtyggggagtgggggaaagygggaggygtygyggtttgggaggttttygygggttttagygtyggtygtattgyggtttttttygygygtygtygtygtygtyggttttttttygtttygttttygyggttttyggygtttttygygc

SEQ ID NO: 3468 - DNA, 244 bp, Artificial Sequence
  Description of Artificial Sequence: Synthetic polynucleotide
tagtagattttggygtggggtatttgagattttygttattgaaaaggygttatagaaatgtaaggaattatgattttaataaaattgttttatttaggagygagtttttgygttgtttttgtygtyggagttygggtttgttayggtaaagtttgtaattagagaaaaatattagttttgttgagggttagaatatattattggttaatgtgtgtggttttttttttaaataatgttaagtatt

SEQ ID NO: 3469 - DNA, 201 bp, Artificial Sequence
  Description of Artificial Sequence: Synthetic polynucleotide
gtgggtyggggatttygttgttttgtttttttagygggaaattgattgtttgagttttggaggataaatagagatattggggggttaaygggggyggtygygggyggggttttaggtttttatttatygggttgttgagygygtaygtagttattygagggaagattttygtygttyggggtttyggagaggggttagaat

SEQ ID NO: 3470 - DNA, 372 bp, Artificial Sequence
  Description of Artificial Sequence: Synthetic polynucleotide
gtggtattagygaatgtggtggatttyggtaggtttggggtaggggaattttyggtaatattttttagtatygaaggtaggatttttyggttattttygtyggttggaatttttttaagtattgttttgagtttatttttaaatgaaagggggaaaaatttaaattagattagaatttgaaatagttgaaatagttatygatttttagtttgtttttaagtttggtagagattgtgaaagttttaattttttygygatgttagttayggttygyggyggttayggagttattttagtatttygygatggatagtgattttyggygtggygygagttttttgyggtttttaygygggtttgggyggygggttt

SEQ ID NO: 3471 - DNA, 201 bp, Artificial Sequence
  Description of Artificial Sequence: Synthetic polynucleotide
agttagttttataatttgygatygatttttttttgtttagttyggttttagttttttttagttataagatggtaatagygtygatagtygggtttygyggygttttgttttttttttgttttggtttggagttttttttgggtagttttgtatttatagygttgygttttttttagattgtgtagggagtaygggagggtt

SEQ ID NO: 3472 - DNA, 247 bp, Artificial Sequence
  Description of Artificial Sequence: Synthetic polynucleotide
gttttyggggggttttggygttttagttgtggattttttaatattygtaggttatagagttatagaggttggatttttagtagtagaggatatagaagaaygaagaygagaygtagagttttaattgtagttagagataaaggtttygttatatttyggaagtygttttgtttttttttgtttygtgtttgattggayggtttttagtttagygtttttgattggataatttttaaggttttgtttt

SEQ ID NO: 3473 - DNA, 201 bp, Artificial Sequence
  Description of Artificial Sequence: Synthetic polynucleotide
gatttggygyggtttttgtttttygttgtygtygaagttttaattttygtttgtttgttttgtgttttttgtaygtagaagtttagtttgtgtggttttgygatttgygggtattgggagatttatagttaagaygttagggttttttggaagtttagaaatggtgagagtgtyggttygatatttygagagagggaaygg

SEQ ID NO: 3474 - DNA, 201 bp, Artificial Sequence
  Description of Artificial Sequence: Synthetic polynucleotide
ggygttttagttgtggattttttaatgtttgtaggttagagggttatagaggttgggtttttaagagtaggggatataaagtagggaagaygagattaagygttttagttgtagygagagataaaggtttygttaaatttyggaagtygttttgttygttttagttgygtgtttgattggayggtttttagtttagggttt

SEQ ID NO: 3475 - DNA, 235 bp, Artificial Sequence
  Description of Artificial Sequence: Synthetic polynucleotide
tttggtyggattgygygtttagggtttttygygtttgttagttttygttttgygggtattttttttagtatygggagygygyggttgttygttttygtygygatygtggygttagtttttygttttttttgtttygttttgagtatttgttttgygtttttygttgtaattttttatttttygtttggattgygggtttgggtgyggggtgttgtaggtttgtaggggayggggt

SEQ ID NO: 3476 - DNA, 201 bp, Artificial Sequence
  Description of Artificial Sequence: Synthetic polynucleotide
atttygygttttttagttyggagtttatttgtataattggattttttttttttgtttttttttttttttttgaaatttgtttgaaaatttaagtgaaaatygygaygatttgtatatttaaaagtaagtgttaagtaagtgttttgyggtggtttyggygygtttyggggtgagygygtaaagtygggagygaggtgtygc

SEQ ID NO: 3477 - DNA, 201 bp, Artificial Sequence
  Description of Artificial Sequence: Synthetic polynucleotide
gggygyggttttgggagygggggaaggtgaggggaaatgggatatgatggtattaataatygttattaaagayggtgggagtaataaaggaatgygttttygagaygtygtttagtttyggggtgttttttggygyggtygyggtgtaggaaygygagtttygtygtygagtttttygtygtttgygttygttggygyggc

SEQ ID NO: 3478 - DNA, 201 bp, Artificial Sequence
  Description of Artificial Sequence: Synthetic polynucleotide
gttygggygygtyggttggggttttggygttttygtaggtttygaggtygatagtttyggygagggygggygtttygygttttagtatyggttgtttgagygtttttggagtagtaaattttagatttttttttttttttttttttttttttttttttttttttttatttttttttttttttagttttttttttttttttt

SEQ ID NO: 3479 - DNA, 201 bp, Artificial Sequence
  Description of Artificial Sequence: Synthetic polynucleotide
tttgttttaaaagtttatagtatgttttttttttttttagatygggagatagtgattttatttatayggtaagattaaaagttttygttygtttagtttgygggtttgggttgggtttagaygttttttaggatgtagatgygtygtygttggttttttyggttataaagtygtttttagygttttttygygygtaggagc

SEQ ID NO: 3480 - DNA, 201 bp, Artificial Sequence
  Description of Artificial Sequence: Synthetic polynucleotide
gggygaagygatttagygygaggattagtttttaattaattygtttttagttttgggygttttttttagtagttagatgggggttttagaggtyggtgygyggttatatggtttygggttaggtagggggtygtggggaygtatttgygttaggygtatagtatttttgggygygggaygggygaagygtygtgggtttta

SEQ ID NO: 3481 - DNA, 296 bp, Artificial Sequence
  Description of Artificial Sequence: Synthetic polynucleotide
tgtttttattttttatyggggttyggttggttagaggtaagtttygagattttttattaattattattatygttgygagggtyggtgaggttgtagataaygtttgtaaggaygggagtyggggagggtgtagggygagtttaaaggaygggtagagtaagtttygggaagaggtaggggttttttttttygggtygtygtttttygtattttyggagttagtygtagttaygtagygtygtttgtygggtatattaaggatttggygygtaygtggygtttatttttattttygg

SEQ ID NO: 3482 - DNA, 201 bp, Artificial Sequence
  Description of Artificial Sequence: Synthetic polynucleotide
agtttaygggttagtttggyggggttygayggyggyggyggtggyggtagygttygatttagyggtattagtttgggttaygattagygttayggtagttygygtttyggtygttyggattygygtttyggtttygggtygttttyggtgggtagygttygttttagygtttttagtttyggttttyggggttyggtyggc

SEQ ID NO: 3483 - DNA, 201 bp, Artificial Sequence
  Description of Artificial Sequence: Synthetic polynucleotide
atttattggttgaaagtttygtttattttagggtgattgagagygttttttttttttgtgttgtttggaaayggattgttygtttagtaatatttgattaygttttttattggttatygttttyggaagttygttttttygttttyggaattttygtaggygttgggtttgtagatggygtttaggtatatagtggygagt

SEQ ID NO: 3484 - DNA, 266 bp, Artificial Sequence
  Description of Artificial Sequence: Synthetic polynucleotide
gaaagataaaagggaaagygtttttaygaaattygtttayggataygatttyggggttatatttagttagaygaatgtttggtaaatgatagttattttaygttagatttttatagttttttataygttatttttattgttttagggaattataagtataggtatygtttygttyggygtttttttttaaagattggggtattaggatygygggtttttatttttatttagtataaagagttyggygtttagagttagyggttttt

SEQ ID NO: 3485 - DNA, 201 bp, Artificial Sequence
  Description of Artificial Sequence: Synthetic polynucleotide
tygtaggttatttgtgtgatttyggtgygagtggaggttggtatygtttagtgygaggttgttatttygtgtgtttgtttaygttttgtgtgattgggtgygaggaagttaatggtatygtggaatgtgaggttgtgagttgaggygggagygggygattgttygttgtattttgttgggtygatattygyggtttttttg

SEQ ID NO: 3486 - DNA, 228 bp, Artificial Sequence
  Description of Artificial Sequence: Synthetic polynucleotide
tagagtttaggatattttaggttttttttgattygattggaatttattttttaygtttttttggttttaattaatygttatttgtatgtataaatggaaaygatagggtagagggttagtagttattygygtttgggttygtagtttygggtaygttgtagtttygtattyggttgtttaygttygggattatttattgtgttttttyggaattgtttagygtgtttt

SEQ ID NO: 3487 - DNA, 248 bp, Artificial Sequence
  Description of Artificial Sequence: Synthetic polynucleotide
agattttagatatttattttaaatttaggttttagygttttgtaggggatttttattttggggygtttatttttgattttttttttgggttttttygttayggtygagtttaagtggttgaagygyggaygaggatgygyggggtttyggtttttaattgtattataggtygtatttaygaatttggttyggtatagttattatygttygggtttttaggttttagggttgtagaagtttagtttygg

SEQ ID NO: 3488 - DNA, 387 bp, Artificial Sequence
  Description of Artificial Sequence: Synthetic polynucleotide
gaggyggttatygtagyggtygttaaygagtagttgtayggaggtgtagaagaaggaggttattgttatttttttgataagttgggggygtgggaggtttygggagttygaagtygtttygagygggggtgggyggtgagyggattttygggtgttgattaggtgtttggtggtagagtagggaaggggggaayggaygtygattttagggattttttattygtttaygttttttggygttggttataygtygtygttttagtattaattggaggtttttagtggaygagtagtygttygagggtagtygtttgagtyggtagatagyggttagttggggtagyggttygaattgttttygtaataygttttttagtatttyggttt

SEQ ID NO: 3489 - DNA, 203 bp, Artificial Sequence
  Description of Artificial Sequence: Synthetic polynucleotide
ygttgtttttttgtgygttatygggggtttgttttgggtttgttygatatygtggttgttygtttatttgagygtaggtttttattttgtgttagggtygygygtggttttygtttgyggtttgttgggtttyggygttataggtattgyggtttyggygttygtaygygggggattgggygggggttggagagtttaggtyg

SEQ ID NO: 3490 - DNA, 203 bp, Artificial Sequence
  Description of Artificial Sequence: Synthetic polynucleotide
gttgygtttygttgtttagttygggyggtttatygttttttttgtttgggtggaygtatttttgtttttygtttttattggyggtagttttygtggggygygygtggggggygttggggtttttagttttygtttygagttttttgtygyggygttgttagtttygggggtttgggttttatttygttttggttttgttygta

SEQ ID NO: 3491 - DNA, 312 bp, Artificial Sequence
  Description of Artificial Sequence: Synthetic polynucleotide
gtygggggggygttyggggyggyggyggtggyggygggygggggtaggtygggttgygaatatatttygaagttgtygtygtagtagagggttatgtyggyggtygtgggyggttgyggygyggtygyggygaggggygagyggggttggtttygtygttygggygagagtatttttttgggggttaattttgyggtttygtttttattygygttgggygttyggtgtttygggtyggggtygggygggtgttagyggagygtttgttagtyggttttttataatygagttyggygyggttttttttgggtc

SEQ ID NO: 3492 - DNA, 407 bp, Artificial Sequence
  Description of Artificial Sequence: Synthetic polynucleotide
tttygggaggtttaggggtayggygaggggtyggggaaaggygatygtttattatagttygygygtttagattgagggaggagtygggttgtagaatyggyggyggatggagaygggagggaggttgygaggtygttygaggagagattaaggttttagaaayggagaagygggygttttgygggaggyggyggygttgtygttggtygttaagggygggaagtgttttgggatttttattaggggtygygagtttygagygttaaattttygyggygttygtttagygygttgttgtggygggygyggagggygygygtyggtagtgggggttgyggyggyggagggtaygggttttygtttagygtttttatttttttggtgtagttgtttttygygagtygaga

SEQ ID NO: 3493 - DNA, 295 bp, Artificial Sequence
  Description of Artificial Sequence: Synthetic polynucleotide
gygttygtttygygygtttttgtatttttygygtygtttttyggggtttygyggygttygtaggtygygtygttttgtygtttttttttygtggtttttayggttygttygttttttagtagttttggggtgttyggggyggttttgtaagygggagagagyggygaggyggyggygtygagtgyggggggatgyggagtygtgttyggttttgtygtatttttyggtygttygttygygttyggtttygttyggttttgttygggttgtaygtatttttttygyggtttagaat

SEQ ID NO: 3494 - DNA, 435 bp, Artificial Sequence
  Description of Artificial Sequence: Synthetic polynucleotide
tttggttyggtttggttagttttygyggtttttgttygggttgaygtttaggaatgtggtygaygagaagttttaatagtayggygtggttttttagtttyggtgagtattygtygtggggaagggttttggggatttattggaggtygyggttygtagtagttaggggtygagttayggttayggaygttttggtgtttyggttygtgtygggtttttaggyggaggaggygttygttgggtttagattttygattttagtttyggtttttyggygtttgggttgygyggagtttttgtttygygtttyggatttttaygygtagtttttaygygtttygagttggagaagtygttagttygtttttttagggygtgtygttygttttttgtttttttgtgyggggtatgtgaaatgtgtggggttagaattgt

SEQ ID NO: 3495 - DNA, 410 bp, Artificial Sequence
  Description of Artificial Sequence: Synthetic polynucleotide
tttttggagggaagttygtygggaagttgaagatagtggttatygttttyggttattatttttygggattyggattttaattttgygttatatttttattygtttttagtygtgttttggttgygtagttggaaaggttgagtagtttattgttgtttttttgttyggttttggatatatygtttgaatttttgggygtttttgttgttaagtgggggatagtattatttattggggaggaaaattttaggaatgtggattttggggttaygtaggggttgggaagtgaagggtagggaaygygggyggygttyggggtttgygggtaggtaggyggtttggtygyggaggttttttygagttttgygtttttttagagagggaggggtttatatyggttggtatagtta

SEQ ID NO: 3496 - DNA, 392 bp, Artificial Sequence
  Description of Artificial Sequence: Synthetic polynucleotide
ggagttygttgggygtgttyggttyggttyggtttygtygtaygttygtttttttggtttggttgaggatttyggggtttggaygtgttaaygttattttygygygtygaagttgtgayggtttattaagtagagatttgygaggtatatagagagggaatgaggyggaatygttygggggttygttgatattgtagagtttttygtagtatygttgttttaaatttygtttttttaggygtgygygtatagygagttagaggaggtttygtttygatttggggtttttygyggtttttagttygggggttygggttttygaagagatttttggtaatggtagaggttttaaagtttagatgttaagtttygygatggggyggatgttttta

SEQ ID NO: 3497 - DNA, 203 bp, Artificial Sequence
  Description of Artificial Sequence: Synthetic polynucleotide
agagaagaygttaggttgaggttttagygattttaggtattagtttygaaggagggyggggagatygtaaaggggaagtgttyggagggttaayggttttygygtattttgygtttttttgaagygygtygttttttygygtyggggattgggatttgtttttggggaattygtttagaagayggyggyggattggggtyggg

SEQ ID NO: 3498 - DNA, 398 bp, Artificial Sequence
  Description of Artificial Sequence: Synthetic polynucleotide
aaaattgygggagtttatttattgygtttaggtggttagtttttgagttttttttattygtggttttttgtyggtatgtaggtatgtataagtatatygtygagtaggaggatttaaygaatttagtttgtggatatgttttaatttttattttygttttttttaggtttgtttaggtgaggatgatgggagggaaaagyggtgtatagtygtaatattggtattttgtaagagtygtyggggtattgatatagagggatatygtattggagatgyggtgtttayggagatttattgygygyggtgaaatattttaagtatygygyggaataattgggtttagtttttttatttyggattttttttaggattataygttattttttattttygaattt

SEQ ID NO: 3499 - DNA, 286 bp, Artificial Sequence
  Description of Artificial Sequence: Synthetic polynucleotide
tgtagagtttgaattttatygtttagaaggaaaggtgagtgggggattygggygggaggtgaggtttgtyggtagyggtttttaggygtgttgggtagtayggttagtagaggyggygtttggttttggatgttgtagyggagaygttaaggagattgaatgtagggagygaggygtagyggtygyggagggtggggtygttyggaaatttaggyggygttagttttgtagtatttgtaggtygggggygygtataygaggggtaygtgggtgtggaggaatyggc

SEQ ID NO: 3500 - DNA, 267 bp, Artificial Sequence
  Description of Artificial Sequence: Synthetic polynucleotide
ggttgttaaggaggyggggtggttagygyggggggtggaggatgggggtaggaygygggagggaagggtagggggtggggggygaggtttyggggattagygygygagagtgtttagttgggaaatgtagtttygaattaatatygtatgttttataattagtttaygagtygatgtggggaaagttatttttagatggggaagagtagttyggatttttttaaggaygttttttagttagattagggaggggagaaggagatgggg

SEQ ID NO: 3501 - DNA, 260 bp, Artificial Sequence
  Description of Artificial Sequence: Synthetic polynucleotide
tagagtygtttgtatttgttygtattttttgggaggttgygatgatygtagttagggtggtygagygttyggtttattgtattyggyggttgttttgtagygtttttggtatttagggaatggtttgtaaattttaatgtattatagattagtttttatygtggagtaggaaaggygtttattagttaggggtaatyggttttgtagatttgggygggggygtagggggaggggyggtggtgtaaatttatygtgatttt

SEQ ID NO: 3502 - DNA, 239 bp, Artificial Sequence
  Description of Artificial Sequence: Synthetic polynucleotide
gaaggtaagttttaaatttttgtttggaagaygggttgtygyggttgtattattagtaggaggaggaggagaagaaattatttygygatattttattttgygggtgttttgtygttgtygtttttgttgtygtygattygagttygygggttygaatatygtagyggtggggayggtgggttyggygggygtygggaggaggatattagyggagttttgtattttygtgtttygtttat

SEQ ID NO: 3503 - DNA, 846 bp, Artificial Sequence
  Description of Artificial Sequence: Synthetic polynucleotide
gttggygggttttggttttygaggaygtagatatgtggtttgaattttygtttttttagtygttgtttttgtgtatttttttgggygtttttagygaatgygagyggygaggygagggygagygygtygaggaagggygggagaggygyggagtttggtygygtygygttgygtygagygtygggtttttttygygagtttttygggttygygygygygttttttattgttttygtttttygygyggygygtgttttttatttttygtygygygttttygtattygttyggttttaygyggygygygtttgttttggyggtagyggyggyggyggyggygygttttttttygaaygtygtttttagggttgttggttgygttttttattgtttygyggttgttgttyggggtgggyggygaggygggggggaggtgtyggtttggtygtyggggagggtttatygttygggyggatttttattgygagagygatgygggtttaggygyggygygygggggttgtagggygtttagtattgggggttgtyggygygygggggtttttttttggtttttaggtattygttgttgttgggygtttttygtattttyggttattatggatatttygttttttygtygtttttttygygtatttygggaggtygtyggggyggtagtagyggygyggtttygygggtgtttaggtgatyggttyggtagyggtagagtagtggtagtagtygttattgtygttgttattgyggtygtygtygttggagagaggaggaygaggagggtaaggggtagaagtaggttttgttttgtttgttttagaggttatt

SEQ ID NO: 3504 - DNA, 526 bp, Artificial Sequence
  Description of Artificial Sequence: Synthetic polynucleotide
tgttgttttttttyggygttttgtttttttataattggaagtygygaaggyggttattgygttgagtygttygttttgttggttaagtttgggygattygygyggaggagggtygggttgattgtygtygttgagttgttttyggaygggagygtttgtttayggtatttattttttttagyggtggaaatgtggagaagtaagtgggaggyggtgtygggaattgattttttttaaaayggtyggygtygttgttttgaaatgggyggttaagtgtttgtgggattaagggyggttttagagatgttyggaaaatygttgttayggttagagtgyggygtagaygyggtagagttggaggtgttygyggtgtaggttgttgtttaygtygtttaggttaggtgttgagggtttagttygygtttyggtygaattatttttagtttygttgagttatttygttygttyggtttttatygtatyggttagaggaaagttttygyggtttttaygtttttttatagtt

SEQ ID NO: 3505 - DNA, 201 bp, Artificial Sequence
  Description of Artificial Sequence: Synthetic polynucleotide
gtttygttyggggatttagggaggagggagagaggagggagggagtgggtagtttgggygtaygttatyggttttygtaygttyggtatttttygtggygyggygagttaatgggatttgtatattygaggtgtaatagtattattgtattaattattatttttattttaygtttagattgtttatttatttgygggaaat

SEQ ID NO: 3506 - DNA, 523 bp, Artificial Sequence
  Description of Artificial Sequence: Synthetic polynucleotide
tgttttgtaygygtgtgtayggttygtaygaggyggtygggttygttagttttttgattatagyggtygygttagggttatyggggttygyggttgtagtygtagttgttgtagtygttgyggttgtygttatttggtaggaggtatagggtatgggtgagggaggttgyggtagyggttaygagttgttgaggaagttagattgtaggtatttggggggygttaggtagtygtagtygtyggtttyggygttygttaygtygtattygtttgyggygttttyggtttygaagagttttttgtygggttggaagtgygygggyggyggtyggaagggtttttttatgyggyggyggygtyggtagttgtttttttygaatatgttttygtaggtygggtttagygtttagtagttgtttttgygttygtygtygttttygygyggtattttgatgaagtattygttgaggttgaggttgtggyggatgttattttgttagttttttttatttttttygtagaa

SEQ ID NO: 3507 - DNA, 276 bp, Artificial Sequence
  Description of Artificial Sequence: Synthetic polynucleotide
gttattttttttttttygtgaygttaygggtygtttyggggtgagygtttgagtygtttygggttygygttagtgagygyggttgttgtyggygagttagyggygtagyggygggaattygaggtygagygtygyggyggtagygttagaagygtatttatygggtayggygaggyggtttayggtgyggtaggtatygggaggygagagtyggygyggatagtaggyggyggttgtagttygttggyggttgttgygaggatgttgtttgggygg

SEQ ID NO: 3508 - DNA, 357 bp, Artificial Sequence
  Description of Artificial Sequence: Synthetic polynucleotide
aggagggaggtagggtaggtttgagggtgaaagyggtaaggatttaggtttaagttggatttgtttatttttttttgtygtagtttttttggtttttgtgygttttggattttygaagttagttttttgygtagyggattagagaggtttattygyggaygttaatttaatttttgggyggggttygggggttgagtagaaggygaggtttggggagtayggataattttgagggttgtttgtgtyggggtgggagygtagtgggtgagtttygagttttggtttagggayggttagagtagggygttggygygtygtggggataagtaggtgtttgtttttgtttgggggaaggat

SEQ ID NO: 3509 - DNA, 278 bp, Artificial Sequence
  Description of Artificial Sequence: Synthetic polynucleotide
tygggygttgggtagttttygtyggtygtygtyggagtttttgtgtttaygtygggggygtygttgtaggtttaggagaagattygtgttttygagtagtygtttttaaaaattaaataaattaataagagaattaattaataggtagygttgygatygttaggagygyggagygygygaggtttagyggttttttygttaagtttttgttatyggygygyggtygttygygttgyggtagyggyggyggygyggttgattgyggyggtagygyggta

SEQ ID NO: 3510 - DNA, 336 bp, Artificial Sequence
  Description of Artificial Sequence: Synthetic polynucleotide
gtttygtatgtggggtataatgaaataagagtagtttyggttagaggtttagtaaagyggaaagayggtttygttygtatattttttyggaaaattgaagygttttttttgatttttaaggttagaaagatttattatttttttygagagggygtagttatagatttattagagagggygggtagggtgtyggaagttagagaayggygtttygygtttttttatygttttagggygtagaggtgtttttagtgttyggagaggttggtagtgtyggtttygagggaagygtggagyggayggtygataggggatttttgtttaaattttattatt

SEQ ID NO: 3511 - DNA, 311 bp, Artificial Sequence
  Description of Artificial Sequence: Synthetic polynucleotide
ygygtgttttgttttygtagtggtttyggygtttaggaygtygttggttygygttttttttyggaatgaaggtgtttygtaggaaggygttggtgttgtgygygggttatgtattgttgttggtgtttattatgtttaattttttggattataagtggtataaggagtygttgtagtagtgtaatttygatgggtygttgggtgtygtagygggggtagtyggaggtagttgggggygtttagggtygttttyggtygggtygtttygtgtttatgttygtttggattttygtattttttatygttttttc

SEQ ID NO: 3512 - DNA, 201 bp, Artificial Sequence
  Description of Artificial Sequence: Synthetic polynucleotide
tataggtaatagagataaggttaggaggtaaagtatatttatgtgtaaatgagaygygttagggaatttgtaattttttgtattttygtttttgatgtttygatttttataattatagaattttaggtagaggtygtygattttttygttttygttaagagggattyggagtatygaagttttttagtyggtgtyggygtt

SEQ ID NO: 3513 - DNA, 201 bp, Artificial Sequence
  Description of Artificial Sequence: Synthetic polynucleotide
aaaygtttttttagaaaataagttattaatygtaygagagaaggagaggaaggtagtaatttaattttttgyggttygyggttttgaagattaggaggttygttttagtagggtgaggtttatagaatgtatygygtyggttgyggttttttaggggtyggttattygagttttggaatttygagaggygygaagtgggag

SEQ ID NO: 3514 - DNA, 481 bp, Artificial Sequence
  Description of Artificial Sequence: Synthetic polynucleotide
ygygattgtatttggggtagtttygtygygttttagtygtttttyggtaggaagygtaggtgtgtgagtygattyggagygagtygygttttygggttagygtgggtagggygtygtagtttgygtagtttygaggatttygygtygttttttygagttagggtttttaggagygggtygygtaggagaygttagagggggttgttagyggttgttgggagaaygggttayggaaatagttttttttaaagtyggggttatygtggggtgggygagttygtttttttaggtygggggygyggattagaggggaygtgtgtagayggtygyggttagttttatttygttygggyggagaygtatagttggagttggagggtygtygttygttgggtttttaggggtttgaaygtttaggggtygyggygagtttattyggagygagttaggtgagtaggtygttatggygatgyggtttygg

SEQ ID NO: 3515 - DNA, 280 bp, Artificial Sequence
  Description of Artificial Sequence: Synthetic polynucleotide
taggttttttggggttatttygygaggtagtygagggygtaattygggygtttggggtyggaggyggaattaggggtyggggttaggaggtaggtgtaggyggttgttaattygtttaatttgttgygygggtggtygtttagagtygygggtttgyggggygtttttygtygtygygtygtygtttttttaggttygggagggggygtttagggtggagttttatttatgggttgaggttttgggygygyggagtygtygtygttttttyggttggttt

SEQ ID NO: 3516 - DNA, 252 bp, Artificial Sequence
  Description of Artificial Sequence: Synthetic polynucleotide
yggagttttagttaygaattatttaatattygtaggttatagagygayggaggttgaggttgtgatygaattatygaygtttttttgaggggtgaaagtayggtygtggagattttaatygagtttaygttggygtaaaaggtaaaagtygygttagatttyggatgtygttttttttttttyggttgygygtttgattgggtagtttttaatttagygttttgattggataagatattaagttttttaygt

SEQ ID NO: 3517 - DNA, 239 bp, Artificial Sequence
  Description of Artificial Sequence: Synthetic polynucleotide
ttatttgygtgttgttttygggtttygtttygtttygtttyggagggatttttaggtygggtttagatttaggagttatttggggatttyggggtggttgygygtygagggggygttagyggggaygtgagttggygtygagatagtttyggttttttagygttagggttattgttaggagattttyggttagtatttaygtggggygttttygggagttygaggggtttatygtttgt

SEQ ID NO: 3518 - DNA, 405 bp, Artificial Sequence
  Description of Artificial Sequence: Synthetic polynucleotide
aagtttgyggagygggtygygtttttggttygttygggttttaagtttygygtygtygttttggyggggayggtgtagtaggyggygggatgyggyggggyggtagtttgagygtttyggatggttygyggyggggyggtttgtaagagygaygygyggttgttgttggggygggaygygttgyggtyggygttygttttgttggttttygtygtgttgttgggygtygygttyggtttyggtttyggtttttggtttggttgtygygygggtygttagygtaygygatattaggtgggtyggtygagtagatagyggyggggyggggagygyggggygygtggtttttgggttttgygggttyggagtttyggttttgygattttttgagtttggttgggaatt

SEQ ID NO: 3519 - DNA, 237 bp, Artificial Sequence
  Description of Artificial Sequence: Synthetic polynucleotide
ygygtayggtggtgtaggagtttyggtagtttagygtgaggaagttygagygtttgttttgygygtygtygtygtygttattatygtgygttttygggttygagggtayggyggtygtygtttygygtagtagtagygygtygttgttattttgygagaygttgttttttaggtygttttggtagttttygtygttgagagagttttgtttggtgattttgggygatagtagtttga

SEQ ID NO: 3520 - DNA, 204 bp, Artificial Sequence
  Description of Artificial Sequence: Synthetic polynucleotide
ygatyggggyggtttygtttagggttyggggtagyggyggygtyggyggygttygagttttatyggaggagagaygygygagagaggagtttygtyggtgyggyggyggtaatggagaggtaagaaggagttgttgtttttttggggygagggyggggaagtgtgagagagatttgygagaggttttagggttgttgttyggtt

SEQ ID NO: 3521 - DNA, 224 bp, Artificial Sequence
  Description of Artificial Sequence: Synthetic polynucleotide
aggattttttattggggttgagtttttttygtttttaatagaatttttaaatataagtagtttttttttgtttttaggagtttaygaaaygttgttatatygagygaatgtaaygygtatataygtttatattygaatagtataagtaagagatyggttgggtgtggaatagaggygtatatygygtaaygtatttatagtatgtataygygygtatttygatt

SEQ ID NO: 3522 - DNA, 278 bp, Artificial Sequence
  Description of Artificial Sequence: Synthetic polynucleotide
gttttttattyggygttttttaggatttttaaagaygttygtttagatttataggtatttatttgagtttttttgtttttttataatttygattttttttygtttttttttttttttaaaaaaaaaatttaaataatttttaaataatatttaataggaaagaagaaggaaaaggagygtataggaagggyggaggyggtattygggggggattgtttttagaggaggtygttgtgagtyggygaygygaggttgggggagtgggaggtaaattygtt

SEQ ID NO: 3523 - DNA, 232 bp, Artificial Sequence
  Description of Artificial Sequence: Synthetic polynucleotide
ggtggggtaaaaagtaagaygaaatttatttagatagttttttygatttttagaggatygatatttttttygagggttttaatagtggtygtttagggttygagggtaayggtygaggygttaygyggggtygyggttygttttggttayggaggatyggatttgttgygtttttgtgagtttgttttatttttatttattyggtgtttttyggtaygtygatttgtttttt

SEQ ID NO: 3524 - DNA, 331 bp, Artificial Sequence
  Description of Artificial Sequence: Synthetic polynucleotide
aaygygtttyggattttatttttgtaygtgtagttgtttttggggatgagggttatttagtttttgtygygggtyggggyggygaatttggtgttggggtygtaggttaggyggtygtgggtygagttggttatgattattttttygygggygttttgtttgggygagtgtttttygtagygttygtatttygtttttttygtgtgtagtttygygtygtygtygttygtygtttyggtttyggggttyggygygggttyggygtaggtgatgtttaygaaggyggtgtattatttttttttttyggttayggtaaagtttaggtagagta

SEQ ID NO: 3525 - DNA, 231 bp, Artificial Sequence
  Description of Artificial Sequence: Synthetic polynucleotide
gyggttatggtggtttygggaaygggttyggggagggagggygygggaggayggygagtygggggtatyggaggggaaggyggyggygtagatygtggttygttttyggggtagaggagggggtgttaggygggattggggagaggggaaggggggtttagttttgatygggatttatygtttttttygyggggygyggggttaggygygtagatgygtttagggygtagt

SEQ ID NO: 3526 - DNA, 201 bp, Artificial Sequence
  Description of Artificial Sequence: Synthetic polynucleotide
ttygtagtggttttttttgtagtttttttgggtttygyggttagtagtgtagttygtggagtygyggttttgttygttttttttgggtggttttagtgygygggttgatatttatttagtyggggaaggtgaggygagtagaggttggtgyggaatttgtygtttttagtagygtyggygggttaagtttagggtygggta

SEQ ID NO: 3527 - DNA, 201 bp, Artificial Sequence
  Description of Artificial Sequence: Synthetic polynucleotide
agtttaggagttyggggygttygyggygggtatgaggyggygtyggyggttgtagtaagaggayggtatttttttygagtattatygttatttygagttgygygaggygttygtgttygtgtggttgtagtgtatygttattagtaggatttatayggtggggygtagtttygagggtygggagtttttggttatygagtt

SEQ ID NO: 3528 - DNA, 219 bp, Artificial Sequence
  Description of Artificial Sequence: Synthetic polynucleotide
yggttggyggtgtttyggygttttatygggygyggtttttttaggttygggggttyggygttyggyggtattttttygtaatgggagtggtttaggtyggyggygtygttggtatattyggggttgtaggatagggttatgttgtagtyggggggygatatttyggggtggtygatgagttagttatggaagtaggggttttttttatggttgtagygg

SEQ ID NO: 3529 - DNA, 284 bp, Artificial Sequence
  Description of Artificial Sequence: Synthetic polynucleotide
gygggaggagggyggyggggyggttggyggyggyggggttygggagygtygyggygtaggattttttagagygygtygggttgagyggyggyggyggyggyggygggygtaggggtagggtatgattgaygygttttttgtttgygtttatgtgagagaaagyggtygagggagggagygtgtygagttygggttgttttttttttttattttttttyggaagtygtttttttggagtttttygtttttttygtttttttttyggyggttttatttttttyggt

SEQ ID NO: 3530 - DNA, 429 bp, Artificial Sequence
  Description of Artificial Sequence: Synthetic polynucleotide
ttttttttygggtygygatattgattygttaaygttaatgggggttygygattgttgyggggaygagggygtagagtagttttygttaygggtyggtttaygtaggggtygagaaagtggyggagaggyggtggtygaggtttaggggygagygygggttgagttggtttttgttgygtttaygagygatatttattttttygttgyggaygtttygygggygttaggttgggggttttgygatygatttttttygttttygaggtatygtygggttygtttggtaggtagygygtttygygagttggagggtygagtttygyggggtygtggggygtgtgggtgaaggygatatttyggatgygggaygtatgaatggtggtagagtaggggtygggattygtttatgggttgggagagagatgtttt

SEQ ID NO: 3531 - DNA, 283 bp, Artificial Sequence
  Description of Artificial Sequence: Synthetic polynucleotide
ttygttattattgtttaatygagaattagtaaygtttttygtyggtttttattttaygtyggaatggatttttagaatttattgyggtygtaagatagttygtaagagttggttaaaatgtttttaggtgygtgggggtttyggggttttagttggagttygatattttgagattggyggttygagggttgtagggtygtttygggygtgygtttatyggttttgtatttttgggtagtygagtgtygyggagaaygttttattttttttatygyggtttttt

SEQ ID NO: 3532 - DNA, 241 bp, Artificial Sequence
  Description of Artificial Sequence: Synthetic polynucleotide
tygtttatatygttttttttttgtaggtgaggaatggggtttgtttygtttggaatgtgtttttgtygggttttgtttgatttttattttttagtygggaygygygagttttttygtttggttgagttaaaaagggatygygygtatttygtygttttttattaygaagygtagatataggaggttgtagggttagtgttgyggagaattttagayggttttatagtygtygttattygyg

SEQ ID NO: 3533 - DNA, 244 bp, Artificial Sequence
  Description of Artificial Sequence: Synthetic polynucleotide
tygtygtttttatttyggggygygtaggtygaggaggatttygttgattaygaagagtttgaggatttttygagtttgttagatattygtagtatygtttyggaygattttttttattttttygaggaygaggaggagtayggygtygagagygyggagagygtttyggagggygtttyggaaagygtttyggagayggygatttttttgygygtygtttgygttaataaygtggggttgttgc

SEQ ID NO: 3534 - DNA, 225 bp, Artificial Sequence
  Description of Artificial Sequence: Synthetic polynucleotide
ttagttygggaagaggygtgygyggygtygttyggttttagggtaaggttttgattttgtttaattgtagtatttttygtttttgttgtttgagygyggtygygggataagggatgttggygggyggtaggggygagygtygygggygagaggyggttttygaygygagtgygtagygttyggttyggyggttttttygagttyggygagygtagygttttttgt

SEQ ID NO: 3535 - DNA, 249 bp, Artificial Sequence
  Description of Artificial Sequence: Synthetic polynucleotide
gagtttggggtygtygyggygttyggygtygagygttttygagttgygtttygygygyggttygygttatttgtgtygtygtygttttagtygtygagggygaggtttttttygyggygygyggtagttttagtttttatttaaatttyggyggtyggttygggygttyggttagtgagggagygttygtttygtygtygaaatyggtttygggtgyggagtatgtttagtgtygtygygagagyggyg

SEQ ID NO: 3536 - DNA, 255 bp, Artificial Sequence
  Description of Artificial Sequence: Synthetic polynucleotide
gtatagtagatggtaygagtaygtgyggygtttagtttaggttttyggaggtagttgagttggaaatttygayggaaagtatttataagtttttattttgygttggtttattygygtgtaygtttattttttaygygygtttttggtttagaagygtatagatgtttattgtttagagtyggtatygttggggagatygagygatttgygyggygtatagtgyggygttggtagggttttgggttttyggtyggg

SEQ ID NO: 3537 - DNA, 243 bp, Artificial Sequence
  Description of Artificial Sequence: Synthetic polynucleotide
ttagtagygtygtygttttttagygtygatgttttagtyggyggggyggttgaggggtgagggggaatttygygggygggggygagggagygtgtgtgygygagygtgtgygygygygaggggagygygtgygyggtgaggaygygygtyggyggttggggygggggygggggtyggggygtttttgtgggaagggaggggtgaaaggtygttggttttyggtaatayggtttaggtaaaygt

SEQ ID NO: 3538 - DNA, 201 bp, Artificial Sequence
  Description of Artificial Sequence: Synthetic polynucleotide
tggagagaaatgagttggagagttatatygagttaaygygggatayggttttyggttygggtygggttaggggtgggaggyggttttttatygtaggyggygggatttttatgygtygagggatttaagtttttattttatttataygtttattyggygtyggggygttgyggtttygttttaygagtttagagtaggtyg

SEQ ID NO: 3539 - DNA, 208 bp, Artificial Sequence
  Description of Artificial Sequence: Synthetic polynucleotide
gtyggatatttttttttaggattattygtattttatagtygygttaaaagygttttatttttttgtttttygtygygtaggttttttatygaygttygttyggaaggygagagtttttaygtggttyggygyggygyggttttyggggatygygagtaataaaagttyggttygtagtttttgtttttygtttttttttttaattttt

SEQ ID NO: 3540 - DNA, 257 bp, Artificial Sequence
  Description of Artificial Sequence: Synthetic polynucleotide
tttagtttttygtaagtatttttttygtttttttattttttttagtttttagtygtygtygttttygtagtttyggtttygygttttttygtagtttyggygttygtttattygttaggtaggyggtggtgtygatttatttgagtagttgtttygygtttagttygtygygygtagtggygtgygtyggttggatggtttggtttatgattatttygtygggygtyggtygttttatggttagggygagagygtta

SEQ ID NO: 3541 - DNA, 350 bp, Artificial Sequence
  Description of Artificial Sequence: Synthetic polynucleotide
gaayggtttagtttaggttttgygttagagtatygtattygggggyggayggttttgtagttttttagttttttttygtattaattagttgaygttygggygtattggtttttttygttttygttygtaygaaagttttgttygaygtttgtagttagtatygttygtattgtttagggagggtttgygtygagatttagtggtygagtgagttatagagtygttggttttggggaygttgttttttatygttttttatygttttttttttttttgtattttatttyggtatttygtattttttttttygttyggtttygygtattttgtttagattttataagtatttt

SEQ ID NO: 3542 - DNA, 216 bp, Artificial Sequence
  Description of Artificial Sequence: Synthetic polynucleotide
attaaattaggggttgggagtttttagattgaaatgygttttttattattaagagggagtttaygyggtygyggggggtygaggtagttagtyggygtygyggttttggggagttygtgtaggggtgtgttttggtgtgaaatttggtaggattttgtttgggtttgtatgtagggaggggttagagattttgaaatgtattagygggtagggtgg

SEQ ID NO: 3543 - DNA, 269 bp, Artificial Sequence
  Description of Artificial Sequence: Synthetic polynucleotide
ggtattgttgttygaaygaaygaaygaaygaaygaaygaagyggtttygtttaggaaaaatatttttttgaygygaagttayggttgaagtttygggttaygtagaggggttagtaattttatgggtggtggggttttttatttttggaygtagyggggagtagygggyggtttttttttttgtttattttttttgggggtgggggagttttgtgttattygaygttgygaggggttgttaygggttttttaggttgtgtttttygygg

SEQ ID NO: 3544 - DNA, 258 bp, Artificial Sequence
  Description of Artificial Sequence: Synthetic polynucleotide
agatygggtttttgttygttttttttttgygtttygggatgaggtagagattgaatagtyggygagtaaattaayggtatttagaaagttatgtyggattyggygtttagygtttaagygttaattygttgaaagttttttagygaaattttagggaygatttggatttygttgagaggaattgtttttgagtgagatggttttagaggtttggaggagyggattggtaagtatygggagggtagtgggagttttgtt

SEQ ID NO: 3545 - DNA, 224 bp, Artificial Sequence
  Description of Artificial Sequence: Synthetic polynucleotide
tgtgttttttttttttttttttttttttttttttttygtygtttttttttttttttttattttttttttttgttygttttttttttttttttygyggtygyggttyggatagaggttatttagygttttttygtagtttttyggagagtatgtgattaggtygttagtagygtygygagtgttyggtaatggtagggatggtgttttaaatatttttggaagtt

SEQ ID NO: 3546 - DNA, 256 bp, Artificial Sequence
  Description of Artificial Sequence: Synthetic polynucleotide
ygttatttygygttagtgtttgagttgtaattgtaaattgygygttttggtaygagtagyggtgggggygggtgggggaaggagygagtgattttttaggygtttttygttatttgatattagttaggtagtttttagggttagagygttagygtygaagttaggtttattygggaagttatttyggtggtygyggggtgtttatgttagtattagattttttttyggaaggaggagyggggygggttatayggtt

SEQ ID NO: 3547 - DNA, 310 bp, Artificial Sequence
  Description of Artificial Sequence: Synthetic polynucleotide
gggaaggggygttaatagggttattatttyggggtttygttattttttagtygttttttttttyggagattttgtttgttaagagttttgttttttgtttygtttagggttggggttyggtgggaattttttygtgttygaagggaygatttygttagagagtttttygatttttgtatttatygtttttggtaggaygtggagttgttyggaagttatttygggttggtttttttattygtgtgttaygatttttyggygggtttttgtygttygagtgtttttatygttagttttyggagyggyggag

SEQ ID NO: 3548 - DNA, 410 bp, Artificial Sequence
  Description of Artificial Sequence: Synthetic polynucleotide
aggataattgggaygggttggatttatatttgatattygggaaatttttagagygtgtggtgtttttgttagyggtagttattggtggagttgaggttatygttattgtygtygttggygttttgtttttggaattttttagtaagatggtatttattgtttgttttttttygattagtatttttagtygygttttttttttttygggataygtattagttatatattgtggggagaagatgggttatgtaaatgtaagttaaygygtttttttagttatttttgtataatgtaataggaatagygattygygygtaygaatygggtagtgtgygygtgtgtgtgttygygtgtgtgagygygtgtgttagygtgygttttygygygggygtgygtttgggtggattttt

SEQ ID NO: 3549 - DNA, 274 bp, Artificial Sequence
  Description of Artificial Sequence: Synthetic polynucleotide
ttggggttagttttttttttttatygtygtygtttttttatttatttygygtttattttataattatttygtttggttttttttyggttttatttttatgygtttttattatttttttaaatattgtagtaagttgtagtaaggygggtaaatatygatagygygygtgggggygggyggygggygtygyggggtttatttttttttyggttttttygygttttygtygtttttygygttggtttttatygtatgagtagygttttttyggttt

SEQ ID NO: 3550 - DNA, 201 bp, Artificial Sequence
  Description of Artificial Sequence: Synthetic polynucleotide
tttttggttggygggygtttygtyggtygtyggttttttttttgaaattygtyggygtatatgaggtygttgttttygtygtaggygttggyggttttttygyggtgttygtggtgatgttatgtttygttattaygygggaggagaggagggyggygtygtygggttttgggtgaagagyggygtagyggyggyggyggc

SEQ ID NO: 3551 - DNA, 265 bp, Artificial Sequence
  Description of Artificial Sequence: Synthetic polynucleotide
ttttygtggtaggyggtagygagttgggttyggggtygggttgagttttgggatygygttgygtagttttygagtygttygttatttggttgyggtygygyggttatttgtttttygttttyggggygtygtttagtttygygttaggygttttttttagygttygtygttttttttyggygagattattygggygygtttygttygtyggttttygatgtaaatagttgggtttygtaggyggttggtttygygtttttyggtt

SEQ ID NO: 3552 - DNA, 201 bp, Artificial Sequence
  Description of Artificial Sequence: Synthetic polynucleotide
attattattattttaagtgtttgttygttggggattygtygtygtygtygtygtttggtttgttttgttttggggttttgygyggtttttttttgtttttygttttttyggaagaggygttygtttttaagtaygtggagygygtttygttygtagtygtygygttgttaggagygygttatgygtagttgttttttgygt

SEQ ID NO: 3553 - DNA, 362 bp, Artificial Sequence
  Description of Artificial Sequence: Synthetic polynucleotide
tttggyggggagtttgggtagygtygattaaagttyggagyggtagtttyggggygygggaygyggggtataygggtttagttgttygaygggagttygaygygygtttttyggygggtyggygggttyggaagtttygttgttygggtygggtttttaagttygtagtygttttgattaaaataggtatygygayggyggyggtaggyggyggtagttagggttggggtygtatygygtaygygtatgygttygtygtttygygtttttyggygggyggagttyggygtygyggttaggattttttatttygttttygygatttygttgygggtttgtatattygaggattyggtttgaaa

SEQ ID NO: 3554 - DNA, 298 bp, Artificial Sequence
  Description of Artificial Sequence: Synthetic polynucleotide
gttttygttttttatygttttttttygtttygtagttttygagtggygttagtaygttygtygggtatgggttttaaatgtttattagygggagtttaggygtttttgttttggagygyggtygggagtaaaatygtaggagtgggagggtagygagttagttggatttygagtygyggagygygttggttttgtttygtttgatgattttagagygygggtttaagygtygtttatgtagtatttttgagtttyggggaaggagagttaatgaaaaaatatttaatygttttygttg

SEQ ID NO: 3555 - DNA, 295 bp, Artificial Sequence
  Description of Artificial Sequence: Synthetic polynucleotide
gagyggygyggagagyggtaggggygaaatttygygggttagatgttygagggygyggyggygttgttaggttgtygttgttgtttttgygggtttygagygygttttygtaggyggtattgttygyggygyggygtgtgtatygagygagtgaaggtatgtgtggygggygyggttggagttgtygtygtygtygtygtygtgttagtaggttttaatgtttgttattttttaggaygttggtagtagtagtagttyggagttttygagttttyggtaggtttgygtgtttttt

SEQ ID NO: 3556 - DNA, 203 bp, Artificial Sequence
  Description of Artificial Sequence: Synthetic polynucleotide
ygaaggtatttgggatttttagaygtaggatgtttttgatygttgagtaaatgataagggaggygyggtygyggtattygtttatttagygtaatygtttygygyggggagatttyggttgggtttttaggttggatttyggtagtygaaygttygttattyggttaggaagttagggagygagygtttgygyggtygtattt

SEQ ID NO: 3557 - DNA, 215 bp, Artificial Sequence
  Description of Artificial Sequence: Synthetic polynucleotide
ygyggatyggtyggtttgggtttttgtagagtagattttgtttgygttttttaggaggagtgggtggtaggattggggttttttataggttttggggyggyggygagattggtayggttyggggtygtaggygygtagttaygtttttggaagttygtttyggttttygtttttaattygttttttyggggttttatggygtgaggtttggggtt

SEQ ID NO: 3558 - DNA, 201 bp, Artificial Sequence
  Description of Artificial Sequence: Synthetic polynucleotide
ggaggttgtagtygttygagtyggttygggtgggggyggggtgggggyggygyggagggtayggagattayggyggygttattygggatatttagggtttygaggttttgggyggtttttaygygagatygtaaattatgataataggtagttattygaggttaaataaaaayggagtgggtttttygygygtygtygttt

SEQ ID NO: 3559 - DNA, 340 bp, Artificial Sequence
  Description of Artificial Sequence: Synthetic polynucleotide
ggyggygttgayggatgtyggtttttagggagttttaaggyggygggtattagygggttgattttgaagygttgttyggagtyggagygttattgtttggygyggttgatggttgaygygttgygyggttgygtgtttgttttttayggygtggtggagygygayggygaaagttatttgtagttgtaggatttgttygatggtttygayggattttgtgtgttygattgtaaaatgggygttaggtatgygtgttttgttaggtyggttggggggattaagtaggggttyggggtygggatagttgtttgagggggattyggggygagtgttygaaggg

SEQ ID NO: 3560 - DNA, 201 bp, Artificial Sequence
  Description of Artificial Sequence: Synthetic polynucleotide
agggtttagggygtagggygggtttygtaygtagggygggygygygggtatttttgtggttaggygatttyggttygttttttyggagtttagggattttygaggttggygygggttgttygygataaggtgttagtagtttygggttygygaggagtagtttttattygyggttttygagtttagttttgttttttygtt

SEQ ID NO: 3561 - DNA, 236 bp, Artificial Sequence
  Description of Artificial Sequence: Synthetic polynucleotide
tttgagtagtgtatttttttaaaggtaaagagagataagggaggaaatatagtatttaaggtgattagtygattggatattgttgatggtatatttttttygtttttaattaatygtataaaattygtaatatttygygttttygyggggtttttygygtttttggttyggttttttyggtygtttttagtaggygtttygtttttygygggaattttgggatttggtygagygtt

SEQ ID NO: 3562 - DNA, 251 bp, Artificial Sequence
  Description of Artificial Sequence: Synthetic polynucleotide
gttttttagtttttygygtatttttttgygttygggtttygtygtttygtttagtgttggttaygggtygtgttattagtttgtgygttttygttattygygggtyggggtatttggygttttgtgtgggtggygggagyggggaygtttyggtgttyggggatygtagygygttggygtttaattttgtygtygttygttttggagtygggaggttttagtygtttaagtgtttygggagatttaggtat

SEQ ID NO: 3563 - DNA, 201 bp, Artificial Sequence
  Description of Artificial Sequence: Synthetic polynucleotide
tttygttttygttttattttttattggygtaggtttaggttatygttgttaggatttttygttgtygtygtttttygttttttttatttagattttgagtygtttattttagtyggtgtaggtygyggggtygtttttgatggtttgggtattttttattttygtttygtttaygattatygyggttgtttgagttgttta

SEQ ID NO: 3564 - DNA, 206 bp, Artificial Sequence
  Description of Artificial Sequence: Synthetic polynucleotide
gttttygagtgygtagygtgygtttttagtttttgttgygtttttaggtttggygygygattygagygtagygggtaaagttggaggaatttggyggyggyggagygggygtaggtttagttygataaagttygggggttygggtyggggtygttgtygtagttygtaygttgtttygtgttttygagaggttttttttttagygt

SEQ ID NO: 3565 - DNA, 201 bp, Artificial Sequence
  Description of Artificial Sequence: Synthetic polynucleotide
ggtygtygtttatttygygtatttygttttttggaaatttagtagtyggggggygaatatygyggygtttttatgggaatttggtttygggtttagagygygggtagttggtagagtttggggggygyggyggyggtagtagtaggttggagggygygyggygggggttaaggggatttggtyggygttyggagtyggagt

SEQ ID NO: 3566 - DNA, 203 bp, Artificial Sequence
  Description of Artificial Sequence: Synthetic polynucleotide
gttgtaattttgggtttgggattgyggggaygggaygggtgggaagyggttaaaggygtagyggtttttggttagagtygtagaggtttgagaygtgggtygygtttyggtttaggagatttygyggtygygttttaatttttagtttttygattgygattgygattygggaaaaygtttaygtttttggaaaggaagtttta

SEQ ID NO: 3567 - DNA, 216 bp, Artificial Sequence
  Description of Artificial Sequence: Synthetic polynucleotide
ttggggggttgggagaaygaaaatattagttgygtttttaatatttaaggaaggaagtggtagyggggayggggagaggatgggaaggggatgttgattgygagttggggygggaygyggtgatgggaggggatygggtygggaatgygggaggygaggggagygaygggatttgtygtttyggyggtygggtagttaatygattygtttttttta

SEQ ID NO: 3568 - DNA, 335 bp, Artificial Sequence
  Description of Artificial Sequence: Synthetic polynucleotide
agtgtyggagygttyggtggtygtygygtygygygtttggagggatgttaaygtggagtyggygtygagttygttyggygtgygtgygtgtgtgggagygygygagttttttgaygyggggattagttatgaatygggggtgtgtgtttgtttttagagatttggtaaggtgyggagttttttagaagtgyggttaagyggtagyggagayggygagttaggaattttttttygygtttttagttttttagygtggyggyggaattttyggagaaagtttgtaaatttttagygggygyggygaggaygtygggttatttagggggygggtgggc

SEQ ID NO: 3569 - DNA, 230 bp, Artificial Sequence
  Description of Artificial Sequence: Synthetic polynucleotide
gagagaaagtgagaagggagagaaaagyggyggttgagtaaagygggagtyggygygggyggtggggtttgattyggaygtygygtattyggtttygtttygygtttagygtttygtttattttttggtygygtttgttttygygtttttttgtttttttttatttattagtagttttgttgataagygagaaaattgataagtgagaaaagtygtttgttagygttygg

SEQ ID NO: 3570 - DNA, 224 bp, Artificial Sequence
  Description of Artificial Sequence: Synthetic polynucleotide
tagtatagggggtgagatggggtggtggttggtgaaygttggttattttattttatattattttattttgagagttgttataattatyggygttatttttygtgtattttgaggtttggttggygagtygttgttgggagttttttgtaaatattttttaaagtttgaaggygggttttaaaygtaggygtyggggattatgggagtttttaaatagttgygtt

SEQ ID NO: 3571 - DNA, 211 bp, Artificial Sequence
  Description of Artificial Sequence: Synthetic polynucleotide
ggttaattttaggtatagtttattygagttaggygaggtttagaaaggtttgattygtttggtagttttaayggatttgttttygtagtygttgattagtygttgaygagyggatttttyggtygttatggygattgtgaaatgtagggtggagygtatgygttygaagttattygygygggtagtttttgygtgtttttttgygtgtttt

SEQ ID NO: 3572 - DNA, 205 bp, Artificial Sequence
  Description of Artificial Sequence: Synthetic polynucleotide
ygtgtaattygattttttttgatttataagttttgagtgatagttttgatttggtttaatygygggagggaggggaaagagaaagaaagaaatttttagtygtaygttttttttggtatttaatygattttttggaaaaaggttttatttyggtttggtgtttygtgttgggtggagaagtttttygtttygatttggtatygtt

SEQ ID NO: 3573 - DNA, 398 bp, Artificial Sequence
  Description of Artificial Sequence: Synthetic polynucleotide
tttygttygtttygygtttygygtttyggygtttygtygttygtygttygttygtttyggygtygtygttygygtttyggygtttygggtyggygaggggygygttygyggtygyggtygttgtatggygttgagatggygggggygtygygyggyggaggyggyggyggaggyggygygggygagttygggggygtygagygggyggtygggataagtygtyggygygggtttygggygtgygaygaggagttygtttgtttagagttggaggygttgtttygyggttataygttgyggttggagtaggyggttaygttgaaggygttggtygtttttagtttgttggygggygygttggygttggtygagttgttgggygygtyggggttygygtt

SEQ ID NO: 3574 - DNA, 290 bp, Artificial Sequence
  Description of Artificial Sequence: Synthetic polynucleotide
atagygggygtttttagatattggggaaagtgttttaygatgtttygagtttttttagtttygttagyggggygagygtgagggtgtttygatygattagyggtttygggtgtagggtggygggttyggyggygygygttttttttttttttttggyggttygtaygtgtygttygygtygygtttttaygggttaygygygggtttygtagygtygyggtygagtygggttgttyggttygyggatatagygtyggtygtygtatttygtgyggggtygyggygygatg

SEQ ID NO: 3575 - DNA, 307 bp, Artificial Sequence
  Description of Artificial Sequence: Synthetic polynucleotide
ygtgaaattgtttaattaagtgygtagttatagaggaagaggyggtttttttaatatggyggggtttttgttttttagttttygggttttgattttagttygygtttttattgttttatttttttygtttttggagtttttyggtgattttattatagtttttgttattttgtgatttgtaggtattgggagatttatagggaggayggyggaatatttggaggttgggaaatggtgagtgygtggagtgggtgtttygagaatggggaagaggttgtttgaattyggtyggaatyggttgyggtgg

SEQ ID NO: 3576 - DNA, 212 bp, Artificial Sequence
  Description of Artificial Sequence: Synthetic polynucleotide
agtgttgttaggyggaggttygttagaaggtttygtagttgttgaggyggggtgggattgygttttaggggtygygttgaagttggygtygygattattgygtatygatttygtttattttttgttygttttygggagttttttttgttttaggayggttttttattttttaaattatgttygttttttatttyggatttatagttattttt

SEQ ID NO: 3577 - DNA, 375 bp, Artificial Sequence
  Description of Artificial Sequence: Synthetic polynucleotide
tggtttttgagtagtatygtttagtgtagttttygttaggaaaagtagtagaatygatagttttagggggygagyggggtttatggtgtagggggtygggyggttygttgggtaaggygttygagaaagygtttggygggaggaggtgygyggttttttgttttaggyggttygggtgttygttttatgyggggygagygttyggtygattttygtyggggyggagtttgaggggtggttgatttatgtayggggattgttatttygtygttttygygttgtaaattgtgtaagagggagaggaatttttygttaagttgaaaagttgaatttgttttttaaatttttttttgtagtttagayggggaygttttg

SEQ ID NO: 3578 - DNA, 201 bp, Artificial Sequence
  Description of Artificial Sequence: Synthetic polynucleotide
ggggttgttygtaatatgtagggaaatgagtatttygttttgttttttatttttttttagtttttygtggtgggtgtataggaaaaagaagggygaaaagygggggtaatagttagtygtygygygygtttttagygtygtttttagtaatagygttaggaggaaagtttgtygggtttagttattgygttttatgtygtc

SEQ ID NO: 3579 - DNA, 356 bp, Artificial Sequence
  Description of Artificial Sequence: Synthetic polynucleotide
ttggagaygtygggayggaggagttaygyggagagaaggygagaagaaggyggaygggagyggaaygggttygggagygggtttgggagygggttttygtygagaagtttygygggagayggyggtttttaaagttattttgggtygygggagygygggatyggggttgygggygtygagagygygtygtttgtygttttygtgygtygtygtygtttttgygygaygtttttyggttaggtttgggaaagygttygtttygttttatatttttttaaagtttygggygtygygtttttttygtygtygttataygtgtttyggtygttttttygttttygygygtygtttygttc

SEQ ID NO: 3580 - DNA, 265 bp, Artificial Sequence
  Description of Artificial Sequence: Synthetic polynucleotide
gtyggtttttttgtttgagtyggttgygtttygygtttttyggggttygtagtttgttagttygggyggttygtattygttttgggaattygttygaggtygygaatygttaggggttttygygttttttttttatttaggttttttgtttttttygtygyggtygttyggtttttygyggtagygatagagttttatttgtagaggattttaaaatgagattaagygaaagtggaattggtagattygagtggtgtttggaaat

SEQ ID NO: 3581 - DNA, 697 bp, Artificial Sequence
  Description of Artificial Sequence: Synthetic polynucleotide
gattttagtygtaygttgtgygaggtttgtaatattygttttagtygttaygagatttatatygtgtataagyggtattattgygtttygygttaygattygtygtygygtygatyggtygygttttygggattttttgggtyggtygygttttyggttttttttttygtygygtttgtgygtaygygtagaygtygtaagttttaygagttgtaygyggtyggygtttygtttttttygtygttyggttaygttttygygttygagtygtygyggttyggaagyggaagyggaagyggtttyggtttygtttttgygygttygttyggtttygyggtygayggttttatygatttgagtaagaagtygyggygttygtttttyggagtttyggtatyggygttggtygattattaygagtgtayggtttgtygygtgagtttttatagtttygaggtttatttggygtataagaagtattygtgtttygttgygttatygttyggygygttyggtttgttygtygtygtttgtttttattgtttttygaayggttyggtgygyggggatttgttggagtattttygtttggygtayggtttgttgttyggygygtttttggtyggttygggggtygaggttyggaygtyggtygatygyggtttttygttygttttygttttygtygttttttygt

SEQ ID NO: 3582 - DNA, 226 bp, Artificial Sequence
  Description of Artificial Sequence: Synthetic polynucleotide
tgggaggagygtagatatttttyggtgatagggagggttttttatttggttgttatttggaagtttatagtggtttyggygggtaggygggygggtagagygygggttygaaygtttttygygtttgyggyggygtaygtgyggyggyggyggyggygtyggyggygygggygggatttattgggtggtygygygygttattygygygttttttgygygtttttgt

SEQ ID NO: 3583 - DNA, 201 bp, Artificial Sequence
  Description of Artificial Sequence: Synthetic polynucleotide
ttttttttatttttttaatttttagtaggatayggaatttyggygtttttygaaagttataaaagaggggtayggaaattttaagttygtygtgttaattyggagaaygtaaattygaggtagagygtgygtygtgyggggatgtgggtgtygaggatttygaagygttyggtttttttygygatttttattttttttaga

SEQ ID NO: 3584 - DNA, 201 bp, Artificial Sequence
  Description of Artificial Sequence: Synthetic polynucleotide
tatttygttatttyggyggggtaagttyggattttattagggtaggttygggaggttatttagggtagaygattygaggtagagygttttaaaattttgtygtygtaygtttagttagagygtygagygygtttgtttttttttygttattttttagttttttattygtygattaaatttttgggggattatatttttaag

SEQ ID NO: 3585 - DNA, 215 bp, Artificial Sequence
  Description of Artificial Sequence: Synthetic polynucleotide
ttgttttttagttagaaygtgaatgtattgttgaygtatattgttttgggagaagattagygtgatgtagtgtttttatgtattagygtygtttttttttygtygtttgtttygyggggttaaygtyggygttttttagygtygygtyggtyggygtygygtagtttygygttttyggtygttygtttttttttttttttttttttttttttttt

SEQ ID NO: 3586 - DNA, 252 bp, Artificial Sequence
  Description of Artificial Sequence: Synthetic polynucleotide
tgaaygtgtgygtgtgygygygtgtggttgttttttttagttttagtttygaaygtaaatattttatygaggtatagggaagtygggagtagtygaggaaygyggagggygtygaattagagtttgyggggtttgatagttttttttgyggygtttaaggtgggygtaatgtttaataaaaaggtyggaaaatggggatygatttygaatattttttttttttatttagtttyggagttygagtagyggygg

SEQ ID NO: 3587 - DNA, 203 bp, Artificial Sequence
  Description of Artificial Sequence: Synthetic polynucleotide
ygtttyggyggtygyggagggagygtaggyggygtygttgtaggggtygggygggttggyggyggyggyggyggyggttgtaggagygygggtaggttygygygtygttggtaggggtagtaaatggtagttttttttygtagtatttattygyggttgtatygtatyggggtattgtgggaaatttygtttattttttygtt

SEQ ID NO: 3588 - DNA, 201 bp, Artificial Sequence
  Description of Artificial Sequence: Synthetic polynucleotide
yggyggtattyggygtagaggttttagygyggggagtygggtttagtttyggtttgttagygtygyggttttagtttattygaggtyggtttggggggttygtagggygygyggagygtygagtgygygtygggttgggtttygtatttyggtgtaggagygygggygyggygyggyggagygtttygtatggagtyggtt

SEQ ID NO: 3589 - DNA, 201 bp, Artificial Sequence
  Description of Artificial Sequence: Synthetic polynucleotide
gttgaatatygttygggtttagtttttatttygyggtttggtgaagttggttttygtgtttgtttgggaagtttttgtttggggataatygttaggttttygagtygttttttttttatttttygttgygtyggtaattttattttttygtttttattaayggatyggtatttaaattaaagtttagttttttggggttta

SEQ ID NO: 3590 - DNA, 201 bp, Artificial Sequence
  Description of Artificial Sequence: Synthetic polynucleotide
tttygtttttyggtagagtttttgttygygttaatttatttattaggttttgttygygttaygygygtttttggtaggtttggggyggggaaaggygaagygttgggtaygygagggtttgtgtattttagtttttaygaygtttttggttttttttaggttygtygttgtygtatttaatttttttttttygggggttat

SEQ ID NO: 3591 - DNA, 213 bp, Artificial Sequence
  Description of Artificial Sequence: Synthetic polynucleotide
tagtttatttaatattatttatgtattttgtgtaaggaattgtgggatttygttttayggtaaataatatggaaattttaaaaatagygatttttttgtgygtgtttatttaygygtttyggggtgatttggyggggttgtygtygggtgatttatatttttgaatygygaagygatagggaaagygygggygagygtaggagaygyggtygg

SEQ ID NO: 3592 - DNA, 385 bp, Artificial Sequence
  Description of Artificial Sequence: Synthetic polynucleotide
ttattttttgtttgtttaagtyggttggttttygtgattgattyggaataatagagtagatgtttgygtgggaggtaagttttatttaatatttgttttgyggygggaaggtttgggtgtttatagatagagttggagtttttyggtgggtggtatagataattagttggggttgttttatatgtaatttaattataggggaaataggtttaaatatygggtgataagtagygtaattgtttygggtgattttgtaattttttttttattaattttttttataaygtatatgattgttataagggttaattaaaaagagygtgagtggttttatgttatatgtagttggattagaaagtgttgagtatttgtttatgygtgtaag

SEQ ID NO: 3593 - DNA, 278 bp, Artificial Sequence
  Description of Artificial Sequence: Synthetic polynucleotide
ggtattgyggtttagttttygttyggggattygygggtygattgtggttttttttggggaagtyggggygyggggaggygtttygggtattttagtygtayggggtaygttygttttyggyggggtttttygtttygttgtgggagtggtagtgggtgtyggggtggagaaagtaygygtggygyggagttttggggaygyggygttttattygttttggggagtttyggattttttttagtttttaggttygtatgtttttttttttttagtgtttt

SEQ ID NO: 3594 - DNA, 248 bp, Artificial Sequence
  Description of Artificial Sequence: Synthetic polynucleotide
aygygagtygttagyggtgggatttatygaygatttttyggggygataggagtagtttygagagttagggygagygttygttttaggtggtyggatygttygtygygttygygtygygttttttgtaggtaaygggagaygttttygygtagygygagygttttagygyggtygttygttttttttttygagggataaattttttttaaattygattygagtttttggattaaattygtttgygtyga

SEQ ID NO: 3595 - DNA, 216 bp, Artificial Sequence
  Description of Artificial Sequence: Synthetic polynucleotide
tataatataagggagagaaagtaaygttttggttttagaaatttttatygttaaggttagttttggttagaygtatagttaaagagtttttttagtttagyggatgaatygttygygagtggtattttttaaaattttggttttattttttaagatgtttttttattgygtaatttagaaagtattyggatygtygttatttattagyggyggyga

SEQ ID NO: 3596 - DNA, 201 bp, Artificial Sequence
  Description of Artificial Sequence: Synthetic polynucleotide
tgaggtgttttttttattaattttaggtatyggtttttggtggaattgtttttagattgtttgagtttttagggttaagttttttttttattttttagtayggagttttatttagaattgtatttygaaagtttaaagtttatttatggtttttagagataggygaaggygaggttttttaygggaygttttggtaggtgt

SEQ ID NO: 3597 - DNA, 208 bp, Artificial Sequence
  Description of Artificial Sequence: Synthetic polynucleotide
ygagtagttagggttagygagygattttagtagtagggaygyggtygtgygagagttygyggataggygagggggattttaggggagtagttgttgtttaygggttaygggygatgtayggagtggagaagtgaaygtggtttataggatttttgttyggaaggtggagagygttataggggaattttttygatttttgttygtttyg

SEQ ID NO: 3598 - DNA, 201 bp, Artificial Sequence
  Description of Artificial Sequence: Synthetic polynucleotide
ttaggagttyggatttttgtttagttttttggyggagttaagttygagygtatagatttttygagttttagyggttagggggtattgtgtgagyggttgaygttattttttygttyggtygaaattaggyggygggattttatatagttgaggagagggagtygaggtygtgatttagggttggygaygattaaattaagt

SEQ ID NO: 3599 - DNA, 364 bp, Artificial Sequence
  Description of Artificial Sequence: Synthetic polynucleotide
gtygygggtgaggtttgtggttaatttygygttgtygaggttttattttttygagtttagtttgattttaggtygtttttaggtyggtgtttagttgaggygggaaygttgtagtttggttgagygtgatttttaggttttgtgaggaaaagtygagygygttatatygaggygttagtygtttattttattataaggtaaaagatttatgttgttttagttattttaaagttgggagatatattgtattttttattagatttygaatgtttttagtgtttgtaattttttaagaagtttttagagtagatagtttttggatygtgggtattttttttyggggayggggattttgttgatygtt

SEQ ID NO: 3600 - DNA, 213 bp, Artificial Sequence
  Description of Artificial Sequence: Synthetic polynucleotide
gtttagtttttttttagtatgtaaagttttttgttttttttyggagttggyggaggyggtaattttttattttygtygtygggggtygggtagtagygggygygygggttagygtttagtayggygggtagygtygygttgygtatygtygtygattatgagygaggatagtygyggagatagtygygtygagagygttaaggatttggagaa

SEQ ID NO: 3601 - DNA, 201 bp, Artificial Sequence
  Description of Artificial Sequence: Synthetic polynucleotide
ttttttygttayggtaatttaattggaggtagaagtyggyggggyggtygagyggggyggggygggagygyggtygtygygagttayggtggggagygggygygggggattttggygggtttygggtagygyggttgtatttatttgtgttataattgyggygayggggggttgaggaatyggtttttttaaaagtaaatc

SEQ ID NO: 3602 - DNA, 201 bp, Artificial Sequence
  Description of Artificial Sequence: Synthetic polynucleotide
ttttgggyggttgtagaggtyggtygttyggtttggtttattttttttaggaaattttatattggagaggtaagggygattttaaaatgtatygttgagtygttaagttgttatttttttttatttttttttgtttttttaaattgtatttaaaaaaaaaaaaaagttaattgtatagagtggttgggygygatgggtggg

SEQ ID NO: 3603 - DNA, 296 bp, Artificial Sequence
  Description of Artificial Sequence: Synthetic polynucleotide
ttygggatygygtttyggtygttygagtttttygygttygtygttttttatttyggtygggggtttatttgggagttygttgttttyggttagtygttygygtgtgtttagggttagtagtaygtataagtgttagygtayggtygtygygtttatgtttaatgygggtttygttgggygtgygggygtgyggggygyggggattygatygatyggtygttttygtaggygttgttygttgttygtygtttygttatygttygggttttygagtygtttagttagttyggttgatg

SEQ ID NO: 3604 - DNA, 201 bp, Artificial Sequence
  Description of Artificial Sequence: Synthetic polynucleotide
ttttgtttggyggtttttgygttyggggttgttgagttyggggttygttttgaggtygyggttgtggtttttggttttttyggttygygttattgtygygyggygttygttgtattttgttttttttgyggtttygtatgtttttggtggaatttagttyggyggaygaygaggaggatgagatggaagtttgttggaaat

SEQ ID NO: 3605 - DNA, 297 bp, Artificial Sequence
  Description of Artificial Sequence: Synthetic polynucleotide
ggggagggaggygyggygygggaggaggaggggygtagtygyggagttagtggtttygtttggaygygttgttttttagatattttyggagttttagtygygyggatygygygttttygtygttttgtttttaaatttttgtygtagtttttttttaagttagygaatttattttttaaaattagaaattgaatttyggtaygggaaaggagttygyggaggagtaaaattatagtagagtaagaagagttttagagagtagttttttyggagtattaatttygtgtygggagtgta

SEQ ID NO: 3606 - DNA, 268 bp, Artificial Sequence
  Description of Artificial Sequence: Synthetic polynucleotide
tygygttygggaggggyggttgtygttygyggggygttygyggtgttygggtttgggtagygaggaggtgaygtygttttygygggatgagttygggaggyggaggggyggaggaggtgttggyggyggtattgagyggyggyggygtagggygygygggtttttygygtygattttatygatttaaggggyggyggyggtggyggyggttgagygattttgggtygggygygtgatgaggaggggtyggygttagatttygttgtac

SEQ ID NO: 3607 - DNA, 201 bp, Artificial Sequence
  Description of Artificial Sequence: Synthetic polynucleotide
ttgagtagtygaagggataattagatagttatagatagatagayggttagttygagtttygggtaggagagaggttgygaggagtagtttatgtttgtttygtttagttttygygttttygggttgtttttttaatttygattygygtaygttgygagttttyggygttgtygtttagtyggaggggtagtttygtttttt

SEQ ID NO: 3608 - DNA, 201 bp, Artificial Sequence
  Description of Artificial Sequence: Synthetic polynucleotide
ygygattagtattttttygttaygaatttgagagataagaagygaaaatagggtgtgtgggggatggagagagtttyggggaggtagttgygttttygtaygttttaatttaaagaagagagggaaggaggaagygaatttattgtttagtaygagtygyggagyggtttaatttagagygggtagttgyggaygagttgg

SEQ ID NO: 3609 - DNA, 201 bp, Artificial Sequence
  Description of Artificial Sequence: Synthetic polynucleotide
ttttgtgygagtaaagtygggagagygagttttaagtatttggtagyggtgtttttagtaggygtygaggaattyggttatttatttttggtgaattttgygtttattgaggtattygaggtayggatgtgttygtttagtattyggagaygaaggagagagagyggggatatgygttttagttttgttaggttttagggt

SEQ ID NO: 3610 - DNA, 201 bp, Artificial Sequence
  Description of Artificial Sequence: Synthetic polynucleotide
tttttttttttygygtatttygtggttygattygagggygtygaatayggyggygtttattagtaggtaggtgaaggtgtagaygatgagggatagagttygtaygttttgtttttttatggtygttagtaaggagtyggygyggggggtatgtttygtaggtttatagtygygygygttttattgtagygttyggyggtc

SEQ ID NO: 3611 - DNA, 302 bp, Artificial Sequence
  Description of Artificial Sequence: Synthetic polynucleotide
ygtttattygggygygygggtgygtagyggggttttygtygggygtyggtyggtgygygaagtttgttyggtttaatttttaaggygygggagyggggygyggttttaggayggtagggatygygatggagyggtttygggggyggtygggggayggygyggtggyggtyggttagttygttttttygggggyggygggygyggyggyggyggygggaggggtttygygggtttygyggagtagyggggyggaygygggygtatgagtygygygggggtyggggtttttyggygttygggyg

SEQ ID NO: 3612 - DNA, 201 bp, Artificial Sequence
  Description of Artificial Sequence: Synthetic polynucleotide
tyggtggtygygttygtgaaatggggaygygggttttgttttyggattttttttagttttygatttttygtatttgtttygagatttaaygtgttyggttygtagygtgttgggtttgyggygttagggtggttygagtttygagattatttgygtttgyggatatagtygyggggtttggtatgaagggttttagggagg

SEQ ID NO: 3613 - DNA, 220 bp, Artificial Sequence
  Description of Artificial Sequence: Synthetic polynucleotide
gyggggygggygattgtygggtttygggttagttttygtttttygtttygttttygatygttyggttttttygttyggygttttttygggttgygtttygyggtttttggyggyggyggyggygggygtagagygyggtatgggygttygggtygyggggtttggyggyggygggyggaygggygygyggttgygggygtaggtgyggggyggygggtyg

SEQ ID NO: 3614 - DNA, 347 bp, Artificial Sequence
  Description of Artificial Sequence: Synthetic polynucleotide
tatygtttygggtgyggyggttttaagyggagatttgagygyggygggtygagttttttaatttgttggygttgttttttttttttyggyggtgygygggyggygttttaaaggggaggattttgyggygygggtaagaggyggygggagygygyggttygggagtgtggttgtagtgygtygggatattagggtttygygtttygtatttaagaggttttygygttttaatttttygygttygygygttygyggatttaggtygaggatygaaaggggtygttygagttttyggggtyggygtttagagagtttagtaaggtyggtygttttgtyggtgtgtygtc

SEQ ID NO: 3615 - DNA, 201 bp, Artificial Sequence
  Description of Artificial Sequence: Synthetic polynucleotide
tggtattaggtttttttatgggtatyggagtaggyggataggggtggggtttygygagygatayggaagggttagtgtggyggagyggattttgtggaggyggggttattgtgtttttgagaagggttttygggggtggagtttattaaggttgygggggygtggttayggagyggagttaataaaagyggggygtgtayg

SEQ ID NO: 3616 - DNA, 201 bp, Artificial Sequence
  Description of Artificial Sequence: Synthetic polynucleotide
ygttttggtatygggggyggyggygtagaggtygggaggaagaaattygggttttggtttaggtygggtttttatttttgygattygygagaggtttaggygggaaaggyggygagtggygttagyggtttygaaagtaaatttggttyggtgttattgttygagggtygtygggygygttttttaattttttygagtttg

SEQ ID NO: 3617 - DNA, 225 bp, Artificial Sequence
  Description of Artificial Sequence: Synthetic polynucleotide
agtgygtaygttgtaggaattayggttaygtttygtygtttaagggttataagygtttttgtatgtggygygattgttagtgtaagaagtgtaatttgatygtygagaggtagygygtgatggtygygtaggtgggtgygggygtgygggagttygggtttagttttagtttttttttttttttttttttttagatggagtttygttyggttgtttaggttgtag

SEQ ID NO: 3618 - DNA, 318 bp, Artificial Sequence
  Description of Artificial Sequence: Synthetic polynucleotide
gttgttaatttattygggagttyggggtatgaayggttayggttttttttatttgtatatgggyggttyggtgtygtagtygttaygggygtttttgtagygtaygtttaagtgygygygttgtygtaattatggygttttgttttggtttaagggttataagygttattgtygttttaaggattgtatttgygagaagtgtatttttattatygagyggtagygggttatggttgygtaggtggygttgygtyggtagtaggttaaygagagtttggagagttttattttygattygttgygygttttgttagggtt

SEQ ID NO: 3619 - DNA, 265 bp, Artificial Sequence
  Description of Artificial Sequence: Synthetic polynucleotide
aggaaggggagygtagtttgtagattgaagttagtggygttgygttgaatgtaattgygygygttygtygggtgagttagygatttgagttaggygggggyggttygatttttttygtttagtttgggttagaggaagtygaaagyggttttagtaaggtgaggygttygaggttgtagaagatygagtagaattttgtagagttygggatgtgttgggttaggtygttgaggatttgattggttttttttttttttttttttat

SEQ ID NO: 3620 - DNA, 259 bp, Artificial Sequence
  Description of Artificial Sequence: Synthetic polynucleotide
yggaggggaggtygyggagggtygggtggaggtttttatygttagttttaaggtttgtagtatttttttttggtttttgtttttagggtygatgtgttttygagygaagtygtygtgtttgggtagaaggygttttaggaggygygaggttttagtygyggygttgttttygtygttattgttgttgtttyggtttygyggygtttagtayggtttygattttttagttaggyggyggtygttttygatttygyggttt

SEQ ID NO: 3621 - DNA, 201 bp, Artificial Sequence
  Description of Artificial Sequence: Synthetic polynucleotide
gayggggtatyggtattaattagyggttygtttyggggttttygyggttaaggygagaaygtaggattaggagtattgttgtttattttttatygtaattygtatatttygggattaygtaayggyggatggggygttygggagyggtttttgtaggggagagtaataggttttygygttttggaggtttggtttgygttt

SEQ ID NO: 3622 - DNA, 323 bp, Artificial Sequence
  Description of Artificial Sequence: Synthetic polynucleotide
ttttygygattttatyggggaaatatygyggatagtygggttagtagygttyggagtttattttaggtttttaaatttgtagtattttttagagygygygygttyggagygggatttgtttgttttagtgtaygtygyggagygaattatygggttggygggggtggaggggtgtaggygtgggggttgygggtygttygggttttgggttttttttgtygtygtygtygtttttygttttyggttaggagtygygygtgaygyggttygtygtaggagtttygaaggygyggygtyggygagttttttttyggtaggygygt

SEQ ID NO: 3623 - DNA, 201 bp, Artificial Sequence
  Description of Artificial Sequence: Synthetic polynucleotide
agtygttttygtatttttygttatagttttygtagtaatygttttagtagtygtagttttagtagtygttttatttyggtaagatgtaggaggyggyggtygtggyggyggyggyggyggyggtygyggtagtygyggtgggtagygtgggaygtttgttttagtttttattttaygggttgggttyggtygtygtygttg

SEQ ID NO: 3624 - DNA, 355 bp, Artificial Sequence
  Description of Artificial Sequence: Synthetic polynucleotide
gygaatataattgttttagttataggygaggtttggttaaggtgtgggygtatttggggtaggttttgagaggtttagygttyggtggtgyggatagaggyggggtatygyggygttygtygtygttttttygtaggtgattatttttttgtaggtgttttygggttttaggtggttgygtgtttgygttatggttgatattttgggygagyggtatttggtgatttgtaagggygygayggtggaggtygaggyggygttgtagaataaggtggtggtattgtatttygyggyggttyggtgygygtygagtygygattttaygtygttgttttgygatttttatayggygttg

SEQ ID NO: 3625 - DNA, 201 bp, Artificial Sequence
  Description of Artificial Sequence: Synthetic polynucleotide
ttygygyggagygattgtgaggggttttgttggaatttggtagygyggaggtttggagagaagttttatgttggtttttatttagtyggttygtttttttygagttttggaagttttatttagtygtgtatttaatggttttataaagttgattataagttttagygtatttttgaaggagttaaaagygaygtaggtgta

SEQ ID NO: 3626 - DNA, 290 bp, Artificial Sequence
  Description of Artificial Sequence: Synthetic polynucleotide
gatattttgtggagtaggtggtttaggttgtygggtttatygtygggygttttgygtagygtttygtyggatattaagtagggagtygtygtyggggtygygygygtygtygaaattttgttttygtygtygtttatygataggttgtggagaaggttatygatygatgttatygagttatttttgaagyggttatatttggtgygtggaagtatgttttttygtgggttygttgtattygttygggygttgttggtgtyggtttyggygygggttgtygygtatagtag

SEQ ID NO: 3627 - DNA, 201 bp, Artificial Sequence
  Description of Artificial Sequence: Synthetic polynucleotide
tagagattgtagttttygtygggttggatgygagttttttaggttagagtttagaagygygttgggatttgggtttggtttttgggtttgtgttttttttygtttggttttaattgttygtatttaagattataataaaaaggtttaggaagtaaattttttggaygyggaagggtyggttygygggttttygtygagtga

SEQ ID NO: 3628 - DNA, 201 bp, Artificial Sequence
  Description of Artificial Sequence: Synthetic polynucleotide
agaggtyggttygtygygygggagatattttttttaaagtggaagygttgygtgggtagtagygygggtygggttttyggattttagtttttgttgttttygagattttygtttygygtygtatttttygagtttagygttttygggttgygttgggygtagtggttttyggttagggygtagtyggtttgggygttagag

SEQ ID NO: 3629 - DNA, 288 bp, Artificial Sequence
  Description of Artificial Sequence: Synthetic polynucleotide
ygatgtagtttagaattygygatttagttyggtttattatagtttttagtagygatattygtagttttygattttttagatygagtgagtttaattaagtygttattygygtgttagtagttgggygtttygattttttagatygygtgagtttagtaaagyggttaggygygygtttgtagttyggygttagttyggatttygggagtygttttygagttygygtggayggtagagggyggttgtagttygggygtaggygtygttggtttgygggtttttttgggt

SEQ ID NO: 3630 - DNA, 212 bp, Artificial Sequence
  Description of Artificial Sequence: Synthetic polynucleotide
ttatttttygttgygggaaggggttgtttggttgtttttgggggtttttagagttattttggtttygggggattggaggaggaggttatttattttgygtygtttttaattygtgtattattatttattaaatagagatagattttgggttttttaaagayggatgattgggggtggtgattggtttatttttaaatatttattaygtaagg

SEQ ID NO: 3631 - DNA, 201 bp, Artificial Sequence
  Description of Artificial Sequence: Synthetic polynucleotide
agtagtagtaggagtagygaygtttagattttygggtgttgtyggggyggtygygttattygtgygtatagatttygtagttaggtygttygggtygtagygggggygtygygggygygggtygggattgagttttygtygaggttattagtaygygttygygtagtygyggagtttttygtattttygtttttttgtttc

SEQ ID NO: 3632 - DNA, 246 bp, Artificial Sequence
  Description of Artificial Sequence: Synthetic polynucleotide
gyggggatattttygggggtttygggygyggtttyggggaagaggyggaagttgaaattgygygayggggatatttgttgaaaggtygtttagttygaaaygagygttagattttagtaataaaaggttaggygaggttatatygygttggagatagagyggttgtttyggagygtaggyggyggttygggygggaagaggygttgggyggtyggattygtagaggggygtgygyggagttgggyg

SEQ ID NO: 3633 - DNA, 201 bp, Artificial Sequence
  Description of Artificial Sequence: Synthetic polynucleotide
ggygttgtatygtttttgyggttttagaggttygygggtgtttgggygygggtggygggygggtygggggtttgygggygtgtttgtgygagagttgtttygygagyggygtagagatattygggygagttgagagttttattttgttttatyggtggaatgggtatattyggaaggygtagttgttttatttttgggagg

SEQ ID NO: 3634 - DNA, 201 bp, Artificial Sequence
  Description of Artificial Sequence: Synthetic polynucleotide
ggttgygygaygtttttygtygttgggggagattagtaaagttattygtttttggatttyggggtttgggtttttagatttygtttygyggygggagatgygtttgagttttttatagayggagygygttttagtttgaygtagagggatgaatagataagygtatygggygggaatttygattgtttgtgtatttggggt

SEQ ID NO: 3635 - DNA, 358 bp, Artificial Sequence
  Description of Artificial Sequence: Synthetic polynucleotide
gatatttagyggttttagggtgaatttygatygtagtygtygtygtttygggtagagtttgygtttttgttttgygtttygggygttgaagtygggygggygatgttygyggygtgaaagygttygyggygggygtygatttttgttttagttttttgtttttttygtttygtttgtttygtgtttttgtgattttggttttggygtygtygtttaggygtttygtaatgtagttgtttttgygtttyggygggaggygttttgtttygygagygttyggggttyggagttyggtttgggggtttagtygagttygggyggggtyggggtygyggtggygatgtatygggttygttag

SEQ ID NO: 3636 - DNA, 201 bp, Artificial Sequence
  Description of Artificial Sequence: Synthetic polynucleotide
yggtygggttttttggagagggagtgtaaggaggagtagtgttttttygaggaggttygggagatttttaaggaygyggagaggayggtgagtttagtttyggggygtttygygtygyggatattgtaggyggyggtgaattaggtygygtggggtygtttgygtttttttggttgyggttgtgggyggygaataygtagc

SEQ ID NO: 3637 - DNA, 201 bp, Artificial Sequence
  Description of Artificial Sequence: Synthetic polynucleotide
gttygggaygygagagggggygygayggyggttgyggtyggttyggygtttatttggtygtttttgygagtagygtttygygtttygttygygyggagttygtatttttyggtygygtygtygtygtyggygaggagtygtattygggygtagygtygttygttygygatgayggtygttygggtyggggayggggaggyg

SEQ ID NO: 3638 - DNA, 201 bp, Artificial Sequence
  Description of Artificial Sequence: Synthetic polynucleotide
agagagaattygaggttgtttttgtygttgaaatttgagygggagagtatttygaagtygtttgygtggagygagtagttttygygttatgggttagaggygttygggagaatttgygggttayggattatattygtaggggtttggyggagtaaggtgtygttygtygtttgygggtaggagtyggttttgggtttyggt

SEQ ID NO: 3639 - DNA, 277 bp, Artificial Sequence
  Description of Artificial Sequence: Synthetic polynucleotide
tygtagagatttagttttgtttgtygattggtttttygaygtygtygtygtgtttgagtttygttgtttgttyggataagtagaatttyggtaggygtagygggygtygaggtttgggttttagtygtggygttygtttyggygtagtggggagtygygggygtyggagaagyggtygygttgtttygggttattgtatyggttgaaaaaattaaaagtaaaattaatatttagaaaygaagtttgygtgttttygggggtttygttttgttttttt

SEQ ID NO: 3640 - DNA, 201 bp, Artificial Sequence
  Description of Artificial Sequence: Synthetic polynucleotide
agttagtggaatyggagggggatttyggaggaatttgtttttgatgtttyggttttttggttttttattagaattygtagaggattygttttggagttttygtgygttttggtagaggtyggggaygttagagtgtaygtagttttttgygygtygagtttaggtttygggygtagggaggatygggttgagagtagggtg

SEQ ID NO: 3641 - DNA, 247 bp, Artificial Sequence
  Description of Artificial Sequence: Synthetic polynucleotide
gtaagggtygggagtttggttttttatgaagttgttttaggtygggattagttttagtttygayggtygttgyggtttygtttyggtagtttygtgagttygyggaggagtttygtattygatygtgtatagygatygagttggygyggttygtatgaagygaagygtyggttttagtagygtagtttgagtaggggattygygtggtaattagggttgygygygagttyggggygattgtggyggt

SEQ ID NO: 3642 - DNA, 201 bp, Artificial Sequence
  Description of Artificial Sequence: Synthetic polynucleotide
ttttygygygtagttygygtagygtttagagtyggayggygtttttyggtggyggyggaggagttyggagggaygtagtygggtaaggtagggygtagggygggyggygygaggygtagggygyggygggtagaggttatttggttattttttttggygttyggggaaggtgyggygatggtyggggygygyggggyggyg

SEQ ID NO: 3643 - DNA, 201 bp, Artificial Sequence
  Description of Artificial Sequence: Synthetic polynucleotide
ygttaggttygttttygttyggtygttygttygttyggtgggtygyggtggtygygggttgygttgygygggtygggtttggygggtygggggttgygygygttygygagggygttygaygygggttgaggggygttggygtgtgttygtaggyggttttgygygggggayggygygtttttggatatygtyggttttaag

SEQ ID NO: 3644 - DNA, 201 bp, Artificial Sequence
  Description of Artificial Sequence: Synthetic polynucleotide
ttttygagtttygygattttttygtttatyggggaaggagattttagygtygttgttttgttttttttgaaygttgtttttgttygatttggagtygtygygggagygttttatgttgyggaaatattgtttttagygttgtyggtyggygtttttttttagttttttttttttggttyggyggttttggaattaaatttg

SEQ ID NO: 3645 - DNA, 356 bp, Artificial Sequence
  Description of Artificial Sequence: Synthetic polynucleotide
aatayggagtaygaatataagtaggtatygtatatttgygagttattygggttttygggggaaggtaaaaagttttaataagttttaagtaagattaggaygtttttatagttttgttttgatagttaaggaaaaaatttgttaaaaattagaggygttgttgagtgttggygtgggaatgttagtttagttagagttttgttttgggttatttaaataaaaatagatatgttggtggtaaatgttagttgaataygtaggagagyggtgtttttygggttyggagaagggtttgtagttgtatttttttttttttttttttttggtttttttagtttttttattattaygattag

SEQ ID NO: 3646 - DNA, 201 bp, Artificial Sequence
  Description of Artificial Sequence: Synthetic polynucleotide
ttaaygtttgtttttattttaagttttgttatagttgttatatttattattgttygygtttgtgtygtygygaggattgggaygtttataaggygygttgygtgtayggtygygtgggtagygtgtgtygttaygtattgtagttttgtygygatagyggttyggtgtatygygttttttygygtatygygygtgtyggtt

SEQ ID NO: 3647 - DNA, 281 bp, Artificial Sequence
  Description of Artificial Sequence: Synthetic polynucleotide
agtttygtgygtyggtttttgtttygttagtttygttatggttttttatttattttygygggagygtttttgtttttttattttgtattttttttagagtygygygttagtttttygtttygtggaagygtttttttttygatttyggttgattttygttygtygtttttttygygggtgygygttyggtttttttttygttyggggygggtttgygtgggyggtgtttygggtyggygggyggagtttyggttttttagttttgygtttyggtggagttc

SEQ ID NO: 3648 - DNA, 222 bp, Artificial Sequence
  Description of Artificial Sequence: Synthetic polynucleotide
gtttaggttatatattagattttattggggatgtgagaagggtgtagygggygtgaggtttygttttygtygttttttgttygtttttagattygyggttygtttggtygttttatttggtygatggygttggtggtgagtataggaaggttattatagttttaatttttgaggtaatggttgaagttyggyggggygaagtygttgtaygaggggtyggta

SEQ ID NO: 3649 - DNA, 237 bp, Artificial Sequence
  Description of Artificial Sequence: Synthetic polynucleotide
ygggtttggattaggayggygaggygggtyggygygygygygaggtggtttttatttatatttagygygagttgyggttgygyggygtttttttgygttaygagttttygygygtttaygagtagttttgygagttygtygaggttaataggygttttaygtttattattatttattttayggatyggygtatyggtygtttttttatgtgtatgattatggtygttttygagtygc

SEQ ID NO: 3650 - DNA, 201 bp, Artificial Sequence
  Description of Artificial Sequence: Synthetic polynucleotide
tttggttttttaatttagtagtgtttttgaatgaaygtgtgatagtttaatgaagtagtygagtattttgatttgaatgttggagtyggggtttatagggggttgtattagttagtataggttgggttatgttattgtgataaagagttttagattttaaatttygtttttgtgggttagttgaggtttttgttttaggtt

SEQ ID NO: 3651 - DNA, 364 bp, Artificial Sequence
  Description of Artificial Sequence: Synthetic polynucleotide
gttttattagtttttyggtygagyggaaggygtyggygtttagttgggttaagttgttgtagttgaggtygaggaataygagtttggtygagtygttgaaygtgtttttttttagygagygtagygagttgtttttgaagtttaggtagattaggtygtygtagaagatgaagaagttttyggggattygttggatgyggttgtyggttattagtagtttgygtaygtttagggggaaagggtttggtaygttgggtagttygyggtygyggtagtttayggtgtgygggtyggtgtaggygtagttygyggggtaygygtgttygggygygagtagtagtagaaggttgtagagttygagygt

SEQ ID NO: 3652 - DNA, 201 bp, Artificial Sequence
  Description of Artificial Sequence: Synthetic polynucleotide
gaaattaattygttagaaaaattttttgggagaggygggagyggtaggggtggtygagtggtygtygttaaaaygyggttttattttggtagttgattttygagatttggtagtaagaygtygygygtatygggygggttgtattygaygtttaagtttagttattaagtttaggagyggtttttttaaggygtgtttygg

SEQ ID NO: 3653 - DNA, 201 bp, Artificial Sequence
  Description of Artificial Sequence: Synthetic polynucleotide
gygtttttttttggggtgggtagygtaggtttggtttgygggtggggggtggagagtgagaggtaygyggggtattagtttagtttttttttggggatttygtattygtagtttaaggaatyggtggagtaygaattttatttttgagttggygtaagygttttttttttatggagatttatttyggtttttttttgaggt

SEQ ID NO: 3654 - DNA, 201 bp, Artificial Sequence
  Description of Artificial Sequence: Synthetic polynucleotide
aggaatyggygttgtyggtgtttgggggtyggggygygggygaagtygggtygyggaggatataataggtagagtygggggtgttyggtygygygtttttygygtattatgtagttttttgttatttttttygtttttaggttaaaattttgagtatgatggaagataataagtagttygygtttygtatygatggggygg

SEQ ID NO: 3655 - DNA, 222 bp, Artificial Sequence
  Description of Artificial Sequence: Synthetic polynucleotide
tgygygygtgygtgtgtggygtgtgtttgggtgttttatgattgtttttygtgaggtygtgtgtgagtttttgygtgggtygtgagtgyggtagggagygyggtgttygggggtygtttgtyggtgtgtttgtgygtgtttgtgygttagtttttgtttttgygagtgygtatttttaggatygagtttgtttatatgagtttgtgtttgtgtgtgtgygtt

SEQ ID NO: 3656 - DNA, 201 bp, Artificial Sequence
  Description of Artificial Sequence: Synthetic polynucleotide
gataataagatttgttattgaygttatygggttggtgatatttaggtatagtagttttagtaaaygaatatatttttatgagaattaagttttttgagagyggtaagttgttttgttttgtttatagttgataagaataygtttgtayggttatttagtatttagtattgttatttaatygttttattagtatgtatgaat

SEQ ID NO: 3657 - DNA, 265 bp, Artificial Sequence
  Description of Artificial Sequence: Synthetic polynucleotide
aggygtataygaggagttyggtttagtatttttaaattagatttyggaggygtygttagggagyggttatygttgggygtygtygagygtgttyggggygyggtygtggygggttttttggggyggtagttttaggygygggygygtagtagtttygaaggygtygtttggtttagtygttyggttttygagygtygttgtaagtggggggygtttygyggygtygygtatattttattggggggtygtttygtyggygttygtt

SEQ ID NO: 3658 - DNA, 242 bp, Artificial Sequence
  Description of Artificial Sequence: Synthetic polynucleotide
tygggttgttttygtygtttatyggagagggtygttygggtgtttggttttgttygaaagtttttgggtttttttttttttttgtaaaatttaaagtaatygaataaaaagagtttaggtygygygggygggttgygygttygygttttgtagygygtyggygggggttyggttygyggggttattgtattgagtygggtagtgtgtggtggtggtggtggtgtagygtygtyggygggggc

SEQ ID NO: 3659 - DNA, 201 bp, Artificial Sequence
  Description of Artificial Sequence: Synthetic polynucleotide
ttttagggygtagggttaygagttttygtttttattttyggtttttggtattyggygtyggtttygtygtttttttttataygtatttttggtagggtttygyggggygttttaaagtttgggggtagtttttaggtgtttttgggaagggaaagaaaggttataaagtaaaagaaggagtaaagagaaggygagggagga

SEQ ID NO: 3660 - DNA, 261 bp, Artificial Sequence
  Description of Artificial Sequence: Synthetic polynucleotide
tygtttatygatgagtygtygtygttygygttygggtgtaggtgygtygtygtygygtgtaggtygttygygtgtgtatgttygtgtgygtgttygtgggygtttagatgyggyggyggygayggttttagttgygtttygtggttattttygtgtagygygtggtgtaggttyggtttygygtygttatygttygtygttagtatttyggttaggtygtygtygtygtttttygggtaggtygtttgygygtatagttyg

SEQ ID NO: 3661 - DNA, 201 bp, Artificial Sequence
  Description of Artificial Sequence: Synthetic polynucleotide
yggtgttttgggtygagtygtttggagattttagattagtatgtgggtgggaaagggygtttygttttgggttttttygtttttgygygtagagtagagaygygtagattygtttttatttygtttggtttttttggagtagtttyggyggyggtagygatgggttgggaggggtyggtaygttggtttgygygggttttt

SEQ ID NO: 3662 - DNA, 337 bp, Artificial Sequence
  Description of Artificial Sequence: Synthetic polynucleotide
gaattggataataatgtggygtttgttattggttaggggaggtagayggygttttgattggtygggttygygttyggggagtttygtattttgtagtgttygaaagattygaaattttaaaagttttattgygtgtttttgggaggggagggggygygttaggaaaggagtggaaaaaagtgggygaggaggagygttgaaaattttttgataagtagttttygtgygttygagagygtgtgaattgtttttaattatygtgttyggtgygtttttttgygtagatttgtgtaatttttyggtttttggggygtyggttyggttgtatygtttttat

SEQ ID NO: 3663 - DNA, 201 bp, Artificial Sequence
  Description of Artificial Sequence: Synthetic polynucleotide
tgaagttgttttttygggataggaagggttaaatggttgygygttaattyggtttygattggggtgttagggagtaagagtygtttgtttygggggatttygtttggggggtttttaggggtygttttggygtttyggttataatttgggyggttttgtgyggyggttttygtttgygtttttgygygttatttaaaattt

SEQ ID NO: 3664 - DNA, 201 bp, Artificial Sequence
  Description of Artificial Sequence: Synthetic polynucleotide
tagtaggtagtgygggtatagtgttgtagattattatttygttaggttygggtagygtttattagayggataggygttygyggtygtttttatttyggygygtttatttygagttttttaygtygyggygggygggygtaatatatttttttatttttagtygtygaggattatatttttygtttagttttttygatttat

SEQ ID NO: 3665 - DNA, 201 bp, Artificial Sequence
  Description of Artificial Sequence: Synthetic polynucleotide
ttttgaatygttatttgtttattattygggygttygttatttattaggygttgtattagaggygttatayggygggtatgttggygttgttttgggygttygttttgggtttygtgttgttgttttygttttgggtatygyggttyggygtygygttatygygagtttattattyggygttgttggtygtygyggygttgt

SEQ ID NO: 3666 - DNA, 201 bp, Artificial Sequence
  Description of Artificial Sequence: Synthetic polynucleotide
gtttygtgygtttagttttgtygggygtyggygaygyggyggtygttgtygttgtygttatagtygtgttygtagtgttttaggygtaattgggtattygygtygygggttagtattggtaatttagtyggggttygagggaagyggagattttyggttttygaygtttttgggtatygtygttttttttttttttagggt

SEQ ID NO: 3667 - DNA, 386 bp, Artificial Sequence
  Description of Artificial Sequence: Synthetic polynucleotide
tgtttgttgaaaaataatattgtgattatttttagyggygaagggtgtgtttgggaayggtttggggaggggatagaagagagaggggtgggatggayggyggtagaagtgggaggtataygaggagttattggaaayggygtttttgtggaggagtygggggggatggggagtagagggagggggttttgttgttttagygtttygaggtygtggagyggtagtagttgtagtyggagtagtattagtaatagtaatagtgagygggayggagttaggatygttyggagygtataggtttygaggtagtataaggtttgttatttttttatttgttggtagttgtagaagaagatttgttttttaagtgaaaygtatatgttatt

SEQ ID NO: 3668 - DNA, 201 bp, Artificial Sequence
  Description of Artificial Sequence: Synthetic polynucleotide
aggttatataggggtygggtgtaggttttaygyggaaaggygygtagtgttyggggtttatgtyggtttagggygtataggttttyggggtttyggggttygygttgttygygtygtttgtgagygttygttaagggggagggatttgggygygggggygyggagttttygggagyggygygygtygyggggggygggggg

SEQ ID NO: 3669 - DNA, 201 bp, Artificial Sequence
  Description of Artificial Sequence: Synthetic polynucleotide
tgttagggygtagggagggyggtattyggttttagttttygtaatttygygygtttttttygtygtgggatttgggttttygygtygtttttttgagtttygagygygyggygggygggagttaggttgggattggtggtgaggtagggagtgaggagygagyggagtygygtgygtyggygygtagtttygggtygtttt

SEQ ID NO: 3670 - DNA, 309 bp, Artificial Sequence
  Description of Artificial Sequence: Synthetic polynucleotide
tttgggtygyggyggtttttatttygttatygtygtygtygtygtayggttgttygtygygaataagtatyggtattattaygygaygtagtaggtygggygyggygtgtagttyggyggatgttgttaggttaggygatttygtygtttttggagygygagygygttttagtttgtagygatgattttggaattagattttgatttgygtgggygtgaggygaagtaggttygttagttgttygygttygggygtagataggtatygttgttgtyggaagygtygttttaattttagygtttgygttt

SEQ ID NO: 3671 - DNA, 203 bp, Artificial Sequence
  Description of Artificial Sequence: Synthetic polynucleotide
tattttgttttyggtyggtgattygttgtggtttttaggttaagtgtttttygtgttygggyggttgaygttgtttgaagtttaygyggygtgtyggygaygyggygtygtggtggttaaggttgggtatttttaygtygtttggaagttttyggggttagattagtgygayggyggttggttggttgayggtagtgtgygtt

SEQ ID NO: 3672 - DNA, 388 bp, Artificial Sequence
  Description of Artificial Sequence: Synthetic polynucleotide
atygggaagtagttyggtgttttaagttttttgagatttttyggatttgygygtygttygttyggtagggggttyggtaggygygggyggygggtgggggygggaggttttgttygttyggtggttgtygyggtttttttygygttgttttttaygtttggtttattatgtaygaggtaggtaatttgttttttttttyggggatttatttyggagataagaaggtagtttgttttttgtaatggtttttgttggagtgyggyggggtttaggygygagygggggtaygggyggggagttggtagygaaggatgygttyggygtttttyggyggtygttyggagttygaggtyggygygggaggagygttgatttygygggtygagtt

SEQ ID NO: 3673 - DNA, 241 bp, Artificial Sequence
  Description of Artificial Sequence: Synthetic polynucleotide
gagggyggygygtagyggygtttygygaggtttttaygtygggygatatggggtgtttgttgtttttgttgttttgggygtttttttaggtttggggaagygttgaaggtgggtggaaygagggygtttgagtgtattygygggagggyggagagagggagttgggtagggayggggagggtaaygtttgatggggattggtgagattygggaygtattggygygatttaggtagaaaatt

SEQ ID NO: 3674 - DNA, 232 bp, Artificial Sequence
  Description of Artificial Sequence: Synthetic polynucleotide
gggttttttatttgtatttttttataaaattgtygttygtgtgtgtttttgygtttggttttttgtatttttaaggggtttttgaagatagggtygaatgygygygggggttttaggtattttgygttttayggygggtttygtagttyggttygagtyggttttggaagtttygttttggattagattggtatygaygtygtttttagtttgagygttgagagggaaaayg

SEQ ID NO: 3675 - DNA, 214 bp, Artificial Sequence
  Description of Artificial Sequence: Synthetic polynucleotide
gaattttttttagtgtygtaattaggaaagttttaaaaagtaaggattttagatagataagagatttatttttttttttagtataagaaatatttygygtygygttagtygaaygttgttygtataaggttattygttttttttggtygggaygtattyggtgttttttagttttttattagaattggtttagggggygyggaaatagagaggt

SEQ ID NO: 3676 - DNA, 250 bp, Artificial Sequence
  Description of Artificial Sequence: Synthetic polynucleotide
agtagggattagttggtygtyggtttttygggtaagatggggaatygggagatggaggagttgatttygttggtgaatygtttgtaggaygygttttyggygttgggatagagttgtttgttggagttgtygtagatygtygtggtgggyggttagagygtyggtaagagttyggtgttygagaatttygtgggtaggtaagygygtagggygyggagtaaggatgyggtagtggggygatttygttgyg

SEQ ID NO: 3677 - DNA, 201 bp, Artificial Sequence
  Description of Artificial Sequence: Synthetic polynucleotide
ttaggattttgtagattyggtygyggtygggtygagtgtttttygtyggggttttaygtttayggtttaygtttgtaatattagggttgtayggygggttygtagttgggtttgygtttgggattyggggttttttgygtttttygtgtygtattttttgttttaattttaagyggaygggttttggggttttatyggtta

SEQ ID NO: 3678 - DNA, 467 bp, Artificial Sequence
  Description of Artificial Sequence: Synthetic polynucleotide
tygtttttttttaygttttttttttygttttttttygygtttagtttygttttttttattttgtaaaataaagtyggggaaaatgtttgttygtgtagttyggagygygtagttygtttttgaataagaagtgagtataatggygtgtttgtaaaaaaaagttttaagttygttttttttaaaaaatattttgaatgttgtatgttttatgttttttagygtttygygggagagattyggttatagagtaggaggtgagatttttttttyggtatttttatttttttggtygtaygtttttttgttttagttttttttgggaggattgtaaatgtttttttttagtaagyggtygttttttattttygtttygygtttaaagtgttgggttataatttggatttggaggtaaatttttgttagattttttttaygtygttttttttttttttttygtyggtgttygg

SEQ ID NO: 3679 - DNA, 201 bp, Artificial Sequence
  Description of Artificial Sequence: Synthetic polynucleotide
ttygaggggtttatagtttggtattaatttgtaggtgttygttgttgatttggtttttttttygatttgyggayggttttttttagygattttygatataygtttttttgttttygtyggagggtygggtttggggtygtyggagtttgygggaatttagygtttattygttgattttygagtygtttygttagttgtgyg

SEQ ID NO: 3680 - DNA, 232 bp, Artificial Sequence
  Description of Artificial Sequence: Synthetic polynucleotide
ttggggtgtttttaggaagtgaaggaaaaggttttygaygatattgttattggaaaagtgttggttayggttttygttttattttttttatttaygggttyggagtttttaggagtagttagatygattatygtttttgtagttttatttgttttyggagagatatttataagttagtttayggagagtttggattygttygttttagtatttaygtttttttygygttygg

SEQ ID NO: 3681 - DNA, 222 bp, Artificial Sequence
  Description of Artificial Sequence: Synthetic polynucleotide
ggttagggatagtaaaggagataygggtgggtgagaygtyggattttaygagggtttgttgtttttttggygygggygtggaggtattggttagagggtaygtttattagttygagattttygggatgaggttattttttgagtttatatttggatatttattttttygaatgyggtgattttatttatattatagyggttattagygggtttgagatygtg

SEQ ID NO: 3682 - DNA, 239 bp, Artificial Sequence
  Description of Artificial Sequence: Synthetic polynucleotide
ggtttttaggyggagygygggygygaggtgygggtttyggggyggagygtaygttygggaggygggaagtgggtagtagygttttygtttggtttttgtgygtttygattygaygttttttygttygattaggtgtttygagagygtatagttgggagggttttttyggtygyggygagatttaygtttgyggtgtgttagggyggyggygayggtgaygggygtggggygyggygttg

SEQ ID NO: 3683 - DNA, 209 bp, Artificial Sequence
  Description of Artificial Sequence: Synthetic polynucleotide
ygtttygggggtttttgtattttagtyggggaatgttgttattttgaggggggttgtttggttgyggggygtyggggttgggggtattgtttttttaggaygyggtttygtagtgtagagygtygtygtttgygtggggggatttggtagttttaggggttgttttgagttttttggygagtaggagtgagttgttgyggygagtgagt

SEQ ID NO: 3684 - DNA, 380 bp, Artificial Sequence
  Description of Artificial Sequence: Synthetic polynucleotide
gaggtygggtttyggygattttygagggaggttygggaattattttygatttaggygttagattyggagtygtayggggtttttagtttagtttygygagyggttgttgatygtttttttygygttygttagggtttttgtttygygttagttatygygygttttttttttgtttatgtygtagttttygtggtttttgttttggattygggatgttaggttgagataygttttgtaaatttttggtagaaatgggygtaagggggtggatttygttttygtttttygggtttttttttttttttygtttatatgtttttttattattttttttttttttttttattgtattttgatgaaatggttttgtttgtttaaat

SEQ ID NO: 3685 - DNA, 394 bp, Artificial Sequence
  Description of Artificial Sequence: Synthetic polynucleotide
ygggtyggtagggattaagagtttgaaagggaatttgttttttttttttygtagttyggttattaaggtaagaaattgtaggtagagaagttttygaattygatttaggaygtyggygtttgttaggattttttygtttgtttttygygtttygygygygtttatgttattattayggggagggtgtatgyggtaggtgtttggtygaggttttygggagygagtygtttttaygtgttttagtttgtttttttttygaagttagaygttggygttgtagttttgttgtttgaygttgttgtagaagttygygtttattygggttaggtttggggagggttttttggggyggtttttgagttttatttgttygaagtttttatggggggaggtc

SEQ ID NO: 3686 - DNA, 201 bp, Artificial Sequence
  Description of Artificial Sequence: Synthetic polynucleotide
tttygttygggttttttaaatatgtygtagygtggttgtttattgttttttttgggtaagaggaggttttagatatttttaygggatttgaattttygagygttttgtayggagtagttatttygttagtattttaaagtgaagttgtttataayggataagttyggagattttatgagaggtyggggtggagaagtyggg

SEQ ID NO: 3687 - DNA, 557 bp, Artificial Sequence
  Description of Artificial Sequence: Synthetic polynucleotide
gtygttatygtttagtttygttgtttaggtgggaggggttatttgtygyggggtttttaagttagtgtygtttgttttyggtttttatttattgatagtayggygttygagtgattttgtttagtttygttttgygtttttgtaaattaygttgttgygttaattataaatttggttaatatgtttttgtaattttattatttaaaaaygtttttaggtatttggtygttgttagattaggttygygggttyggaggaggtttttttatttgttttygttagtttyggggatygtgygyggttttygtgtggttttygtttaygaggtttttygggtaggaatygtygygygatttttgtttagyggtygygttttggttaygggygatttttgtygggaattttgttttyggttaagttgygttttygtatttyggtggtttttattygagttygygtttgttggttttttttttggtttttttgtttgatttygattttgttttygaattttatttttagatttttttygttttggaaygtygatttttttttyg

SEQ ID NO: 3688 - DNA, 212 bp, Artificial Sequence
  Description of Artificial Sequence: Synthetic polynucleotide
agttgggtttttttttattttaaaatttttatttttagtttttaaaagttattttagttygttatattgaaattggtayggtttttaaagatttttttttygtagttgtggygtttttaagaaaataygagtayggattaggttttggatgagtgttyggttatygagaattagttattttttattttttaggattttttagttttttttag

SEQ ID NO: 3689 - DNA, 201 bp, Artificial Sequence
  Description of Artificial Sequence: Synthetic polynucleotide
tttttaatggtttagtygatygtgtgtataaatttgygttttattygtyggggatygttgggagyggagataaatttaatttttagggtaattttggtttygttygttttattttattttgtgtttaaatagagttttttttgaagttgygaatatttttaggttttttgggtagggttggaggggtygaggagagttatt

SEQ ID NO: 3690 - DNA, 201 bp, Artificial Sequence
  Description of Artificial Sequence: Synthetic polynucleotide
ttttggataataatgygygttttygtttttttagaaagttagggaygtttttagtygtygttagagttggttyggttttttagttttttttygtggtattygtaggygagataaagttygttttyggtgaggttgygygygtttaaagygtgygggatgtttagtayggaggtttttaagygggggatttttggttttttt

SEQ ID NO: 3691 - DNA, 294 bp, Artificial Sequence
  Description of Artificial Sequence: Synthetic polynucleotide
ggtagatgaygattygtygagttygtygtttgttttttyggaggygttyggagttgttgygggtttyggtygtygttgttattgttgttgtygtygtygtygtgyggggttatttgaaggttggggygyggaagtttaatttygtgttgattgggttttaagttttttgygttttygtttygtttygagtgttygygaatttttyggaygtttaygtagattatttagttatattataattttgtttgyggagagaggagaggagaaaaaggggtygttttaaaaatttttaaa

SEQ ID NO: 3692 - DNA, 244 bp, Artificial Sequence
  Description of Artificial Sequence: Synthetic polynucleotide
tagttttgagtyggttgtyggttaggtgttgggtatattygygtygtygtygtygttygtttttggtygygttagtygtagggttttyggygttygggggyggtagtaggttggagygtatygtgygygttttgttttttyggygttttygtygtttyggaggttygggtttttyggttttygtyggttttygttttatggtygygtgtygtygygttyggttttttygtygtttaygttygtt

SEQ ID NO: 3693 - DNA, 303 bp, Artificial Sequence
  Description of Artificial Sequence: Synthetic polynucleotide
ggtttggggttatgggaataggattaaggttttttgagygtygggtttggtttttgtggtttygtaaattttttagtttgtgtgttayggygaygygtagyggttgagtyggagtttaygyggygygygtttttygygaggaatttttyggtttgtaggttgtttgttattttygtttttygaygygtttttttttggttygygttttyggagttttttttttttttggygaggatttttttyggygttygyggtttygattttygtygygttgygttygttttttyggtttyggttgtttyg

SEQ ID NO: 3694 - DNA, 286 bp, Artificial Sequence
  Description of Artificial Sequence: Synthetic polynucleotide
aatagattttygagttgaaaaaataaaaataaattggggagttagagtttttgaaagtttyggtaggaaatttaatgggttttttgtttttttaaattttygttttygttttygttgatattttgtaaagtygyggyggtagyggyggggattaygttgyggtgtattatttttygttattttttygygttgggttggggtygagggggtttygtagagtyggtaatygaatyggttttggtttgttttttttattttttagttattattagaattagttttygyg

SEQ ID NO: 3695 - DNA, 261 bp, Artificial Sequence
  Description of Artificial Sequence: Synthetic polynucleotide
tggttgtggaattagatttgttttgaatttagtggagygtatygttggggttyggaagttatygttygygggtatygggttggygttgttygagtggaatygatagtttgygagtttyggttgtaagtggtttttttttttygyggttgttgtttagtgtygggtgagggttgygagtgtggtaagttgtaaagagagttttagaggttygaagagygttgygtttttattygygttygttttttttttttttyggttttt

SEQ ID NO: 3696 - DNA, 201 bp, Artificial Sequence
  Description of Artificial Sequence: Synthetic polynucleotide
gaaygygtagagagttttttggagtgttttgattttgttttygagagggtttttaattttygtatttttttagtggttgttttggtaggtgygygttttgyggggagttgygtttygggggttatygtygagygggagttgttttttggaattttgtttatygygaattgggtgtttattttttatttttgttttttagtg

SEQ ID NO: 3697 - DNA, 201 bp, Artificial Sequence
  Description of Artificial Sequence: Synthetic polynucleotide
tygygttttagtatygagtgttttaagttttgygygtagygtygggtttggaaggyggygaatggttgtttagtygtygtttttattagtgatattyggtygttagttttygtttaggatgtgtatatttgttggtagtattggttygggtggtagttatygggttatttattttataggtataatygtatttaatttaat

SEQ ID NO: 3698 - DNA, 201 bp, Artificial Sequence
  Description of Artificial Sequence: Synthetic polynucleotide
gygtttygggaagtgtatggttttaaggtttaaggygttaggatttaggtttttagagtttttaattagtgttattttttttygtagygygggtgttagtygygagttygtagtttttygatattygtttttttttggggttttyggggatttttttagaggttgtaaaggtgttagaagtttaaggtaggaggtagtttg

SEQ ID NO: 3699 - DNA, 201 bp, Artificial Sequence
  Description of Artificial Sequence: Synthetic polynucleotide
tyggygtygtygttgtygttygggtttygygattygggtygggttgtgggygygyggtaggygggttgyggyggyggygggayggggyggtygygggttgygtggggtttgtgygygygtgtgygygggygtyggttgtgygygtygygggyggatagggttyggtyggyggyggtaaagttgggattygygggtygggyg

SEQ ID NO: 3700 - DNA, 201 bp, Artificial Sequence
  Description of Artificial Sequence: Synthetic polynucleotide
tgtttyggttgatttygttttgtagttagtttgaggttaggyggtygttttttgtaggttataaattttyggygtaaaagtagggttttgaaygygatatygtattagagygtttagttaagygagttgtttttatttttattgtgtygggyggygtaaattgygggygtaggtagaggagtygyggttttgygtygggyg

SEQ ID NO: 3701 - DNA, 201 bp, Artificial Sequence
  Description of Artificial Sequence: Synthetic polynucleotide
ttgyggaggggtyggtgggttagagttaggttaggtagttgttgagtttttttttttttttttggygggagtgtgtgtgtaaggggttagggggyggagtyggagaaagggttgggggtgttygtgtttagygttttttyggaygyggttttataatttagttgygagaatagatggaygtagyggyggtttatttygggg

SEQ ID NO: 3702 - DNA, 201 bp, Artificial Sequence
  Description of Artificial Sequence: Synthetic polynucleotide
ygyggtttttygtgggttggtygggttaatgagygygyggttgtaggggyggygggyggggagggggygtygagttttgyggatggaggygygggtagygyggygygtttatttygygygggygttgttggyggggggyggygtagttattggattyggatyggggtygygattyggggtggygggtggygtgggyggygt

SEQ ID NO: 3703 - DNA, 201 bp, Artificial Sequence
  Description of Artificial Sequence: Synthetic polynucleotide
ttygtygatttttagaggtatyggttgygttttttggtggtttggaayggygyggagggtaagtttgttgtgatttgttaygatygtatygygtagtagtygtagyggygygagggggttyggttggggttggagtataagttygaggtygtygtgttttygtttagttgggtyggtyggttttyggtygyggggtttygc

SEQ ID NO: 3704 - DNA, 344 bp, Artificial Sequence
  Description of Artificial Sequence: Synthetic polynucleotide
gtyggttagagggtttaygtaagtttygaaattyggggggaygttttttttatttttatttttgygttygttyggggttgggygygtyggggygtaygtaygtyggtttgttggygatttggygtatttgttygygygttttggttttagttgtygtaggttttttttgtatttatttttagtttttaaagttagtgtagttagtatygtttatttggagttttaatttttttttgygattttygtatatttattgtattttatttattattttygggtygygtaggttygggtttgygaagataygyggtttattttyggttatttygtttatttggttaaag

SEQ ID NO: 3705 - DNA, 201 bp, Artificial Sequence
  Description of Artificial Sequence: Synthetic polynucleotide
attttttttygyggygttttttygygtagtttttagattgtttagtyggtgttygygggygttygttttttgygagttttaggttygygygagttgtttgygggaggggtyggggatayggatagaygttgttttattagggattyggaggatttggtgggtaagagtatgatttagygattttygtttygggtaagygtt

SEQ ID NO: 3706 - DNA, 218 bp, Artificial Sequence
  Description of Artificial Sequence: Synthetic polynucleotide
attatttttttttttgtttaaaggattttttttttttttttgattttaygaatttatttttttaataggtttttaaagtatgggyggatgtgttttttttygtttatygttaggagtygagtttyggtaggtgagyggtgtaaaataygtatttagttgtttttagtttttttygttttygttgagttggttgtttttatttygtattayggtattyg

SEQ ID NO: 3707 - DNA, 234 bp, Artificial Sequence
  Description of Artificial Sequence: Synthetic polynucleotide
gygygtttygtgygttttygtttttygygygttttyggtttattttygtttttggagagttgtygtttgygttygggygygyggttggttgttttttyggyggyggyggyggyggttttattagyggagttttygtttatgattggtttygttygggaagttggagaygggygatgaataattgatgtgtgyggtgyggtagtyggayggyggyggyggtggygggtagtagyg

SEQ ID NO: 3708 - DNA, 201 bp, Artificial Sequence
  Description of Artificial Sequence: Synthetic polynucleotide
ygggggtattygggtaggggtgttagatatagtattgtatttggtaatttttyggggygtttagtgtggtttttttattygggagtttggaagggtttttygtagttygtaggagaygtagygtttttygtttagggggagtaggaggatagttggtygttttygggagttttaggygygaagyggttttttttygtttta

SEQ ID NO: 3709 - DNA, 201 bp, Artificial Sequence
  Description of Artificial Sequence: Synthetic polynucleotide
agttatagtagtygtatttttygtagygygtyggygtttagtgtagygtttttagtagtagygttagygyggtygttygtaygttttttttygtygtygtygttygtatggttgygttttttttaggtgygygtygygtagtttttygaygttyggtgttyggyggtttaggtgtttyggygtgygttttyggttttgatt

SEQ ID NO: 3710 - DNA, 235 bp, Artificial Sequence
  Description of Artificial Sequence: Synthetic polynucleotide
tttygyggtttgggggaygggagaatggggggtttayggtygttttgggtttttatygygtatygygttygtagyggagtttyggagttatggttttgagygagttggygttggttygttggttgtaggagagtygtygttygyggaagtttattttgtttatygtgtttttggygttgttgttggataatatgttgtttattgtygtgggtaygtgyggatagggtatttttgt

SEQ ID NO: 3711 - DNA, 201 bp, Artificial Sequence
  Description of Artificial Sequence: Synthetic polynucleotide
attygtttattttttatttttggtttatttatygttatygatatttgggttatygtttttaaggtaygtgttaygtygyggaattgtagygygtygttttygtygtattttttattgttttyggtttgtttygggtgggygtttggtaaggtttgggyggaggttttttyggttygygggttagygygttttgttgggaaa

SEQ ID NO: 3712 - DNA, 241 bp, Artificial Sequence
  Description of Artificial Sequence: Synthetic polynucleotide
gttaataaygggygggtttttatagttygaagttaaagygttaaaattygagggaaggygaggagggggyggtggyggaggyggttgyggggtyggggttyggttgagttttygtttgtttaattttatttgttattgtaygygtttaatygtygtatatttttygtatttaatttggatgatattttgattttattattagtattyggygtyggattgaygtagtttygagtyggggatt

SEQ ID NO: 3713 - DNA, 201 bp, Artificial Sequence
  Description of Artificial Sequence: Synthetic polynucleotide
ggggtatttgtatyggggttgggygggygtatttagagttaggygggtaggaatttttgygtagttattyggtgtttgtatgtttttggygyggaagggaygttttattagtttyggygttttttttttttagatttttttttygtttttttttattgtttgtttgttgtattattttttatttagattatttagatygtt

SEQ ID NO: 3714 - DNA, 201 bp, Artificial Sequence
  Description of Artificial Sequence: Synthetic polynucleotide
ggtyggygygygtgggtttyggygaggyggygttgtaggagttttgygggtagttggagygttatttgggygyggyggtttayggttgtggyggygttatygtgygygaygtttttttygyggttaagggtygygyggtygattgygagagttygygygagtttygggagygggttttgygygtttgatgggtygaggygg

SEQ ID NO: 3715 - DNA, 217 bp, Artificial Sequence
  Description of Artificial Sequence: Synthetic polynucleotide
tyggyggygagygttgtattattttaygygggygtygagtyggggtygggygtygygatyggagggattttttgtttyggygagttagtttyggagttttygygtagygttygygtygtygttgagtttttttagttttttatttttaaaaaagttttttttygtgtgtgtgygtgygtgygygygygygygtygttttggtataagttagttttga

SEQ ID NO: 3716 - DNA, 201 bp, Artificial Sequence
  Description of Artificial Sequence: Synthetic polynucleotide
tagggtttygatttttygtggggtaygygygatttyggygtagatgttagttygttgtttttygggttgagggagygaggattttagaygattttagggtygttgtttaggtttagtttygygttttttatttygttatttygttttgyggttttagtttggagatttayggattttattgygattttttgygtagtgtag

SEQ ID NO: 3717 - DNA, 201 bp, Artificial Sequence
  Description of Artificial Sequence: Synthetic polynucleotide
taaatgggttaaataggttygtaaggttttygygggttttttggttyggaagttgagtygygggtgtttggtttgaagtttygygttttatagtggttygygggtttyggyggtttttgttttaygttttttaaggtattaggtaggtggttttagggtttttgtttaygatattttttgggtggggtaggattatttttt

SEQ ID NO: 3718 - DNA, 201 bp, Artificial Sequence
  Description of Artificial Sequence: Synthetic polynucleotide
tgtagttygttyggyggygttttygggygagggtttggtgttggggagygagygyggagygaggtgtttttttaaataygttttgtagtgtgayggyggtygttyggttggaagagttatttttattttgyggtaggagttygttygtygttatygttygtttyggtttttatggttaygygtttgttttyggtttygggt

SEQ ID NO: 3719 - DNA, 317 bp, Artificial Sequence
  Description of Artificial Sequence: Synthetic polynucleotide
ygygttttgttattaggygttgtagttgttggtygagttttgtgttygtggggttttggagtaygatagttgttaggattttatttattatttgygggatygtgttagatttyggtttygygatttaggtgagtgtygttatygtygtttggagggatttaagggttttgggttgggatttggggtygtatyggggtttgaggtagaatagygaygyggattgggagagggyggggggyggttatygagttaggagagtgattaagaattagygtattgtggtttgatgttgtaattaggyggggattygggyggtg

SEQ ID NO: 3720 - DNA, 221 bp, Artificial Sequence
  Description of Artificial Sequence: Synthetic polynucleotide
tttgtattgtggagtaygttatgattgtttayggtggtygtaggtgtagaygttagtyggaatyggaatyggaatyggagtaygggttgtygttttygatygaatygygggyggygyggayggygtygygygagggataaggtgygygaggygtaygtatttttatttttattgtygggagttgatttgtttttttygygtggttattygtygttgtaaat

SEQ ID NO: 3721 - DNA, 201 bp, Artificial Sequence
  Description of Artificial Sequence: Synthetic polynucleotide
tygagagttttgyggygttygtttttttgttggyggaygtgttttttgagtygttttygygtaggtaagaggttgtygtttttagygagggagagagtagyggygattttatttagttatyggaygtygtttygtagtgttttgygggtgygaattttaattygatatattaggtgttttgaggggatggtggtygtttat

SEQ ID NO: 3722 - DNA, 201 bp, Artificial Sequence
  Description of Artificial Sequence: Synthetic polynucleotide
gtaggggagagygagtatgtttttgtttygggygtygtgyggtygtagtagtagygyggttttttttagtgygagtygtgtttggaatgtttygggtaagygaagggttagtaagygaggygaaayggatattataaagtagagagtggtgtgagttttttygttttttgaaaagatggtaagttttygtttygggaaggt

SEQ ID NO: 3723 - DNA, 201 bp, Artificial Sequence
  Description of Artificial Sequence: Synthetic polynucleotide
gagttttaygtygtygtygtygygttagyggtggggggygggttgggggyggggyggtyggggttgttttttygggygtatatgygagygtagtattyggygttgtygagttatttttttygtygttygttagtaagtttggyggttttaagttaggygygttttaggatttaggtttatttgtttttatttagtttyggt

SEQ ID NO: 3724 - DNA, 201 bp, Artificial Sequence
  Description of Artificial Sequence: Synthetic polynucleotide
gggtatagttayggtaatttttagtttgttaatgttaaggygggygygtaaggtygtttaaatttagatttttttttttatttattttaaaaaataataaygtgttagttattttygtagatatygtyggttggtgtttgtttaggagaygttagggttagagygttatttttagtatygaaatggtagagagaaagygta

SEQ ID NO: 3725 - DNA, 230 bp, Artificial Sequence
  Description of Artificial Sequence: Synthetic polynucleotide
tyggtgttttttttyggtygttttatttagtaatttttygtgttttgtttttygattggaaatgttttayggaagygttttggatagggttttygttaggygataagagttyggtgttgagatgtgttaygtttttatttttttattaattatggatggaaataaataaggaagagttaattttgttgagtttttttttyggtaaygagaggygttttgtagtygggagg

SEQ ID NO: 3726 - DNA, 201 bp, Artificial Sequence
  Description of Artificial Sequence: Synthetic polynucleotide
gttttttygagttggtygtttttgtagatttttaygtttagttgttatagygtygtttygattttttygttaagtatattttgtattgtaaggttaagtayggtygtyggtttgggatttagtgttatygggaggaaaagagagagatttggggttggggtatggatgatggggggaagggyggtygtttttgttattgtt

SEQ ID NO: 3727 - DNA, 201 bp, Artificial Sequence
  Description of Artificial Sequence: Synthetic polynucleotide
tygtagaygtyggaggygttatggtygttaagttyggygagttgatgggtatttgttttagttattaggyggtgatgtygtatttygtgtgtttggtygaygagttttygtagttygtgyggttygttaagttgtttaagggtyggggtyggttgyggyggtygygttagtttygttttaagaygtagtyggtgattttyg

SEQ ID NO: 3728 - DNA, 201 bp, Artificial Sequence
  Description of Artificial Sequence: Synthetic polynucleotide
gtagttttaggaagtygtagtygtygtygtygtttaggtagagtagtagygygygygtggygttggtgygtaggttgaagttgagttygtygttgttygtygygttygtttagygygygtagygagtttattgttyggggtygtygtygaattttaggtygttygygygygtygttagygttagtagtagtagtaatagta

SEQ ID NO: 3729 - DNA, 201 bp, Artificial Sequence
  Description of Artificial Sequence: Synthetic polynucleotide
aagtttttattttttggattygggtttggygttttygttttyggygygtttttattyggyggaygyggtygygtataaggtttagtayggttygygttttygtagttyggtygyggttgaatatttttagygygaagygggtgggygttagtagtttyggggayggyggtttttaggtttgaaagttggyggttyggggtt

SEQ ID NO: 3730 - DNA, 201 bp, Artificial Sequence
  Description of Artificial Sequence: Synthetic polynucleotide
ggttttttagtttgggttaggtyggggygygtgtttygggttttttgtggttgtatygygygttttgtgtttaygggygaaggygttggaattyggygttyggagttygagtttttgaaggygggaggyggygttygattttaggggttgygttgggttgtyggagttaagagtgtttgygtttttagtttygygttagaa

SEQ ID NO: 3731 - DNA, 201 bp, Artificial Sequence
  Description of Artificial Sequence: Synthetic polynucleotide
ttagagtgtgattgagygggttggttyggyggtygttgtttttygttttygttttttygygtttggtygygttatttattgtygygggtgttygygtgygygtygtygatgyggtygtyggggagygtttggaggtggaagtygatgtttaygttgtagtagagtygtygtagtygtttgatgtttagtaggtagtygtyg

SEQ ID NO: 3732 - DNA, 201 bp, Artificial Sequence
  Description of Artificial Sequence: Synthetic polynucleotide
tatttagaaaatggaaagttgagtggtygatgaatyggaattgggagtagttttttatgaattagagaaaatgtaagttaaaaggagatattattttttaygtattagattggtaaatattaggaaatattaagttttgttgaggaggaggggtttagggagtttttatattatgtgggtgggattgtaatttggtataat

SEQ ID NO: 3733 - DNA, 201 bp, Artificial Sequence
  Description of Artificial Sequence: Synthetic polynucleotide
ttttygggayggaygttttaggygyggygtygagtggaggygagggggttgyggagggggaaggggttaygygggttayggggtttaatttttgatttttygygaygttaagaatgtaggagggtagagttgagggagattttaggtggaatttttaggtggggaaggttgagttgtyggggttgygggtatygggaaggt

SEQ ID NO: 3734 - DNA, 201 bp, Artificial Sequence
  Description of Artificial Sequence: Synthetic polynucleotide
tygtygtygtttgttygggayggtttygtgaagaaggayggaggtagattgygtgttygtagygggatttttttggtttttgggatygtygtggttttygyggggtttgttaygttttttttygygtttttagtgttygtattttttagttyggtygtyggygtagttattttatttttygtyggttyggtattttygggg

SEQ ID NO: 3735 - DNA, 268 bp, Artificial Sequence
  Description of Artificial Sequence: Synthetic polynucleotide
gyggttagatttyggttttgtaagttggyggtygyggyggtttgygaygtttttygtyggggggtagttttgtygtgggtyggggtygygattgtyggggygttaggggyggttagyggtygtttggttggygtgtyggyggygttyggggagggygggtyggggggygyggygtttatgaggtygttgtagygtttgatttgtttttgtaggtatttgyggtggtttatttttygtttygatttgttyggtttgtttagygttagtt

SEQ ID NO: 3736 - DNA, 614 bp, Artificial Sequence
  Description of Artificial Sequence: Synthetic polynucleotide
agagttattttgttygttgttttggattttgaaatttgggagatttatattaaaggagggaatyggtttttttattttttaagygygtygtgttttttatygtttttttttttggttygattggttttggttttttttaygtttttagtttttaaattggygttygttttatggttygtgtaggaygttaaaagtayggtaaattttagggygatttttagtagaygttttygaygtatgatgtygagtygttatyggttttygtygttttttgtygygttyggggttyggtttgyggtygtygttgygttttgaagygtatygygtygtyggggtttygttatttygtygttygtttttygggtygggtttttttygttttttttaggygttgtttttattttaggyggtttttgttagttgtaatatagagataaattttygaggyggggagatttttagggtatygggatgttgaagtttygyggtttttatttttaagtttaattygtgygtygtttgygygtggygtagttaatttgggtaagggaagatygtttggtttatagttggttggaaagtttaggttttyggyggtagtagtttyggtygat

SEQ ID NO: 3737 - DNA, 201 bp, Artificial Sequence
  Description of Artificial Sequence: Synthetic polynucleotide
gggtattagtttygagtttaggttttattttygggyggttygggaygaattttttttataggttagtgtgtgtgtagggtaagtgtagggggttgaggggygttggyggggaggtagtagaggtggtttggattattttggygyggygygyggtgagygygaggatttygttagtgggagtygttgagttaaagtgtattt

SEQ ID NO: 3738 - DNA, 201 bp, Artificial Sequence
  Description of Artificial Sequence: Synthetic polynucleotide
ttygyggygayggtgaygygttttggttttgataagtttggttttttttattttatygggtggygtygttgttgattttaygtttagtygtttttattttygtttgaaattttttygatagggtttygtttygggggtttagtttttagygygtatatattygygtggtgtyggtttagttttttgtaaaggaagtagggt

SEQ ID NO: 3739 - DNA, 201 bp, Artificial Sequence
  Description of Artificial Sequence: Synthetic polynucleotide
ttgtagttagtyggyggtttaggtaagagataaggtgtgagtaaaggtttttgatggtygggtggtttgayggttaggtgygagtggggaggatagtttaygyggtttgagtagttatttttggttatagttttagttttygtttttgttttyggtttttgttttggtttgtttgygygttatttygttatttygtagtgt

SEQ ID NO: 3740 - DNA, 201 bp, Artificial Sequence
  Description of Artificial Sequence: Synthetic polynucleotide
ygttyggtygtygtttttagttaattygggttttttttayggygattaattagtgygaagttggttgggygggaagtygygagaggtttttattgyggygygggtggyggttaggagttgttaggatagtttttyggtgttttagtttaayggtttygtttatttatygttaagagaaatttygttttgyggtyggttttt

SEQ ID NO: 3741 - DNA, 201 bp, Artificial Sequence
  Description of Artificial Sequence: Synthetic polynucleotide
ygggtattgygaattgtygggygatgttgtygttgtygtygtgatayggagagtaatagttttttagtaatattttttttygatataggtatatatttttygataggtaygtatatttattttatagtgttyggttyggttgyggtgagtgaggggtygggaagaggygtatygtttagygagygtygygygtyggggttt

SEQ ID NO: 3742 - DNA, 261 bp, Artificial Sequence
  Description of Artificial Sequence: Synthetic polynucleotide
ggatyggyggtgatatyggagttygtygtgygttttyggtygttttyggtgggtgtyggtttttgtatttgatgygttygggatgttttttttattttggygygttygtygttagttygtatagygtttygtatattttygtaygygtttgaaatgygtayggtttygtyggttygyggaattattyggaygtayggagygtttygtatygattygttygtygttttttygagaygttygtatygtgtttgggtygggygc

SEQ ID NO: 3743 - DNA, 201 bp, Artificial Sequence
  Description of Artificial Sequence: Synthetic polynucleotide
yggttagggtaatagttagggtaaagggagagagaagtygtttyggggygagaaggagaaaagttagagggttgaataggtgaygttgagtttgttggagygtgtgtgttttattaygtaagggygyggagttyggtygttttatttttygttatttgygygttygggggtaygttttttgygatagtttggaatttagat

SEQ ID NO: 3744 - DNA, 201 bp, Artificial Sequence
  Description of Artificial Sequence: Synthetic polynucleotide
gggtatyggtgtygaygtygygagggtagygttygyggygggaatattaatgtattttaaagggtayggtygtygtygtagtaggtaattagttggatygyggyggagygygyggaggtggttgttggttgtaaggattgygtttagttttygtttygtttttygaggttttygygtgggtyggygggtagtgygtgggtt

SEQ ID NO: 3745 - DNA, 201 bp, Artificial Sequence
  Description of Artificial Sequence: Synthetic polynucleotide
ttttttgtttyggtttygtgttttygttggggattgtttgyggtgagtttgtygtaygtaygttagggtygaggtagtgatgyggggtagygtgggaggaygggttgyggagttygygttattttgtttgtggggagygttgtgtttgtttttttgttagygygtttagttgtttyggtygtygttaygygggattgtttg

SEQ ID NO: 3746 - DNA, 201 bp, Artificial Sequence
  Description of Artificial Sequence: Synthetic polynucleotide
ggaaaatagggtattyggagtgtaggagattttttagggtygttttttttttygggggtgttttgaggaatygyggyggggattygtygttggtagtttgygggttttggtgttagygygtatgggygggttgtgyggaygtggttggttttttaaaggttttagatttygttygggtygtttagttttttaaagttgtgt

SEQ ID NO: 3747 - DNA, 219 bp, Artificial Sequence
  Description of Artificial Sequence: Synthetic polynucleotide
tttygggttaggaagttgttaggtaggggagggttagygttagttgtggaygtttygggatagttttttattttagtttttgtttttgttttyggygyggygtaaaygtaaaagttttygtggtygtagttttagtttyggtggtygttygattttygtygggatttyggttgtatttattggagaagyggyggtttygattttygaggaggyggyggc

SEQ ID NO: 3748 - DNA, 268 bp, Artificial Sequence
  Description of Artificial Sequence: Synthetic polynucleotide
tttattattgtttttttttttygttttttatttttttgtagygttaagtyggttttttaatttggtttgttgaaygtaaatygttgagagtttgttgtatygttttttggggtttttggttgtygagtttygttaaggtaaagaygttagtaagygaggaagygtagyggaagaaaaataagygggygygygaggggagttttaggagggttgtygagtggttggtaggyggttttygtttttttygggtggtttygtyggyggttga

SEQ ID NO: 3749 - DNA, 201 bp, Artificial Sequence
  Description of Artificial Sequence: Synthetic polynucleotide
tttttyggttttaggattggggagtgtgtygyggggtygagggtggggaatagttagagggagaygygaattaggtygttggyggagggtttagggggagygtagaggygayggtttttatgtyggyggttaatatgatggagaatyggtygttgttygttttgtaggtgttygagtygtagggtgygttygagggtagtt

SEQ ID NO: 3750 - DNA, 517 bp, Artificial Sequence
  Description of Artificial Sequence: Synthetic polynucleotide
tagagygygggttttygggttttatttygggaaaagtttgggtttgttttgygttgttgygtgttgygtttttgggatttgttgattgttttagagggaaygtttygyggtagtgttagttttttggggattaggaagggygatttttgtttgggagttagtgtttgggtygtygggttygggtaagygttgggggtttggttygagaagatgyggataggtggtttagggygtygyggattttygttttttgygggtatygggagtttagggtygaggygygtygtttygaggggtttttttttttaataatgygttyggaatggagttygygttttgatagygygggttagttygaaatygtttagaattygtttygatgagtgggtgagtygttttgggagtttgtygygtttyggtagyggagggtttgagtggaaaaatttttattggatgtattttttaatggttggtttgtttyggttttygttygagtttttttyggtagtaggygttg

SEQ ID NO: 3751 - DNA, 226 bp, Artificial Sequence
  Description of Artificial Sequence: Synthetic polynucleotide
ygygtttttttagtygyggttttttttttygtygtttttttttgtttttttagtttttttttttaygtgtggatgaygttaaaatttygygaaaaagtygygtggtggtttttygagyggaggygygatttygtygtttagyggttttttttygggggygtttggagggggagaagggyggaggyggtyggtttttttttttttygggaggtaggatttttygayg

SEQ ID NO: 3752 - DNA, 201 bp, Artificial Sequence
  Description of Artificial Sequence: Synthetic polynucleotide
ttttygggaggygagtygygggttgttgggygyggaggttggagtygygagaggttyggttgttgaagyggttattgttttttagagttaggtttygygtygygygttttygtygtygtyggtattgtgtatttatttatttttyggagattggggtaggggaaaaaagttttgaggygtttttatttttgttttyggggt

SEQ ID NO: 3753 - DNA, 212 bp, Artificial Sequence
  Description of Artificial Sequence: Synthetic polynucleotide
tttygggygtttggtatttttttttatyggggtttyggyggygygyggygtttgttyggaggggggttygggtatggtgttgyggtagttggattygtygygagtttttygygtttygtygtygtttgygtygyggagttggtttagttgtaaataaatagtagttttttygtttttttyggttatygttatttttttygttttattgygta

SEQ ID NO: 3754 - DNA, 388 bp, Artificial Sequence
  Description of Artificial Sequence: Synthetic polynucleotide
ttttttyggttatttgtgttgttttygttttggttgtttttgtttygagggaagatgttygagtattttttttattttatttggtyggygaagtatagttyggtgaygatgtgtagagttttttggtatagattgtttatttygttttttttgtggaaatttatygtttggtttttttttygtttttttttttttttttagttagtygttttttttttttttygtatttttaatttttttggygttttaagttatagttygttygyggtgattttggttggagattgygtygttgagagtyggtaatttttaggagttttaygttggttttatggygggagyggagggygtaggggaaggagaggygygygaggaggttgyggttgtc

SEQ ID NO: 3755 - DNA, 201 bp, Artificial Sequence
  Description of Artificial Sequence: Synthetic polynucleotide
tttttggatgttaaattyggtttagggagtttaggagtygttgtagttttagtttttttttttttttttttygatgattygggtaatgttaattttttttygggattgaaagttttaaatttaaggtgttaagttgatgggyggtttttgtttttatttttygatttygggygygtgttttgaaagataggagagaaaaaa

SEQ ID NO: 3756 - DNA, 201 bp, Artificial Sequence
  Description of Artificial Sequence: Synthetic polynucleotide
tygtggtattttygttagagtttaagtagttttttaggygtggggtttggtggaygttggtttggagygttyggagggyggggtgggggtgggggggaygygttgtygtttggggtgttttygygtatttttgttgggygaattttggtttttyggtgttggttgttatttgagtaattgatgggtttttaggggaagtaa

SEQ ID NO: 3757 - DNA, 212 bp, Artificial Sequence
  Description of Artificial Sequence: Synthetic polynucleotide
ttygtygttttttttttatttygttttttatygtygtttttagttttttttygggatgagagagagtygygttgyggagtaattttagtggatgggttygygggggttgagygggyggaggaygygggaatttygtgatatygattagttgaygttgttygygtgaaattagagtygggtattagggttttatttttattgtttttgtattt

SEQ ID NO: 3758 - DNA, 250 bp, Artificial Sequence
  Description of Artificial Sequence: Synthetic polynucleotide
taggagggtgggtgttagtttttttttttatttttygagtttttttttyggygtttaygtgggyggagtagygygagggtgtgygtggtaggggtygyggyggygtgtgtygtgygtggggtggggtgygggttgggyggtttygttttygggtttygygtygtyggggygyggtttttagttttattttttttgttatttgggyggagatttgggggattgtgatttattttgyggaagatayggaggg

SEQ ID NO: 3759 - DNA, 488 bp, Artificial Sequence
  Description of Artificial Sequence: Synthetic polynucleotide
ataygtttttygttagtttgggygtygggtttygaattttyggtttgtaaatttgygtattttttttygtygygttygttagataatttggygaatagttygttygttygtatttygtttttttyggttttttttttaaattttaaaygtatygtygtgttttaaagaaggtgtttaygtygtttttagatttyggagygttttttttttattttygggattttttaggtygtttatttttttygtttttygtttagatttgagagggatygaaaatatattttygattygggtagttagggtygaaattgttaagaggagaaaaggtaaagyggaaggagggtggttataaatagatttttttgtttttttttaaaaggatattgtygttttaaaagtttttttttygggtttttatttttygtattttygtattttgggggagygtatttaattgaggtaaygtagtttttttttagtgtttgtag

SEQ ID NO: 3760 - DNA, 201 bp, Artificial Sequence
  Description of Artificial Sequence: Synthetic polynucleotide
ggttgaggagaagggagggagagtagagggaggggggaattyggtygggggaggaggagagaggygaggaggyggttttggtagygygyggyggyggyggyggtagyggtagtagtagyggyggtgyggagagtttggattgggagtttaaagttyggttgggtagygggagaggaggagtygtaggagttgtagttttgt

SEQ ID NO: 3761 - DNA, 364 bp, Artificial Sequence
  Description of Artificial Sequence: Synthetic polynucleotide
ttttataattaaggagtatggtggagttgggttaattttaggtatagtttagtygagttaggygaggtttagagagatttgattygtttggtagttttaayggatttgttttygtagtygttgyggatttttyggtygttatggygattgtgaaatgtggggtggggygtatgygttggaagttattygygygggtagtttttgagtgtttttttaygtgttttttagygygagtagtattttygtttttgygttttttagagygtgtagttttyggtgagggtagttttaygtatagttttttatattttttttagygtttgtagttttyggtgygygtaggttttaagtttatatgygtagt

SEQ ID NO: 3762 - DNA, 220 bp, Artificial Sequence
  Description of Artificial Sequence: Synthetic polynucleotide
gtttttatttygagygygtagttttaygtagtttttttatattttttttagygtttgtagtatttttagtgygtatagttttgttagtygttttttygggygtygtttttgtattatttyggtttataattttgyggygattgtttgaagaatttttygtggttttattttttttttygggtttagttttagttgtgatattttaattaaaagattatac

SEQ ID NO: 3763 - DNA, 201 bp, Artificial Sequence
  Description of Artificial Sequence: Synthetic polynucleotide
tygtttttttygtttygagygattttttgttttagttttgtaggtttygtattgtagatgtttgttggtttttttgygttyggyggttttygyggtgtttygtaagttttygtgattttttagtattagtyggttgtgygttttttgtttttaygggtyggttagtygtagatatttatttagtttygygagtttagtygt

SEQ ID NO: 3764 - DNA, 201 bp, Artificial Sequence
  Description of Artificial Sequence: Synthetic polynucleotide
ggggtatygygttggtatttgtagggagygattggtttggaagggtagagggtagaygggggtttgggtggggtagyggttattttaggygyggagaattygttgtttttatttttttttygyggatttttattttgyggtttgtgtgttyggtttttttygygtggyggggaagtgygggtggttgttygggtttttaga

SEQ ID NO: 3765 - DNA, 201 bp, Artificial Sequence
  Description of Artificial Sequence: Synthetic polynucleotide
gtgtyggttttygaaygtatttygaggyggggtgagggttggtagtygtttttgtattygtygttgygagtygygttttttaaatttaggtatgggatttyggaaaatygattygttgttttgagtgtttattaygtgaggaattggagtggtygagttygttaaggygtyggggatatttgagtagatgagaattggagt

SEQ ID NO: 3766 - DNA, 358 bp, Artificial Sequence
  Description of Artificial Sequence: Synthetic polynucleotide
gygtagygtttgagtttgygtttygttaagtgtattaagtaygagatttagagygttatggagatygtgttgttttggggtttggtygygtattgtayggyggttgygttggtygtattgtttttttataatatgagtagygtyggyggygatygtttgggtygyggtaagtyggttygttgyggttttatttttttygtgggtygygtgtatygttggatggtggatagtygygtggygttgygtatttaygagtaygtygttatttatttgatagtttgtatggagagtttttttygggatatttattygygggtygtggttttyggggtgtttyggagttgtagtggttttgggt

SEQ ID NO: 3767 - DNA, 201 bp, Artificial Sequence
  Description of Artificial Sequence: Synthetic polynucleotide
ggagttttygggygygttttgggygtattggggaggttttygggygggtaggyggaygttttggggyggygggyggyggttgtyggggttygtyggggttyggtygttygttgtttatygataggtattaggaattgatttygtygttgttttttgttyggtttagttatygattagttgtygygattatggagaagygtt

SEQ ID NO: 3768 - DNA, 328 bp, Artificial Sequence
  Description of Artificial Sequence: Synthetic polynucleotide
ygtagggagggagggggtatygtttgtttttttgttygaaaggtggaggtaaagagggatttyggattttagagaggtttataattttttataagtaaggyggggggyggaatttagagaggtaaagtgattygtttttaaatygtaatattaggaggatagtagggttagatggaatttttyggtttatagttttygatttygggtaagtgttttattygggygtayggtttgtttttagattagaattaggygygttygtagttaaggaagtttggygggagattttttygaggttttyggtttttaggttagyggggttaaggag

SEQ ID NO: 3769 - DNA, 201 bp, Artificial Sequence
  Description of Artificial Sequence: Synthetic polynucleotide
ygttyggtgaagtyggtgtatttattatattttttgttgtttttagtagggaagtyggyggtgaggygggggagtaggtatggtggtttyggggtttatgyggggtttattgtttatttagaatagyggttattgttgtttattagggygtatttatygttggagttttygyggygattgtttatttttaatatatatttt

SEQ ID NO: 3770 - DNA, 319 bp, Artificial Sequence
  Description of Artificial Sequence: Synthetic polynucleotide
tggagtyggyggtygygttygygtygttgttgtttggttygttggyggyggggtygggggttgtyggagttgattttatgtttttttttaatgtagagatygttggagatggygagtttygagattttttttattttttgtttttagagtaattttatggtattaaaaaaaaaaaaaaaaaaaaaaaaaaaaaaaaaaaaaaaaaaagaaggagaaggygatyggygaaagtaggagggaaaaagtaggyggyggygggygggtaagtaaaagygygagggagygygyggagtgtttgggtggaygtgtgtgtgygttc

SEQ ID NO: 3771 - DNA, 201 bp, Artificial Sequence
  Description of Artificial Sequence: Synthetic polynucleotide
atygygggaggagagygtaaggaggtttttygtaaagttggaggttaggtyggagygatgtttygggagyggagtttttttagtttygggtttttagtygyggatagttggtagtgttaaagatttygttattatttgyggttygtagttgygattyggtygtagagtygggtatygaggaaggygtaaagttgagtttgg

SEQ ID NO: 3772 - DNA, 370 bp, Artificial Sequence
  Description of Artificial Sequence: Synthetic polynucleotide
agggyggttyggggtgggggygttttatttttgttttttatggygtgtaygaagtttttttggtatagttggttgygaagttttttttttaggttgaagtygyggaygttgaygattttttttaygttygataagttttygttttygtygtatygttggyggttaatygggygttgygaggatttaaattagagagttygggatattattgtgggggttggaggtygttttttaatttgggtttagtattaataggtgtagtagtygagygttttttgtattttattattgtaatttaagtaattttgygtaattgttaaagatgttgaaaagtaggataaggagaggggttygtatttygagggtttag

SEQ ID NO: 3773 - DNA, 201 bp, Artificial Sequence
  Description of Artificial Sequence: Synthetic polynucleotide
gttatgttggaatttggaggggaggggggatgttggagaggtatayggtgatggatatggaaggattygggaggtgtggagtggtgggttyggttygtygygggaaggatatagagggatataggttgttttggagaggygttttyggatatttggaggggygtatagtgttgggatttggyggygtttggggyggagggg

SEQ ID NO: 3774 - DNA, 201 bp, Artificial Sequence
  Description of Artificial Sequence: Synthetic polynucleotide
gtttttygtttttaygtygtagttygggttagyggggttygtygyggtggygttygyggatgttgtygtattggtygttgyggtayggayggygtagtttygggygyggttyggtataggygtyggyggttttygttagttagtagttyggygaggygttggtttatttatggttttygggyggyggtttttgygtttagt

SEQ ID NO: 3775 - DNA, 201 bp, Artificial Sequence
  Description of Artificial Sequence: Synthetic polynucleotide
attygttygttygtgggtgagttgggaggggygyggygagggagggtgggttyggggygggggyggygyggggygygtttgyggttatgygatattgtttygttygygtttygtttttttttttgggttttttgggttttttgggttgtaggattygtygaygyggygygttggtygtaygggggttgggygtygttgtat

SEQ ID NO: 3776 - DNA, 263 bp, Artificial Sequence
  Description of Artificial Sequence: Synthetic polynucleotide
tgggttattygtgtygtatgtyggygtagttgttygttgtggtaaggggggggyggtygggtttyggagygggtygggagggygyggggygygtatttygyggtaggtgagyggygyggttgtaggtgagtagtagtttyggttygygygtttagtttttttygtygygttygttyggtttataygtttttygygygygygtygttttygtttygygygygttyggtygttygttygttygtgggattttygygaggtygygc

SEQ ID NO: 3777 - DNA, 201 bp, Artificial Sequence
  Description of Artificial Sequence: Synthetic polynucleotide
gttttgttttttttgtttttaaygaattggtaagtaaaatattagttgtttattttgaaatttgttttaattattttygtattttttgaagttygttgggygygttttgggttgtttttttttgagtagtygggtttagagttaaggygygatgattgtygygtaagttagggtttaygyggtyggggtttttttttygtt

SEQ ID NO: 3778 - DNA, 201 bp, Artificial Sequence
  Description of Artificial Sequence: Synthetic polynucleotide
ttttttatttyggtatttttttttggtgaygttaaggggttttttattttttattygtttttttatttattttttttttttttttaggttygtttttttgyggttayggagaggggygggggtygaygagggygggtggttyggggtygagygygygtggggaggtgttggygaygygggttygggagygyggtttyggta

SEQ ID NO: 3779 - DNA, 201 bp, Artificial Sequence
  Description of Artificial Sequence: Synthetic polynucleotide
ttatttagttttgggggtygttygaaattggggaagggataaggttgaagtttygtygtttggttttaggggyggaaagttygatttaagggaagttggtygygttttygygayggtgtttttggtayggaggattgaggygtagttyggttgtttttttttgtttgtttttttygygttgtttygtygtttttgattttt

SEQ ID NO: 3780 - DNA, 201 bp, Artificial Sequence
  Description of Artificial Sequence: Synthetic polynucleotide
ygyggggtygggyggggatyggtygggggygtygygygttyggtygggttgattgtygggggygattttygyggggtaaggygggggygygggagtagygygtagttgyggggttattttatttgagygttttgaggttagggtyggggtttgaggatayggygttgggtttygggggaygygggtttaygtyggygttyg

SEQ ID NO: 3781 - DNA, 215 bp, Artificial Sequence
  Description of Artificial Sequence: Synthetic polynucleotide
ttatatttatygtttygggygygtygttygygygyggtttygtttygggtyggtatttttyggttyggttgttttyggttttygtttyggtttyggttttygtttygtagggttyggtttygygatggtggtygyggyggygagygyggtagggagggygtgtgtatgygygtgagagygygtagygtgtgtatgtgygtgtgygygggagggtt

SEQ ID NO: 3782 - DNA, 201 bp, Artificial Sequence
  Description of Artificial Sequence: Synthetic polynucleotide
ygygagtgttttttaatggtagygygggygtttttaatygygaggggttgygttattatyggygtttgttggagyggttgygggagttgggygtgtagttygtggttattttgtattattgggatttgttttagygtttgtaggaygtttayggyggttgggttaatygygttttggtygattattttagggattaygygg

SEQ ID NO: 3783 - DNA, 201 bp, Artificial Sequence
  Description of Artificial Sequence: Synthetic polynucleotide
gtgttagtagtttyggggtygttygtaygtaaygttttygggtygggttaggttggttagggtagggyggtygtttttygaggaattgygggyggggyggyggggttaagttgagygttygttttgttttyggygtttygyggttgygggyggagygggttttgyggagtttttyggtygtttttttygtagttttygttt

SEQ ID NO: 3784 - DNA, 201 bp, Artificial Sequence
  Description of Artificial Sequence: Synthetic polynucleotide
ttaggttgtttgtagygtygttttgtttttttattttagagygtaggtgagtggttatttttttaggggatygyggttgagagygtttatttttttttttygtatttggaaattgagtttggyggtagggttgggttatttagagtttgtatatttyggaagggaaagtgattttagaagggagagaggaagtgttgagtt

SEQ ID NO: 3785 - DNA, 217 bp, Artificial Sequence
  Description of Artificial Sequence: Synthetic polynucleotide
tgtagttggtgttgtttttgggaygatgtagaygttttatatttaggygygggtgttaggtygtygggtattagtttatttttagggtttgtgagttgygygtattttttyggtygygtattttttgggaggttgtagttagagygtttttgaagggagggyggtagaagatattttttttyggtttatgtaaatygttgggggaattttagttaat

SEQ ID NO: 3786 - DNA, 317 bp, Artificial Sequence
  Description of Artificial Sequence: Synthetic polynucleotide
aagygagygattttttgagttygggtggttyggygggtaagggyggygygggagattygtagggygygggygyggattyggggaattagggttatygttgygggyggatgggggttatygaggyggttygtttttaggygtatatttygtatatttttttgttaagtgaaggggttaaaatgtatagatgggggagtttatttaggaatagaggygygagaygtatagttatttttgggttgggagtaygagttagtagattttyggagygygttaaayggataatatgttyggtgttgtaaatagaggtttttgtt

SEQ ID NO: 3787 - DNA, 201 bp, Artificial Sequence
  Description of Artificial Sequence: Synthetic polynucleotide
tatttttgtgggggggagggtgtagygaaggttgttagggatttygygatygygttttaataygtattggagygagtgtgygagtgattatgagtgtgagygggtgygagygttyggyggggttgatygttaygttggyggggtyggyggggttaggtagtttttttygygttttttttttttygtttygtgttttttttt

SEQ ID NO: 3788 - DNA, 201 bp, Artificial Sequence
  Description of Artificial Sequence: Synthetic polynucleotide
ayggtgttaagggatttagtttggyggatattttttattaggagatygtaggtaagygygggygygttgtaggggtaggttgtagttttyggttgtygtaygttttattggtygttyggygtttttttttttttttttgttgttgagttggtgtttattttttgttatygttatgggatttygygttttygtgttgggygg

SEQ ID NO: 3789 - DNA, 201 bp, Artificial Sequence
  Description of Artificial Sequence: Synthetic polynucleotide
gygtygtagtttttygggtatyggyggyggtgattaatttgtaattttagygtttagagttgttatggtgttygygggyggyggyggyggygatagtgggygatyggtaggattagtgttaggygyggygtttagggygggyggggaygygggttttttatttayggyggtttagtttaggtagygygttyggttyggttg

SEQ ID NO: 3790 - DNA, 201 bp, Artificial Sequence
  Description of Artificial Sequence: Synthetic polynucleotide
gyggtgtgtaygggagttygtygggtataygyggggtatatttaagtgtattgttaggaggtygggagtttagygtgygagygtgaggttagattgtgtayggtatygaggattagttttatttttgagtatgaaagggtgaaatygtttattttaagttttatttyggagttattaaataatgaatgtattagttatatt

SEQ ID NO: 3791 - DNA, 201 bp, Artificial Sequence
  Description of Artificial Sequence: Synthetic polynucleotide
gggttggtygyggattyggayggtygggagygggygyggyggtygtagagayggttttttttygygyggttttagygtagattttagatttggagtygtgygggyggagaygygyggggttttttttygtttygtygtygttgggtttttagygttttyggattygygggaggataggaattattyggagtgaagttgygt

SEQ ID NO: 3792 - DNA, 221 bp, Artificial Sequence
  Description of Artificial Sequence: Synthetic polynucleotide
tygagatataaagatygaggttgagatygttaggggttgagggtgaggtygygtttyggggtygttggagygygggygttatgygagattgtttyggttgygygtygttttagaggagttygagygttttttttagtygyggygygttggttttggtygggattgtagttaggtgggygtygygygtgtgagygtygygygtgtgagygtagatttggatt

SEQ ID NO: 3793 - DNA, 311 bp, Artificial Sequence
  Description of Artificial Sequence: Synthetic polynucleotide
gattattgtygaatagtygttggagattygtagagaagggygggttttgygttyggggygtttyggaggtaagttyggagagttygggtygggyggagggygggagygtaygagtgtgtgtgtgtgtgtgtgtgttygyggtgtgttygyggttyggtgtataygygygygggttgtaaagttaggagttgygggagygtttttttgtttyggtttggtttyggagtattgygggtygyggaggtgtgggggtttttgtygttgygtttagggtagyggyggaaaaggtgtgtgyggatgyggggyggggt

SEQ ID NO: 3794 - DNA, 308 bp, Artificial Sequence
  Description of Artificial Sequence: Synthetic polynucleotide
ttgagtygtagaaggtttttttygygtttttttttagtagggatttttggayggggagatygaygggtttgtgggygttttttygggatatatttyggttygttttgtttgggttgggtttatttaygttttgggtggggtttaggaattgygtgygggygtagygggtgagtatgttgatgatgattatttggttttatttttttaygtygattagtaggttatagagttttyggtagtttttgtgaattaggtygatgygtttygggtagatttttttaaaggttattattatattgttygttatt

SEQ ID NO: 3795 - DNA, 201 bp, Artificial Sequence
  Description of Artificial Sequence: Synthetic polynucleotide
aatgtgatatagatattagtttttygtgtttttggtttttagggttttttttatygygttttagtatttgtagtttttttatttttatagygttygtygtygttaaggtaatagagggatgttyggtgatagattyggygtyggttttyggygtygtaagagaagygttygygygggygttttggattygtagagttttyg

SEQ ID NO: 3796 - DNA, 201 bp, Artificial Sequence
  Description of Artificial Sequence: Synthetic polynucleotide
ttattttatttgagygtggttaaattgttgttatttagtggggagtaaaaaaaaataatttgtattatygaaaygagttagtaattggttgggaggygggyggtagttgggtttygygtgttttyggyggtyggggtttttttyggggagaggtatatataygtatagtyggatygygtttygttagggtyggagttattt

SEQ ID NO: 3797 - DNA, 201 bp, Artificial Sequence
  Description of Artificial Sequence: Synthetic polynucleotide
ggtgggagtygygaggagygtttagtggygyggtttgtygggtatggtggtyggttyggygatygttgattygtygggttygggggttttggaagygaggygygtttttygatttygagattttgtagggttgtaatagayggtggggaggtaaaaaaaaaaaaggaaaaggaaaaaatggtgttaaagttattaagtttt

SEQ ID NO: 3798 - DNA, 630 bp, Artificial Sequence
  Description of Artificial Sequence: Synthetic polynucleotide
tyggttagtttattttygygtttygtaaatttttttaatygggtaataaagtgagtagyggtggtygtygygatttttttaatttygtatttyggaggttygagggggttttgggatygagyggtttygtagyggygatagaaatatatattttaygaaaaagaaaaaaaaaaaaaygagtygygygaattygttaagttagatgtgygyggtttgaagyggaggaggttttgaygttagttttatttygygtagttyggtttggtygtagattygtyggttattygtyggyggtttaggtygggaggggttaggatagtttyggtygygyggtggayggaggggttattttttygggygttagtaaataaattttattygagttaatatygtttagygaayggtgtttttttttagttattygagaaygagaggtatttttaattagaaattaattaatgagtagttgttttttttygttttattgtaattattygttttaattataaatgagatttatgaaaggataygttgaagatgtaattaatagttaaaattagttyggygttgygtaggyggtyggttyggtttygygttggygygttttgtttygagtggtaggaaggggtt

SEQ ID NO: 3799 - DNA, 201 bp, Artificial Sequence
  Description of Artificial Sequence: Synthetic polynucleotide
aaatgggattagagygyggagggagtttggttaggaggttttttaggatttagtygygaygttgaaaagtatgaagggtyggaattaggtatttatttagygagygttattaattygaagttatagygttaattttttgattyggtygtttttataygtagygtygggattagaggygyggtygtygttygtttygttttt

SEQ ID NO: 3800 - DNA, 239 bp, Artificial Sequence
  Description of Artificial Sequence: Synthetic polynucleotide
gaagaaatygggtaaatagttgtttttaggttygtgttaygagttttggygggatttttttttttttttgtattttttatttttygattttttttgtgtgygtygygtttygttgtagtttygttggagagatggggayggtttggtagaaggtggyggygataggggttygggayggtttggggagaggagggtgggggygyggttgttgtggggtgttttygggyggggtttayggg

SEQ ID NO: 3801 - DNA, 201 bp, Artificial Sequence
  Description of Artificial Sequence: Synthetic polynucleotide
tgtttagtttttyggaggagtattatgttttgatattttygttttatygttttaaagttggtttggggtttygtagggagtggtttgtatggggagggttygygtgttgtgtttttgggaggggtaagagagtgggggygtagggggygggttaggtttttgggygyggygygggttygggggattygygyggttgaygtt

SEQ ID NO: 3802 - DNA, 221 bp, Artificial Sequence
  Description of Artificial Sequence: Synthetic polynucleotide
ggtagttggygygttygttttggtygtagttyggtttggggattygttgygtgttttggtattagtgygtggtgaggaaagyggtggtggygaatagtagygttagtaggtttagggttayggttaggagygttyggtygyggyggttagtttttatgtygttygygtygtygggaygggattgtatygtyggggagtttygygygygaagttggtagttg

SEQ ID NO: 3803 - DNA, 201 bp, Artificial Sequence
  Description of Artificial Sequence: Synthetic polynucleotide
tagttttaygtyggttygtttttygtttayggttyggtttttttttygtttggttyggygttttttygtttygagttttttattttttggatttygggttygygggggygyggagaagaggatttaggaaaggtttgggaatttgatgggtttgtggttggggggaggggtagttttttygttattttatttttttttygt

SEQ ID NO: 3804 - DNA, 246 bp, Artificial Sequence
  Description of Artificial Sequence: Synthetic polynucleotide
tgggtttttttaggatttattttatgtagtttttatatggtttttagagttttgatttygtggttggagtgtttgtttttttttaagtattggtagtataygggtattttgtattgtaygtagtatatgttgtggttttttagttygtggtttgtgtaggtggagattttgygtgggtttagttttyggtttataygattttgggtygggggtattaggyggtgtttggttaggggttttyggggc

SEQ ID NO: 3805 - DNA, 223 bp, Artificial Sequence
  Description of Artificial Sequence: Synthetic polynucleotide
tgatattgggggtaggtgatataggagttgyggggtatyggggttagggtyggtgataagtgggtggtyggtggyggtatagtygggggaaataygyggaygtygttgggggatttttggtayggggtagtgggggygttggygaatttttygtaggagttatagtygttgttygtttygttgtataggtttattttgtttaggtttagatagttatagtygg

SEQ ID NO: 3806 - DNA, 201 bp, Artificial Sequence
  Description of Artificial Sequence: Synthetic polynucleotide
gggtttttygttagygtttgygtttggtttttagttttgagtttygygtttatttatygygggygagtgttgygtagtayggaggaygttttttttttttygttgttggtagttttygtaggygttttattygggtttaggtttttgtayggtagtggggttttttttttttttygtgaattygttgaygtygtgttttgg

SEQ ID NO: 3807 - DNA, 244 bp, Artificial Sequence
  Description of Artificial Sequence: Synthetic polynucleotide
tgygtttattygttgtataaygygtttygtttyggtttttagtttatttttygygtygygttagtttygaatttggattttygygggygtttgggyggggygggattttaggtttatttagtaagttaattggttgaggttttyggttggggattaattatyggttttgagaaagttyggtagtggttattatatttggttttygttaatttttttaaggtagyggtygttggagtagyggggt

SEQ ID NO: 3808 - DNA, 201 bp, Artificial Sequence
  Description of Artificial Sequence: Synthetic polynucleotide
tttttatttttggttgtttggyggggtttgaaagggtaggtggttttggyggygygtttygygagggatgtggtagaagggygtgygtttggygtygaggyggagggattttygatgtygtgtggtagyggggtttgttatygtagtttttygygggtattgtttttaggtttagagttagtttttagygagtygggtaaa

SEQ ID NO: 3809 - DNA, 457 bp, Artificial Sequence
  Description of Artificial Sequence: Synthetic polynucleotide
tttttttaaatataygtttttttgttygyggttygttattttygttygggtttygggttgtgtagtttttttttaggtttgttygggtttatgtttttttygaagyggygggagtyggtgtagttttaatttttattgygtgttttaggtygttaattagttttgttygygtgtygttggttyggaggttgtygygttagtttttgygtgygtttgagygygttggagtatttgygaggttagggttgtygayggygagaggatattttgaggaatayggtgttttagtttygttttygtttttygttygagttggaggttggggygygttgagtygtagygtttggataagtgygygggtyggagtygtttaggtttgtattygggggttygyggtygaygtatgygtaygygyggtggygggtttgtaggttygaaggttyggttttttttttaa

SEQ ID NO: 3810 - DNA, 244 bp, Artificial Sequence
  Description of Artificial Sequence: Synthetic polynucleotide
gagyggtgattggaatttaygttygggagaggttyggagtttyggtygygggyggygggggatttttgtaggaaggggtaggaaggtaagtagttyggygygttttggyggtttygagggatttgggttygggtttgyggtygygtygtttgggttttttttgggttgggagygygtygggttttygttttgtaygttgttatygygggagaygtttyggtttygtygygygtagaggggaygc

SEQ ID NO: 3811 - DNA, 206 bp, Artificial Sequence
  Description of Artificial Sequence: Synthetic polynucleotide
gtttygaygttgygggygatagggtttggttttagtagtygtygtygtygtygtygtygttattyggaggatttagtaaaagtttggatttgggggagggygyggygttgagygggattattattagggttggaaggagatttygagaatttttgtaggtaaygygygtttttaattttttttttttatgtttygtygttgygttt

SEQ ID NO: 3812 - DNA, 203 bp, Artificial Sequence
  Description of Artificial Sequence: Synthetic polynucleotide
ggaagtagtggggggygttygaagagtagggtagttayggttatygtggtygtyggatyggttatgtgttaaagtttttggggttyggygtttygttgggygygtagygyggggagtagaygygtygtgggtggggtagygyggtgttgttggygttyggttttygyggggtgtagttttgygygtttttatgttgttttttt

SEQ ID NO: 3813 - DNA, 266 bp, Artificial Sequence
  Description of Artificial Sequence: Synthetic polynucleotide
ttaggttatttygattttggtttttaggttygggataaygtgttagttttaagagagygttgtttatagtttygggtgggttgggtttaattgtayggggyggggygttaatagtttaggatttgggttgtaggttggtttttgtattaattagyggggyggtttygggttttagtttttttatttygtttaygaagggaggygattgygagygtttggggtttttgayggatttygtttygggggtggggyggggagtggttayg

SEQ ID NO: 3814 - DNA, 242 bp, Artificial Sequence
  Description of Artificial Sequence: Synthetic polynucleotide
gtttagtagagatttggagttagaagtttagagatagtygagtgygtygtgyggttttyggaygttygttgtttagttygattttygttaattgtgtaggyggttgattygtagyggtagyggtagtagygaggattygagygttggttgtagygatattatggattttttttttatggtygygtaggtaayggggygttttttttaygygtttygggtygttaagtttggggaggttyggg

SEQ ID NO: 3815 - DNA, 201 bp, Artificial Sequence
  Description of Artificial Sequence: Synthetic polynucleotide
agtttagattygygygaaygtggatgggtatatagtttygtttttttttattttgttttttygaggygttagtaatttgttttttgtyggtgatttygggygttttttttgtygtygtttgaggaaggttttgagattygttttgtgatygtgattygttaagygtygaygygtygyggtygtttgttttgttttgttttg

SEQ ID NO: 3816 - DNA, 201 bp, Artificial Sequence
  Description of Artificial Sequence: Synthetic polynucleotide
ttttgtttyggtttttgyggggatggatgttttaygtagtaagygagtaagygagttttggagatyggggttttgggtgtgyggtyggtttagtgttaygyggtgagataggtatggttattaatttaygttaaggyggttgtgtatttggtatagaaaatattgttgttgaatgttgtttttatagttattygttagygt

SEQ ID NO: 3817 - DNA, 312 bp, Artificial Sequence
  Description of Artificial Sequence: Synthetic polynucleotide
ttttttaatattyggtttgtaygtttggygggggygtaatagtgttttayggttygggagttygtttttggtttttgagtaaggtattttttttatttgtygtgtgtttagttgaatttagtatatttttttygtatttttygtttttttttttttttttttgaatttgtttttttgttttgygggtttttaatttttttygaatttygggygttyggttyggtttaggygagygttygyggttggggaygygggtggggaygyggyggtttgggygttgtaggatgygtttggtygyggaggagaygatta

SEQ ID NO: 3818 - DNA, 203 bp, Artificial Sequence
  Description of Artificial Sequence: Synthetic polynucleotide
ygttggttttggttgtttgtggggtttttttaggtttyggggggtttgyggyggtttgggaggtagattttygygggtaggtgtggtygtgtttygatygygygaggatygaagttggyggaagtttttgtgyggtgttttttagttyggaggaggttggtttgaagtttttaggygttgtygaagtttttttttgttagygt

SEQ ID NO: 3819 - DNA, 201 bp, Artificial Sequence
  Description of Artificial Sequence: Synthetic polynucleotide
ygtatgygygygygtaattagattttygtygtygtttttagygttttttttyggggtagggatttatttaataggttggggtttttggagtgygyggggtygygtggggaagyggggattttattttttttaygygtygtttagtattgggtaagggyggggtattttttgggttttygtttttygtygttygtttyggga

SEQ ID NO: 3820 - DNA, 283 bp, Artificial Sequence
  Description of Artificial Sequence: Synthetic polynucleotide
agyggyggyggygggttttaggagtygtagattttggttagtggtattgygggttattttgagttttygaggttttagggggatagygttygggygttttygttgygygtygttttygyggagtygagyggyggtggttgyggaagygattggggttgygyggatattagygttttagagttygygaggagtttggggttttygggttggagtaagagtygagtatyggygtagtttgygggattggtatttatygggttttttaatttttagattttgttat

SEQ ID NO: 3821 - DNA, 201 bp, Artificial Sequence
  Description of Artificial Sequence: Synthetic polynucleotide
gttttyggggygttttgttttgygttatygygygttygttygttygttygtttaatttatttgttgaagattaggtagtttaggtggttgattttgtggtyggagyggtggyggttgtagtttttttataggtttttgaaggtygtgatggttaggatgaagagtatyggygttagtgttaggtygggttggaaggygttt

SEQ ID NO: 3822 - DNA, 247 bp, Artificial Sequence
  Description of Artificial Sequence: Synthetic polynucleotide
ttgagygygtgatatggtttgtygtttttgattaagaygggtayggttattyggygyggygagggtaggggygttatttttatatttttttyggttygggygygttttattttgtagyggtggttttggaattagattttgatttgygtgggygtgaggyggatgaggttggttaggtgttygygttygggygtygataggtatygttgttgtygaaagygtygttttagttygtaggtttgygttt

SEQ ID NO: 3823 - DNA, 427 bp, Artificial Sequence
  Description of Artificial Sequence: Synthetic polynucleotide
ggggygtttttttaggggattgggggtggggaggagggygtaygggtyggggagggggttatyggatttggatttygggatatttygggggtttggggggygggtygygygtttatttgygttttygtygtygaaggagtttatgtaygggaagtagatggygagygtttygaaggaggyggatagattgaggyggttttgygagygttttatgttygygtyggygtygggygtttyggtygyggyggyggyggyggyggygggyggtttgggtagtttggtygttttatttttgaygyggagtayggygygyggygtggtggyggyggttyggggtygggtygaggtttygttgyggggttggygggygyggyggggtyggygggygggttaggagttggyggygygyggagttygaggygygttg

SEQ ID NO: 3824 - DNA, 246 bp, Artificial Sequence
  Description of Artificial Sequence: Synthetic polynucleotide
yggtttatagtygggatgygttttygtyggggttatygyggyggygaaygtttyggatttygtatttyggtgattttttgggatgaatygaagtyggattygtattttggtygtaataagygygttttaygtygttaygtattagyggtgattttygagttttttgtygttttggttttttygtaggygggtttygaggttttygtagggagtttagggttayggttaygtgtagtygttttygag

SEQ ID NO: 3825 - DNA, 384 bp, Artificial Sequence
  Description of Artificial Sequence: Synthetic polynucleotide
tgygygtyggtttggtttgtttgygggttttagagtttyggygttygttgtttttttygtttttttttttttttttatttttttttttttttagtygygaygygtagggggygggttttatttttttttygttttygtttyggttttaagtygyggaggygttyggtgggatttygttgttgtttaattaggggggatygggtgagtttttttttttggagtygggttttattagygtygtaggtttataggtygggggtgggggttttggatygaggggyggygyggggyggygyggggyggygygygyggttttggagygttagtatttgtttttygatttttyggtygtygttttyggtygtttyggggatttygttatta

SEQ ID NO: 3826 - DNA, 415 bp, Artificial Sequence
  Description of Artificial Sequence: Synthetic polynucleotide
tgggtagttttaggtygtygaattyggygtttagygggggtagttygyggaaggygygagtygagttagaygtygyggggaaaggttygggyggtggttgygggggygttaatttygggagtaggaggtygggttttagtygtygggttttgygygtttgttttttgyggygyggtyggtatttgtagttggggtggtygygtaagtgttgtaygygtagtygttyggttttttttaygaagggtygttttttygtygygtttagttttttttaygttttgtttgygggtygtgggygttagtgagtggaaygtygtygggygggtgggygtygagtttttygtgygttygggaygtttygygagggtttggygtagttttygtatttygyggttygggatttttgtttttttyg

SEQ ID NO: 3827 - DNA, 543 bp, Artificial Sequence
  Description of Artificial Sequence: Synthetic polynucleotide
tgygttttaygttttggagygtgaagtygggygttaaaaagttgttgtygggtygtagttttagatttagttgttggttaaaggygtgtaggyggaggygygtggtttygtgtttyggggygygttttagtttyggtattattagtttttygtttttttyggaggggygttygagtgygttygatayggttagtagygtygyggygagtagtagtagygtgggtattggtttaaagtttygagatttyggagttygtttygygttttttatgtygttgtttagtttgygtttttygaatttttygggtatagttygttgtattggagttttaggagatatygttygtagtagygtayggagygagggatttttagttygggtygggagagtaaagtttygttggtttgttttggattgttaaaattaataatttttattattygttggaagggygygtagagtyggttatagtygaagttttyggagttattaaaaggaggygttgtagttttgtyggygygygggaagttttttttttagyg

SEQ ID NO: 3828 - DNA, 227 bp, Artificial Sequence
  Description of Artificial Sequence: Synthetic polynucleotide
ttaggagygatggttgtaatgtttttttttttgttttgtttttyggtgtygggagttttgtttttygtygttatttttggttagttttgygtaagaaygtygttttgtttggtagttaggtygagaygtagtttgaatgtgagtaggaattyggagaagggaagggagagaattagaaagaaggttygggagggattygggaagtagtgggaggtttgygttttgga

SEQ ID NO: 3829 - DNA, 323 bp, Artificial Sequence
  Description of Artificial Sequence: Synthetic polynucleotide
tygtyggaagagttttgtagagtgagtttttagggttatttygttgttttttttttygttttygtagtygttgtagttagygtgggagtygggtaggtygygtggggygttggatttatygagaggttagygtygtygtygggggagggygtgtttygtaygtgtgtgttygygygtgttygygttygygtgtgttagygygygtgttttggtygtgygygtygagtygggtygtattaattttttyggygtygaygggtttagtttatggtgtgggygtygggtttagggaggtttyggttttygttaatygyggagtaggg

SEQ ID NO: 3830 - DNA, 279 bp, Artificial Sequence
  Description of Artificial Sequence: Synthetic polynucleotide
ggtaygagygttagtagttygtaaaataggtagagtaygtttttygtgagggttataygygttttggtygggttyggggttaygtaggtggtgtattgygygttygttagggttaygaagagygtaaygaaygttagtagtayggygtttayggtgagygttygygtygtttgtatttyggtgtttagagttagtatygagtygtatattttgtattgtatgtgttyggtgttttgtattaygtaygatatttatagttttttttaggtggtttgygtc

SEQ ID NO: 3831 - DNA, 261 bp, Artificial Sequence
  Description of Artificial Sequence: Synthetic polynucleotide
ttyggygygygtttttyggygtataygttttttattttygygtygygygggtygyggatttgtaggttgygygttttttgyggagtttgtttyggttttayggataggtttygtagtgagtaggtaagggtygtttygtygyggttgtttttttaygtttyggtygttttttttttttttagaattttygtttagtygggatttyggatttttttttttggtttggyggttttygttagtygygatttttatygayggaga

SEQ ID NO: 3832 - DNA, 364 bp, Artificial Sequence
  Description of Artificial Sequence: Synthetic polynucleotide
gttygggttttgggyggygagggygtagygagggttgtygttttttygggtagtttyggggggygyggygttgggtygygggttygggggttgtygtgttygatygtatgygtygatttgtygttgggygttygtttttttttgttggggttgggygyggtttyggagtttggyggyggtggtgagggygtayggttagttgtagyggygttgtgtttgtygtggatttaggatattttaggtttggtggyggggttaggtggyggyggttttttgygttygggygatggygatagygataggtttttaatttygtttygggttygggtyggtygggtttygygtygggttaygygygygtata

SEQ ID NO: 3833 - DNA, 242 bp, Artificial Sequence
  Description of Artificial Sequence: Synthetic polynucleotide
ggygttttttgagtttagagaagtgggttaagataagggaagaaaattttttatagaagaggagattttygtttttagtgttggggattttyggtattygygtttttgtgtttttggtggtttyggygttttttyggagygygyggtatgtttgtttttataygtttagtatttttgtttttagagtaaatttattttttagggtataygtagaggggtagttaggtatygtttttattttg

SEQ ID NO: 3834 - DNA, 285 bp, Artificial Sequence
  Description of Artificial Sequence: Synthetic polynucleotide
ayggtygttyggggtygtattttygttyggtggyggygttygaagaygttagtygygttaygtattgtttgygtttygygttttagtygtygygtattaaygtygtygttttygtygggagttaagttygtygggtyggttyggttttaggtgggtagttyggtttgtagttggttggaggtggyggtygttgtagttttggtagygggtatatttttaagtataygtatttaaygttttttttttgagttaygaggatggagtagttatttyggttygggattg

SEQ ID NO: 3835 - DNA, 222 bp, Artificial Sequence
  Description of Artificial Sequence: Synthetic polynucleotide
ggtattgattttttagttttttgtttgttttttygttttttttttttatttyggatatttttaggataattagggttgaagttttygggagaagtagtttygagttygtgggataagggggyggttyggtttygtttaggatttttttyggatttttttttyggttgtttyggttggttgtagggygygttatttygyggggaggyggyggtagyggtggyg

SEQ ID NO: 3836 - DNA, 201 bp, Artificial Sequence
  Description of Artificial Sequence: Synthetic polynucleotide
gyggyggyggyggyggyggygggggttggggygygggggtyggattatgagtygttgagtygggtaaattttaggttatygagttagyggattttyggagygtagttttgygtygyggagtaggttttaattaggyggygaggyggttataygtatygagttagygattttygggygaygygyggggttagggagygttac

SEQ ID NO: 3837 - DNA, 298 bp, Artificial Sequence
  Description of Artificial Sequence: Synthetic polynucleotide
gggattattttttayggtgttatygtatttatttygygtttttttttygttttttggagtttatygggattaggtggyggygggtgtttttttgggggtgygyggttatgtaattggtggatttttttaaatygttttggaggggggagygyggygttgggggygggagagygtttttggttgtgagttgtttttgtygtttygtttygygtttttttgtygtttygtttygggtttttygygttttttttttyggttyggtygagygygttgtttygaygtygttatttagagtygg

SEQ ID NO: 3838 - DNA, 272 bp, Artificial Sequence
  Description of Artificial Sequence: Synthetic polynucleotide
tgatagggatygggtttagatttgttaaatgttgyggaggtagaatttgatagtgygggagggtaggygtttgggaggtaggagttggtggagatgatagygtggaattygtgagttttaygtaaygtttttttgtygtttagggtgggtttttagaagtatagaaatggtygggttgygggatattatagygaggaattagyggagtataggggttttaggagygtygggatatgttaggtygggtagatagtttygggtyggagtgagtg

SEQ ID NO: 3839 - DNA, 201 bp, Artificial Sequence
  Description of Artificial Sequence: Synthetic polynucleotide
gagtatgagggagagtgttattttttagttgaaggttattgtgttttgtatttttggtttgggtaagtgaggagtttgttagtttttggtaggaagtgtaygtgatyggyggttggttaggggtatagagaygtattttatatagaaatttaggttggyggggtgggyggtyggggagttagttttgtagatgttattaag

SEQ ID NO: 3840 - DNA, 251 bp, Artificial Sequence
  Description of Artificial Sequence: Synthetic polynucleotide
gtaggttgaaggyggagttggagatattyggggagtaggttyggagygttttygaggtyggggtyggygagggagaggtagggagttygaggaagggaggyggggygggtagggatygagttaggagagagygggygggggttttgggagyggttttygagagtggggtttgtggggagtagggyggtttyggggatagaggaagtygyggtggaggtttagggtagaygygggyggaygygaggagygta

SEQ ID NO: 3841 - DNA, 249 bp, Artificial Sequence
  Description of Artificial Sequence: Synthetic polynucleotide
attygttttyggagtttygttyggyggtatttgttttggttaygygttttagtttygttaggtttttyggygggttygaattygtagtygggaaggtataygygagtaggagggygtattttatggttaggtgyggaygyggyggttgygggtggttagaygyggtaggyggagygtaygggyggygygtatttttttygyggtttyggagttyggygttttaggtgyggttttaggtgagagtygtyg

SEQ ID NO: 3842 - DNA, 249 bp, Artificial Sequence
  Description of Artificial Sequence: Synthetic polynucleotide
gttttyggtagaygtagggggaygttygggyggygyggggygygggtttyggagtggttgygggaaggaygygyggtattgtttgtgyggggattygggaygggtyggggtattataggygygggaatttaygtgtggattttgygttygygggygyggtgattttygyggggatttgttggtgtttygagatttattgagttgygggggttttggagatttttaggtttgaaaagttagttttagaga

SEQ ID NO: 3843 - DNA, 201 bp, Artificial Sequence
  Description of Artificial Sequence: Synthetic polynucleotide
ttgttygyggygtygggygygtyggtygtygggtggtggtggtggtyggyggygtggtggtggtggtggtggtagtgygggttygygtygttttgygyggyggtygyggygattayggyggatattayggyggyggyggggtttattttttygtygttgtygtttaaggaggygtyggtatyggtttyggtygtygyggtt

SEQ ID NO: 3844 - DNA, 201 bp, Artificial Sequence
  Description of Artificial Sequence: Synthetic polynucleotide
ayggtatttayggtyggggggttygggggattyggygggyggyggayggygtatattygygattyggttygggagtygttgttttttttagtttggttttygtttttaygatttaggggyggttgygygttgttttttggygtygtatygggtttaggygygyggyggggttggggygygyggggyggtygtttgggttat

SEQ ID NO: 3845 - DNA, 251 bp, Artificial Sequence
  Description of Artificial Sequence: Synthetic polynucleotide
yggygtygggtagygygtagagttagtygygtgtgtagggtygggtgtygttgygtgygggygyggggygygggttyggggygggtgtagggygygggatyggggtagygtaggagtaggtaggggttygyggttygygtgggttttaggygygggatggyggygtttagtagygygggttygygtagggygygtagygttgggggtaatagygtggggttyggtyggtagtggggygygggttgygyggt

SEQ ID NO: 3846 - DNA, 201 bp, Artificial Sequence
  Description of Artificial Sequence: Synthetic polynucleotide
tayggtggattttgtgggtygttgagttttttgattttyggtttgttttattttgttttgttagtgggttttgygttygygttaataattygaatgggtaygtttttgygttttagaaygttgttygtttttttatatttagattgaggtggaatttaygttatataaatygggtygtaaggtttagtttagyggggtttt

SEQ ID NO: 3847 - DNA, 201 bp, Artificial Sequence
  Description of Artificial Sequence: Synthetic polynucleotide
tggygyggggygtaggtgtaygtaggttggtygygggygygyggggttyggygggagtttyggggtggttttygygtggggtygggggygttygygygggyggggygaggtyggggagggtagttgttygtttttttyggtattgggagttttyggttggtattgygggaggagttttygggtgattygygggttttgaaa

SEQ ID NO: 3848 - DNA, 201 bp, Artificial Sequence
  Description of Artificial Sequence: Synthetic polynucleotide
tgaggaattggatattaggygttggtygttttttatttttagtygttgggtgtttagagtttatttttagygattagagtagaattgtagagaagaygttygygttygggtttygtttggggagttagggygygyggggagygttygggtygygyggttattgatygttggttgtaygggggygtygtgyggattyggttt

SEQ ID NO: 3849 - DNA, 337 bp, Artificial Sequence
  Description of Artificial Sequence: Synthetic polynucleotide
tttagggttttygggatyggtgttygttagtgggtataggaygtygggtgttygaagggttgtttggagatgtaattgattttggygggtattagaatgaygagtggtagtagtaggagyggggtgaygaataagattaygaaggatttgaatttggagatatagtttagygtygaggttatygygygggagggagattggygggygagaygagtgaggggtagttagaggygtygygggtttaagaaggggttatagttttyggggattggggagggggyggtgataatttygtttygtaygggggygttttttygyggttttggggyggggttat

SEQ ID NO: 3850 - DNA, 201 bp, Artificial Sequence
  Description of Artificial Sequence: Synthetic polynucleotide
ggttygtgtagagtygtttattttttttygtagygtygggttgttttaaattgtttttggattttatttgtgagtygygtggttgggttgggttgggttgygygggatttgttagyggttttygttattttgttygtaggygtttatyggttgttttttgggtygtygttggtygtygttataygtgggaygtygagggta

SEQ ID NO: 3851 - DNA, 201 bp, Artificial Sequence
  Description of Artificial Sequence: Synthetic polynucleotide
atatggygtatgatagggaattggtagggttatagtttyggattattyggggtagggtagggaaattayggtagattgygtagygtattttgttygggtgyggtgagggttgygtttygtttggttttygttataatttatagaaagttttygyggagtattggtgtttttgaatttattaggygatttygtygtaaagaa

SEQ ID NO: 3852 - DNA, 201 bp, Artificial Sequence
  Description of Artificial Sequence: Synthetic polynucleotide
tygattttgtttygggtaatygatgggaaatttttygagagygyggtttttttggggattyggygtttttgaygtttttaggygttttttygggtygttgyggttttttttygtygttygttagygtttaaggtygygttttttttattttygtttttttttttttttyggyggttttyggatttggatagagttgtagga

SEQ ID NO: 3853 - DNA, 1216 bp, Artificial Sequence
  Description of Artificial Sequence: Synthetic polynucleotide
taaggtggggatcgggacgcgatcggggatggggaagggggttgtaggaggtttcgtttgcgttgtcgtttttgttgggtatagcgttttttattattcgcggcgatttcggttttcgtaaggtggggcggcgagtaggagtcggggttaggttaggggttcgagttttcgttcgaggggcggggaaggcgggtgacgtgagtcgggtcgggcgggcggagttgggatcggtttcgggaggcgggggcgagcgcgcggagaggtagacgcgaggagggaggcggttgagtagcgcgggcggttttgcggcgggcgcggtgggcgcgggcggcggggtttcgggattttcgcgcgtttttttcgcgcggcgtcgtcgtcgcgcgtttttacgtttcgcgttttacggcgttttcgtttcgcgcgtttttcgtgttcgttttttgttagttttcgggtcgcggtcgtttgtagagcgagcgtttagacggagttttcgggtaatttgagtggcgtcgatcggcggcggagtttttggtagagtttttcgattcggtagcgcggaggggattcgcgttcgttcgcgtcgcgttattttaaattttaagtagcgtcgttttatcggcgcggagtttcggttggaggtaagagtcgcgcgtcgggagatacgtatcgtgagcggtagcgtcgtcggttttttttttcgtcgtttcggagggcgaagtcgcggttttttagttttttgttgcgtcgcgatagcgtcggaatacgtttcgtttcgttgtcgttttcgttgtgtcgtcggcggagggggtcgcgagtttcgcgtttcggtcggaggatgtgcgttttcgcgggtcgtttagtttgagttatgcgttttaacggcggcggcgcgtcggtcggtatggagtttcgcgcggtcgcgttttgattcgttgtgcgtttcgcggtcggcgggcggcgggaggcggcggatcgagagtcggagatcggcgtcgcgggacggaagcgagcgggcgcgggcgtcgcgtagatggtttgggcgagttaggtttgaggtttcgtttttcgaaacgtgattatgtggatttaatagtttttaggatttaggtgagcgattcggtcggcgtcgggtgcgtgtgggcgcgtgggtgttaggttgggcggaagcggcgtttttttttatgttgtaaattaagggattttttttcgtttt

SEQ ID NO: 3854 - DNA, 365 bp, Artificial Sequence
  Description of Artificial Sequence: Synthetic polynucleotide
ggcgttcgacgtttatttcgggtttggcgttttttttcggttattacgcggcgtcgtttttcgggattttttagttttcggagtttcgcgcgtttagagtcgttcggagcgcgggcggggttagtttgggtagtcgcgggtcgttgttgcgtcggaagttttcgtcgttagggagttttttgggcgttaggttttgggtttttgggcgaagtcgacgttagaatatgtttggtttcgtatttagtttatcgtatttttagcgcgcgtgggtggggggcgtcggttgaggtggggagggtatagtttagttttaggttatagtgtttcgggcggggtagcgcggtgcggggtgaacgttatcggtt

SEQ ID NO: 3855 - DNA, 201 bp, Artificial Sequence
  Description of Artificial Sequence: Synthetic polynucleotide
tggcgtgacggtttgtggggtttgcggggtgcgttgttttcggatttgcggggggaggcggttgagttggcggcgttcgcgggtttagtggtgagtgcggcgtttttacgtttagttcgacgttttcggagcggtcgtcgcgtaggggtgggcgcgggtttttaggagggagggcggttgtgaacgcgttttgtttttcgc

SEQ ID NO: 3856 - DNA, 201 bp, Artificial Sequence
  Description of Artificial Sequence: Synthetic polynucleotide
attacgtcgttcgtgtttattatttacggtacggaggacgaggtgatcgatttttcgtacgggttggcgttttacgagcgttgttttaaggcggtggagtcgttgtgggtggagggcgtcgggtataacgatatcgagttttatagttagtatttggagcgtttgcgtcgttttattttttaggagttgtttagttagcgc

SEQ ID NO: 3857 - DNA, 201 bp, Artificial Sequence
  Description of Artificial Sequence: Synthetic polynucleotide
gggcgcggcgggcgaggggttcgggttgagttgcgggtcggttcggatggcgggcggcgcgggttggtcgggcgttttcgcggttttgttgcgtttcgtgcgtcgtttgcgcgaggtgttcgaggtgtgcggtcgcgatttcgacggttttttgcgcgtggagcgcgtcgcggcgttcggattgcgtttcggttagggcga

SEQ ID NO: 3858 - DNA, 201 bp, Artificial Sequence
  Description of Artificial Sequence: Synthetic polynucleotide
ggcgtttttttttcgtttttggtttaggttcggttcgcgggtgtagttttttttagggttttttttttttttcgggtcgcgcgttcgtttcgtatcgcggcggtttttcggtagtgtttgtttttattggacgtatagtgatcgtgacgggtacggggcgcgagtttttattattataatgggtgtgtatggcgcggggcg

SEQ ID NO: 3859 - DNA, 201 bp, Artificial Sequence
  Description of Artificial Sequence: Synthetic polynucleotide
tttttttttaattgatttaattttttaattttagtttttcgtttttggtatcggtttttttttaagtttttagattttaattttggttttcgattcgtttcgttatagtttgggaagcgggagaagtagcgcgcgtttttttgcggatttttttttagggaagattgtggtgttagttgtttagggggattagggggttat

SEQ ID NO: 3860 - DNA, 201 bp, Artificial Sequence
  Description of Artificial Sequence: Synthetic polynucleotide
agtttaggggtagggggtttagggtagttagatttttttaggtttaggaagagtagtttttagcgttcggttgttaggtaattcggttttcggttttttacggcggttttttcggtgtgttttattaagagcgatagggttggtgattcgaggggcgcgtgcgcggtcgttagtttgggatttgtacggattttttttttt

SEQ ID NO: 3861 - DNA, 213 bp, Artificial Sequence
  Description of Artificial Sequence: Synthetic polynucleotide
gttttttgtttgaattaaagtggttaggtatttagtttgtaagatgaataaatgaaggaaagaaggaacgaatgaataagggtttattttgtagagcgttcgcgttttagcgcgtattaggtatattagtgttaaaggtgttgggggtcgggtttagcgttcggcgcggttggaatgggggcggcgaggagttttttttagttagtcgtaggg

SEQ ID NO: 3862 - DNA, 201 bp, Artificial Sequence
  Description of Artificial Sequence: Synthetic polynucleotide
gggaggcggtaggtagggggcgttgcggggcgaggtaagtgtagttcgtcgttgtttgtttgcgagtttggggttgcgcgtcgttttttatttagttgcgcgattcgagcgtcgcgtttatcgcgtttcgtgggttttcgcgtttcgaagggtcgggattcggtttgagttttttttggttttcggtgtaagtcgttgggt

SEQ ID NO: 3863 - DNA, 201 bp, Artificial Sequence
  Description of Artificial Sequence: Synthetic polynucleotide
cggggtattcggtcgtgtcgtcgtcgtcgttttagttgtcgtttttgttttcgttttcgcgatcgttgttagagcgtattattcgcgaggaggtggagggcgaaagtttggatttgtgtttgtagtagttttataaatagttaagtagttgggtttggttggtggtgggttcgcggtttttatcgcgtcggtttcggacgc

SEQ ID NO: 3864 - DNA, 201 bp, Artificial Sequence
  Description of Artificial Sequence: Synthetic polynucleotide
aaggggggtttggttcgttagcgtaggggattcgagttgggtaggatatgtgagatagttatagttttttagagattacgataagatttaattagtcgcgcgtggttttcggcgtcggagcgggttagtttagttcggtttagttcggtttcgcgtagagttttcgtcgttttcgcgtatagagtcgggtgttttttgcgg

SEQ ID NO: 3865 - DNA, 324 bp, Artificial Sequence
  Description of Artificial Sequence: Synthetic polynucleotide
ggtgggggtttgggagacggtcgaagggggttcgggtagaagtttcgcggtcgggtcggcggagggaagggggcggtcgcgttcgggattcggtttttttcggttttatttatttgtttcgaagagtggttttagttttgcgtttttttttgcgattttatatatagggatagttttaggtatagttttagtagtaggagtatggcggggcgagggcgcgggacgttcggggattcggcgggatacgttttgtagcgtttagggttttagttattgcgggacgttttcggggtcgtttatttcgcggttttagttcggatttcg

SEQ ID NO: 3866 - DNA, 201 bp, Artificial Sequence
  Description of Artificial Sequence: Synthetic polynucleotide
tcgcggtgttgtcgcgttaagcgaaggaggaggagggttcggcgattttggggacgaacgttttggacgtttcgttcgcgtttttttttcgcgttcgtcgcgcgtttgtttgttcggtttttttttcgtttttttttcggtcgttcgggttaaaatttaaggttaggtttttgagggttcgggttttttagtcgttttttt

SEQ ID NO: 3867 - DNA, 330 bp, Artificial Sequence
  Description of Artificial Sequence: Synthetic polynucleotide
ggattttggcgtttttttaggttgttgcgcgcgggttggggatcgtgtatcgttttgcgcgttagacgatgtattttttggaacggtagttgaggtaatgcggggtgtgaagtggcggcgggtagaggggttcgtaggggttgggattcgcgtgtttttttttgtttcggtgcggagtacgatgtgttcgggcgggggcgaggacgttcgggaggggttgggttgcgtacgttcgcggggtcgtcgtagatgggcggtttggaggcgttgtagtttttgggaaatgggagttttcgttttgttttttttgttgtttggttgggttgggtt

SEQ ID NO: 3868 - DNA, 293 bp, Artificial Sequence
  Description of Artificial Sequence: Synthetic polynucleotide
tttagtattttagtttttaagtttttttgagtcggggttgcgttttcgttgtttttttcggtcgtcgttttttggcgttagagggatttcgcggttcgtacgggtttgttttcggtttcgttcggagggtgtgcgggttttcgtttcgttggtttcgtttgtttattacggcgcgtttaaatttacgcggttcgcggttttttgcgtgttttgtcgatttcgggtcgtaggaggggttagtttcgtcggtttttacgcggggtttgcgtcggtagcgttacgggttggaacgc

SEQ ID NO: 3869 - DNA, 201 bp, Artificial Sequence
  Description of Artificial Sequence: Synthetic polynucleotide
cgttttcgtttcggtttttcgtcggtttggcgggcggcgacgtggggaggggtcgtttagaagtcggggtcgttcgggtcggggaattttttcgcgtcgacgtttattttttacgggtcgtattcgtcgaggggtcgaaaggggttttagtggaggacgcggtgggagttgggtttcgttttagttgtcgacgtcggcggt

SEQ ID NO: 3870 - DNA, 201 bp, Artificial Sequence
  Description of Artificial Sequence: Synthetic polynucleotide
tatttcgttaaagtcggataaagcgtggttagagtgcggtttagttttttagtttgcggttcggggaggagggtagcgcgggcgcgggttgggggtggcgcggggcggcgtttaggatttcggtgtaggcgagagtgcggcggatttgttttaagaggagagcgaggcggatttgttttaagaggagagcgtggggcgtcg

SEQ ID NO: 3871 - DNA, 226 bp, Artificial Sequence
  Description of Artificial Sequence: Synthetic polynucleotide
atggcgatgtttttatttttttcggtaggtttttttaattaaaaagttggaaacgggaattcgtaaataacgatttagggttttaaattatttgtaaagacgcgatggggaggggaatatttgcgcgttttaaaattttaatttcgaggtttttagtcgcgtttgattcgggagtcgggtgcgtttttagtgttcgcgtacgaattcggcgttttggtagtttcga

SEQ ID NO: 3872 - DNA, 363 bp, Artificial Sequence
  Description of Artificial Sequence: Synthetic polynucleotide
ttgtaagggattatagttataatttattaggtaattatatttatcgtattgtagaagttatgaatttggcgggcgtgggggggaaggggaagaagttcggcgagattagaggggaaattcgaaaaagtaagtttttgcggtagtagttaggaaatattcgttaggaattggttgcgattttaattttagcggttcgaagttttagtttttttatttttatcgcggtagagtcgttttcgtagatatttttcgaggagaatcgcggtttcgagggcgttaggtgagtcgcgtcgtttcgagttttcgggttacggtaggtcgatttaggcgttttcggttcgttcgtgttttcgcgttcgggtg

SEQ ID NO: 3873 - DNA, 201 bp, Artificial Sequence
  Description of Artificial Sequence: Synthetic polynucleotide
cggttcggtgggggtttcggcgagcgggagggcggttggggatttcggtcgcgtcgggcgcggggttcgggattcgggagatcgcgcggcgtcgaagttacgcgttagttttattgtttcgcgcgtttcgttttaggtttcgggtttttttttcgtatttcgtaaagtcgagattttttcgtagttttttatttcgagagg

SEQ ID NO: 3874 - DNA, 201 bp, Artificial Sequence
  Description of Artificial Sequence: Synthetic polynucleotide
tcgcgttttttcgttagtcgtcggttaggagtttttcggtttttgagtaggacgcgttaaagggagttgggaggtttagtagtttttagcgtcgttttttcgggtgacgtgacgttttttttggagcgcgggttcgttttcgttaagtttttatcgtaggtttttatagtcgagttacgggaagatgtaacgtcgggcgag

SEQ ID NO: 3875 - DNA, 267 bp, Artificial Sequence
  Description of Artificial Sequence: Synthetic polynucleotide
cgcggggtgggggcgcgggagtcgttttttgttcgtttcgcgcgtatgttttcgtcgtatttgtttcgtttagtgttttatatttcggggagtcgggtggcgttgggttcgtcgaggtcggggtttttttatgggagggaggtggttgcggcggaatttttagatgcgtttttttttgtattcgttttttgggaaggatttttttaaattttggttattttttgtttgttagtttgttttttggtagcgaagttttagtagtttatt

SEQ ID NO: 3876 - DNA, 707 bp, Artificial Sequence
  Description of Artificial Sequence: Synthetic polynucleotide
gcggtggcgtcggcggttgtagggggacgagttagcgtcgcggcgttgggagttagttgagttcggtcggcgagcggaggcggtagcgtaggtagagcggcggcggtagcgggagttcgagcgttgcgcgtttattatggtcgtttagggagagttcggttatttggcggcgtagtcggatttcggttttaatagcgagcgtagtatcgattttttagtgttcggtttcgaggacgatttggtcgtcggggcgattttgtatagttcggagtggagcgaggagcgttttcgcgtggataggaagaaatttgaggttatgttataaggtaggtatttttcgtgttttcggatttttcgattgagtttttaattttttttcggatatttttatcgcgcgtttcggcgttcgttattttagtttacggtcggtcggtttagttttaggttcgttttttcgcggagtcggaggatatttagggattggagatttcgcgggattttttatttttttacgttttttagatttttaggcgttgggggttttgtgcgaatttgattggttttagaaaagtcgaaggtcgagtttgtattggcgcgtttaagttgcgttttggattttggagatgttaattttagttcggatatttgggttgtgttattcggattattcgggtcgtatagagtatgcgtgattttttttatttttt

SEQ ID NO: 3877 - DNA, 201 bp, Artificial Sequence
  Description of Artificial Sequence: Synthetic polynucleotide
ggatttaggattttgtgttcgcgtttttggagtcgttggagttcggatttttgtaattgttggtattttgggggtttggtttagcgttttgttgtttattcgttttttttcgttgtttcggaattaaagttttcggtttttttcgttttcgcgcgtttatttatcgtcgtcggggagcggttcggttcgtatttagtatta

SEQ ID NO: 3878 - DNA, 201 bp, Artificial Sequence
  Description of Artificial Sequence: Synthetic polynucleotide
taggtttcgcgtttgattttttagtttgcgtagcgggtattcggtcgggaagaatttttttagtaggcggtttagtattacgtttacgcgttcgcgttcgcgttcgcgttcgtggtcgcgcgggttttagttttacgtagcgtttatagatcgtgagttcgtagggtagtgttatcggtttgtgtagtagtttcgggtagt

SEQ ID NO: 3879 - DNA, 201 bp, Artificial Sequence
  Description of Artificial Sequence: Synthetic polynucleotide
tattgggatttttatatacgagttggtatatattagttatatacggttaattttagagggttggttttttgttttgggacgtttttaggttttcgggtcgcggtgcggagaatttaggtgggtgttcggtaagttatttattaggggttgttttttcgcgattttcgttataagcgtagggattcgggggtcgcgttggtt

SEQ ID NO: 3880 - DNA, 201 bp, Artificial Sequence
  Description of Artificial Sequence: Synthetic polynucleotide
gaaaattgtaaaatttgggagttattttgttttatttttttgttgtttggggatatttttcgcgagtttgttcggtttcgaagaaggagtagaggggattcgtaatttagtttttagagtttcgttaggaaaggcgcgagagatttattggtttcggtaattttgtttcggcgttcggacggagttcgatgtttgcgtagt

SEQ ID NO: 3881 - DNA, 203 bp, Artificial Sequence
  Description of Artificial Sequence: Synthetic polynucleotide
agtttagagtgcgtcgagtatcgtttcggtaggtggaggggttgcgggaaataaaataatttgggtaggaatttgattggtagtaggtttatttttggttcgcggtagggaatttaatggagatgaagaatggtggggaagggggggcggtgtttttttgggagtttaacgtacgtttttttattttgttattttttggagat

SEQ ID NO: 3882 - DNA, 201 bp, Artificial Sequence
  Description of Artificial Sequence: Synthetic polynucleotide
cgcgcgttttttcgcgcgtttttcggattcgcgtttgtttattttttcggttttgttgcggtcgaggttttaagtcggttatttcgtgtttaggtaatcgcgggggcggcggcggcggcgtgaggagcgggcggttgttgtttcggggttttttggttcgagtttttagttttcgattttcggcgtttcggcgttcgatta

SEQ ID NO: 3883 - DNA, 201 bp, Artificial Sequence
  Description of Artificial Sequence: Synthetic polynucleotide
gggtttttagtttggtttttaggcgcggtggcggcggtgggatacgcgttaggcgtttagagaaggatatgggataatggtttagttcgaggacgttagacgtcgtcgttcgattcggggaaggaagtttttgtagtcggttcgggaattcgaggcggggagggaggttagttttggaggtgcgttgtcgttttaaaataa

SEQ ID NO: 3884 - DNA, 208 bp, Artificial Sequence
  Description of Artificial Sequence: Synthetic polynucleotide
gcgtcgcgtcgtcgttcggtttttcgaagtcgttttttgtcggcgcgtcggtcgtttgcgttacggcgggcgttatttatttcgggtagagttttttgttcgtgtagcgcgttttgggtttttagcgttgatttacgttcgtagtaggtgaggaaggcgtagtttggggaggaaagtaagcgttaagaagggttagtggggcgttttc

SEQ ID NO: 3885 - DNA, 201 bp, Artificial Sequence
  Description of Artificial Sequence: Synthetic polynucleotide
gtaggggggttttatttattaagttatgttttattagggcgttaggcgggcgaagtaaaggtagggatggcgggcggggcggcggcggaggtggaatgggcgttttttttttttatttggttttatttatttatttagattagaaaagcgagtcggtttggagggagttcgttcggggattcgagcgcgtatttattagtg

SEQ ID NO: 3886 - DNA, 201 bp, Artificial Sequence
  Description of Artificial Sequence: Synthetic polynucleotide
gcgtttcgtttttcgtttcggcggttttcgtagtttcgtcgtcgttcgcgttcgcgttttggagtcgcgttataaagggttcgcgcgtagtcgtcgtcgtcgtcgtcgtgcgaggagttaggatggttttggtttacgtcggttatttcgtgtttttagtgtttggttttgtgcgaaatagaggtatcgtttttttttttc

SEQ ID NO: 3887 - DNA, 595 bp, Artificial Sequence
  Description of Artificial Sequence: Synthetic polynucleotide
aggaggttaggaaagtttattatatgcgttggtttcggttgtcgtacggtatttttatggttatcgggatgatgagcgtatttattttgggttcgtggattgaggacgaggaggaagaggaggaggaagaagaagaagaggaagaggaggaggaggaggaggaggacgcgtttaggttgagatggttcgcgtggatattgttatttattttaagattgttgttttcgtcgtcgtcgtcgtcgtcgttgttgtcgtcgtcgtcgtcgttattatttgttatagttagtaacgggtagtcggcgtaggggttcgggggagtttttttcgtcgttagcgttattttaaatatttattaatagttatattgttgttattgttgtcgtcgtcgtcgtcgtcgtggagcgcgggaggggggcggggaggcgtttgggttcggggcgttgtgcgcgatttggcggggtgcgtcgagatatatatagcgagtcgtcgtcgttcgttcgggggggagggggatggagtgcgcgggtagtttttttttttcggttcgcgtttcgttcgtttcgggttgcgttggtttcgagcgtcgagagttagg

SEQ ID NO: 3888 - DNA, 201 bp, Artificial Sequence
  Description of Artificial Sequence: Synthetic polynucleotide
tatcgtcggcgtcgaggcggcgtttatgtttaatcgtcgtcgttatcgtcgtcgtttgtttttgcgttcgttttcgcgtttgttgttttttcgtcgtcgtcgtcgtcgtcgttattatagattcgtagatatatagttaagatttttgatttttaatattaatttttttttttggggaggggaggggacggagggaagggg

SEQ ID NO: 3889 - DNA, 269 bp, Artificial Sequence
  Description of Artificial Sequence: Synthetic polynucleotide
ggtgtgatgttttcggtggataatgtttttcgttttttgtttcggggtttagatagttggtgtttaagcgtttataatgtagagttttttgtatttttttcgggtcgttatttgtttatttgttttatttaggatatttttttaaataatttttaagtggaaaaattacggttttttaggagatttattcgggaacgaacgtgcgtggggtagtttaaatttttgagtttagatttcgtttttcgcggttagatggtgcggtcggtggg

SEQ ID NO: 3890 - DNA, 201 bp, Artificial Sequence
  Description of Artificial Sequence: Synthetic polynucleotide
ttagtttgttatcgtacggcggtcgggatcgtagtttttgggtgcgtagtgcgtttttcgttgcgtttttttagagcgcgggtttcgtgtttgtgttcggcgcgacgcgatttttttgttagtcgggtttcgcgtgtttttcgcgtttttcgtagttttcgcgtagttcgtagcgttttttagtttcgtttcgcggtcgcg

SEQ ID NO: 3891 - DNA, 267 bp, Artificial Sequence
  Description of Artificial Sequence: Synthetic polynucleotide
gtaggagtttcggcggtttgtaggggcggtggcgcggcgttgggcgcgcggtcgttagatggtagcgtagtttcggttcggttcgcgggaggcggttacgcgcgggggacgcggggcgcggcgcgttgagcgcgggtgtcgaggttggagggcgcggtcgggttttcgagtttttttttcgcggtatttttgtttttatttttaaatgttttgtaagttaggagttttcgtaggaatcgttgtatttttatttttttttaaatttta

SEQ ID NO: 3892 - DNA, 287 bp, Artificial Sequence
  Description of Artificial Sequence: Synthetic polynucleotide
ggcggtgtgtagagtggggtttgggttttttgtttttaagggtagttgggtgggtttcgtgtttttttcgagtggatttggtttcggttttaaatttagtcgagggtcggttcgtttttggggattcgcggatgtcgcgagggggcgtcgcgttattgaaggttgggacgggggcggtgcgcggggcggcgtcggagttcgggatgtcggttttagagacgtcgcgtttcgtttcgaggaggtcgtcggtcgggtaagcggagttcggagttcgcggagtttggatc

SEQ ID NO: 3893 - DNA, 201 bp, Artificial Sequence
  Description of Artificial Sequence: Synthetic polynucleotide
ggtttgtttcgagcgcggcgggggcgtcgggggcgtcggtttttattttgtagggtatcggcggcgggaggaggggtcggcgtttacgggttttcgttttcgcggcgtcgcggattaggagttggaattgttgcgggagtgtttgggagtcgtcgtgtttgttcggttgcgtaaggtggttttcgcgttggtgttaggtcg

SEQ ID NO: 3894 - DNA, 201 bp, Artificial Sequence
  Description of Artificial Sequence: Synthetic polynucleotide
gcgtttgttcgcgttttgtttaggtggtttcggcggtttcggcgattttttgcgagcgttgttgtttttgaaggcgttgtagggtttgcgcgtggagtggcgcgggcgggattcgcgcgggtcgggtcgggtatagcgtagcgcgggggttatcgtcgtcgacgggtcgtgcgcgttgcgcgagtttagcgtagattttcg

SEQ ID NO: 3895 - DNA, 286 bp, Artificial Sequence
  Description of Artificial Sequence: Synthetic polynucleotide
tttagggggcgttttcgagtcgcgtttcgcgttcgtttttaggagggttttcgcgagtcggttgtatatttcgaggcggtttcggttgtataatttggagcgagttgtttcgtttttttattttgggggcgaagaagggtcggggagtgggggaaagcgggaggcgtcgcggtttgggaggttttcgcgggttttagcgtcggtcgtattgcggtttttttcgcgcgtcgtcgtcgtcgtcggttttttttcgtttcgttttcgcggttttcggcgtttttcgcgc

SEQ ID NO: 3896 - DNA, 244 bp, Artificial Sequence
  Description of Artificial Sequence: Synthetic polynucleotide
tagtagattttggcgtggggtatttgagattttcgttattgaaaaggcgttatagaaatgtaaggaattatgattttaataaaattgttttatttaggagcgagtttttgcgttgtttttgtcgtcggagttcgggtttgttacggtaaagtttgtaattagagaaaaatattagttttgttgagggttagaatatattattggttaatgtgtgtggttttttttttaaataatgttaagtatt

SEQ ID NO: 3897 - DNA, 201 bp, Artificial Sequence
  Description of Artificial Sequence: Synthetic polynucleotide
gtgggtcggggatttcgttgttttgtttttttagcgggaaattgattgtttgagttttggaggataaatagagatattggggggttaacgggggcggtcgcgggcggggttttaggtttttatttatcgggttgttgagcgcgtacgtagttattcgagggaagattttcgtcgttcggggtttcggagaggggttagaat

SEQ ID NO: 3898 - DNA, 372 bp, Artificial Sequence
  Description of Artificial Sequence: Synthetic polynucleotide
gtggtattagcgaatgtggtggatttcggtaggtttggggtaggggaattttcggtaatattttttagtatcgaaggtaggatttttcggttattttcgtcggttggaatttttttaagtattgttttgagtttatttttaaatgaaagggggaaaaatttaaattagattagaatttgaaatagttgaaatagttatcgatttttagtttgtttttaagtttggtagagattgtgaaagttttaattttttcgcgatgttagttacggttcgcggcggttacggagttattttagtatttcgcgatggatagtgattttcggcgtggcgcgagttttttgcggtttttacgcgggtttgggcggcgggttt

SEQ ID NO: 3899 - DNA, 201 bp, Artificial Sequence
  Description of Artificial Sequence: Synthetic polynucleotide
agttagttttataatttgcgatcgatttttttttgtttagttcggttttagttttttttagttataagatggtaatagcgtcgatagtcgggtttcgcggcgttttgttttttttttgttttggtttggagttttttttgggtagttttgtatttatagcgttgcgttttttttagattgtgtagggagtacgggagggtt

SEQ ID NO: 3900 - DNA, 247 bp, Artificial Sequence
  Description of Artificial Sequence: Synthetic polynucleotide
gttttcggggggttttggcgttttagttgtggattttttaatattcgtaggttatagagttatagaggttggatttttagtagtagaggatatagaagaacgaagacgagacgtagagttttaattgtagttagagataaaggtttcgttatatttcggaagtcgttttgtttttttttgtttcgtgtttgattggacggtttttagtttagcgtttttgattggataatttttaaggttttgtttt

SEQ ID NO: 3901 - DNA, 201 bp, Artificial Sequence
  Description of Artificial Sequence: Synthetic polynucleotide
gatttggcgcggtttttgtttttcgttgtcgtcgaagttttaattttcgtttgtttgttttgtgttttttgtacgtagaagtttagtttgtgtggttttgcgatttgcgggtattgggagatttatagttaagacgttagggttttttggaagtttagaaatggtgagagtgtcggttcgatatttcgagagagggaacgg

SEQ ID NO: 3902 - DNA, 201 bp, Artificial Sequence
  Description of Artificial Sequence: Synthetic polynucleotide
ggcgttttagttgtggattttttaatgtttgtaggttagagggttatagaggttgggtttttaagagtaggggatataaagtagggaagacgagattaagcgttttagttgtagcgagagataaaggtttcgttaaatttcggaagtcgttttgttcgttttagttgcgtgtttgattggacggtttttagtttagggttt

SEQ ID NO: 3903 - DNA, 235 bp, Artificial Sequence
  Description of Artificial Sequence: Synthetic polynucleotide
tttggtcggattgcgcgtttagggtttttcgcgtttgttagttttcgttttgcgggtattttttttagtatcgggagcgcgcggttgttcgttttcgtcgcgatcgtggcgttagtttttcgttttttttgtttcgttttgagtatttgttttgcgtttttcgttgtaattttttatttttcgtttggattgcgggtttgggtgcggggtgttgtaggtttgtaggggacggggt

SEQ ID NO: 3904 - DNA, 201 bp, Artificial Sequence
  Description of Artificial Sequence: Synthetic polynucleotide
atttcgcgttttttagttcggagtttatttgtataattggattttttttttttgtttttttttttttttttgaaatttgtttgaaaatttaagtgaaaatcgcgacgatttgtatatttaaaagtaagtgttaagtaagtgttttgcggtggtttcggcgcgtttcggggtgagcgcgtaaagtcgggagcgaggtgtcgc

SEQ ID NO: 3905 - DNA, 201 bp, Artificial Sequence
  Description of Artificial Sequence: Synthetic polynucleotide
gggcgcggttttgggagcgggggaaggtgaggggaaatgggatatgatggtattaataatcgttattaaagacggtgggagtaataaaggaatgcgttttcgagacgtcgtttagtttcggggtgttttttggcgcggtcgcggtgtaggaacgcgagtttcgtcgtcgagtttttcgtcgtttgcgttcgttggcgcggc

SEQ ID NO: 3906 - DNA, 201 bp, Artificial Sequence
  Description of Artificial Sequence: Synthetic polynucleotide
gttcgggcgcgtcggttggggttttggcgttttcgtaggtttcgaggtcgatagtttcggcgagggcgggcgtttcgcgttttagtatcggttgtttgagcgtttttggagtagtaaattttagatttttttttttttttttttttttttttttttttttttttttatttttttttttttttagttttttttttttttttt

SEQ ID NO: 3907 - DNA, 201 bp, Artificial Sequence
  Description of Artificial Sequence: Synthetic polynucleotide
tttgttttaaaagtttatagtatgttttttttttttttagatcgggagatagtgattttatttatacggtaagattaaaagttttcgttcgtttagtttgcgggtttgggttgggtttagacgttttttaggatgtagatgcgtcgtcgttggttttttcggttataaagtcgtttttagcgttttttcgcgcgtaggagc

SEQ ID NO: 3908 - DNA, 201 bp, Artificial Sequence
  Description of Artificial Sequence: Synthetic polynucleotide
gggcgaagcgatttagcgcgaggattagtttttaattaattcgtttttagttttgggcgttttttttagtagttagatgggggttttagaggtcggtgcgcggttatatggtttcgggttaggtagggggtcgtggggacgtatttgcgttaggcgtatagtatttttgggcgcgggacgggcgaagcgtcgtgggtttta

SEQ ID NO: 3909 - DNA, 296 bp, Artificial Sequence
  Description of Artificial Sequence: Synthetic polynucleotide
tgtttttattttttatcggggttcggttggttagaggtaagtttcgagattttttattaattattattatcgttgcgagggtcggtgaggttgtagataacgtttgtaaggacgggagtcggggagggtgtagggcgagtttaaaggacgggtagagtaagtttcgggaagaggtaggggttttttttttcgggtcgtcgtttttcgtattttcggagttagtcgtagttacgtagcgtcgtttgtcgggtatattaaggatttggcgcgtacgtggcgtttatttttattttcgg

SEQ ID NO: 3910 - DNA, 201 bp, Artificial Sequence
  Description of Artificial Sequence: Synthetic polynucleotide
agtttacgggttagtttggcggggttcgacggcggcggcggtggcggtagcgttcgatttagcggtattagtttgggttacgattagcgttacggtagttcgcgtttcggtcgttcggattcgcgtttcggtttcgggtcgttttcggtgggtagcgttcgttttagcgtttttagtttcggttttcggggttcggtcggc

SEQ ID NO: 3911 - DNA, 201 bp, Artificial Sequence
  Description of Artificial Sequence: Synthetic polynucleotide
atttattggttgaaagtttcgtttattttagggtgattgagagcgttttttttttttgtgttgtttggaaacggattgttcgtttagtaatatttgattacgttttttattggttatcgttttcggaagttcgttttttcgttttcggaattttcgtaggcgttgggtttgtagatggcgtttaggtatatagtggcgagt

SEQ ID NO: 3912 - DNA, 266 bp, Artificial Sequence
  Description of Artificial Sequence: Synthetic polynucleotide
gaaagataaaagggaaagcgtttttacgaaattcgtttacggatacgatttcggggttatatttagttagacgaatgtttggtaaatgatagttattttacgttagatttttatagttttttatacgttatttttattgttttagggaattataagtataggtatcgtttcgttcggcgtttttttttaaagattggggtattaggatcgcgggtttttatttttatttagtataaagagttcggcgtttagagttagcggttttt

SEQ ID NO: 3913 - DNA, 201 bp, Artificial Sequence
  Description of Artificial Sequence: Synthetic polynucleotide
tcgtaggttatttgtgtgatttcggtgcgagtggaggttggtatcgtttagtgcgaggttgttatttcgtgtgtttgtttacgttttgtgtgattgggtgcgaggaagttaatggtatcgtggaatgtgaggttgtgagttgaggcgggagcgggcgattgttcgttgtattttgttgggtcgatattcgcggtttttttg

SEQ ID NO: 3914 - DNA, 228 bp, Artificial Sequence
  Description of Artificial Sequence: Synthetic polynucleotide
tagagtttaggatattttaggttttttttgattcgattggaatttattttttacgtttttttggttttaattaatcgttatttgtatgtataaatggaaacgatagggtagagggttagtagttattcgcgtttgggttcgtagtttcgggtacgttgtagtttcgtattcggttgtttacgttcgggattatttattgtgttttttcggaattgtttagcgtgtttt

SEQ ID NO: 3915 - DNA, 248 bp, Artificial Sequence
  Description of Artificial Sequence: Synthetic polynucleotide
agattttagatatttattttaaatttaggttttagcgttttgtaggggatttttattttggggcgtttatttttgattttttttttgggttttttcgttacggtcgagtttaagtggttgaagcgcggacgaggatgcgcggggtttcggtttttaattgtattataggtcgtatttacgaatttggttcggtatagttattatcgttcgggtttttaggttttagggttgtagaagtttagtttcgg

SEQ ID NO: 3916 - DNA, 387 bp, Artificial Sequence
  Description of Artificial Sequence: Synthetic polynucleotide
gaggcggttatcgtagcggtcgttaacgagtagttgtacggaggtgtagaagaaggaggttattgttatttttttgataagttgggggcgtgggaggtttcgggagttcgaagtcgtttcgagcgggggtgggcggtgagcggattttcgggtgttgattaggtgtttggtggtagagtagggaaggggggaacggacgtcgattttagggattttttattcgtttacgttttttggcgttggttatacgtcgtcgttttagtattaattggaggtttttagtggacgagtagtcgttcgagggtagtcgtttgagtcggtagatagcggttagttggggtagcggttcgaattgttttcgtaatacgttttttagtatttcggttt

SEQ ID NO: 3917 - DNA, 203 bp, Artificial Sequence
  Description of Artificial Sequence: Synthetic polynucleotide
cgttgtttttttgtgcgttatcgggggtttgttttgggtttgttcgatatcgtggttgttcgtttatttgagcgtaggtttttattttgtgttagggtcgcgcgtggttttcgtttgcggtttgttgggtttcggcgttataggtattgcggtttcggcgttcgtacgcgggggattgggcgggggttggagagtttaggtcg

SEQ ID NO: 3918 - DNA, 203 bp, Artificial Sequence
  Description of Artificial Sequence: Synthetic polynucleotide
gttgcgtttcgttgtttagttcgggcggtttatcgttttttttgtttgggtggacgtatttttgtttttcgtttttattggcggtagttttcgtggggcgcgcgtggggggcgttggggtttttagttttcgtttcgagttttttgtcgcggcgttgttagtttcgggggtttgggttttatttcgttttggttttgttcgta

SEQ ID NO: 3919 - DNA, 312 bp, Artificial Sequence
  Description of Artificial Sequence: Synthetic polynucleotide
gtcgggggggcgttcggggcggcggcggtggcggcgggcgggggtaggtcgggttgcgaatatatttcgaagttgtcgtcgtagtagagggttatgtcggcggtcgtgggcggttgcggcgcggtcgcggcgaggggcgagcggggttggtttcgtcgttcgggcgagagtatttttttgggggttaattttgcggtttcgtttttattcgcgttgggcgttcggtgtttcgggtcggggtcgggcgggtgttagcggagcgtttgttagtcggttttttataatcgagttcggcgcggttttttttgggtc

SEQ ID NO: 3920 - DNA, 407 bp, Artificial Sequence
  Description of Artificial Sequence: Synthetic polynucleotide
tttcgggaggtttaggggtacggcgaggggtcggggaaaggcgatcgtttattatagttcgcgcgtttagattgagggaggagtcgggttgtagaatcggcggcggatggagacgggagggaggttgcgaggtcgttcgaggagagattaaggttttagaaacggagaagcgggcgttttgcgggaggcggcggcgttgtcgttggtcgttaagggcgggaagtgttttgggatttttattaggggtcgcgagtttcgagcgttaaattttcgcggcgttcgtttagcgcgttgttgtggcgggcgcggagggcgcgcgtcggtagtgggggttgcggcggcggagggtacgggttttcgtttagcgtttttatttttttggtgtagttgtttttcgcgagtcgaga

SEQ ID NO: 3921 - DNA, 295 bp, Artificial Sequence
  Description of Artificial Sequence: Synthetic polynucleotide
gcgttcgtttcgcgcgtttttgtatttttcgcgtcgtttttcggggtttcgcggcgttcgtaggtcgcgtcgttttgtcgtttttttttcgtggtttttacggttcgttcgttttttagtagttttggggtgttcggggcggttttgtaagcgggagagagcggcgaggcggcggcgtcgagtgcggggggatgcggagtcgtgttcggttttgtcgtatttttcggtcgttcgttcgcgttcggtttcgttcggttttgttcgggttgtacgtatttttttcgcggtttagaat

SEQ ID NO: 3922 - DNA, 435 bp, Artificial Sequence
  Description of Artificial Sequence: Synthetic polynucleotide
tttggttcggtttggttagttttcgcggtttttgttcgggttgacgtttaggaatgtggtcgacgagaagttttaatagtacggcgtggttttttagtttcggtgagtattcgtcgtggggaagggttttggggatttattggaggtcgcggttcgtagtagttaggggtcgagttacggttacggacgttttggtgtttcggttcgtgtcgggtttttaggcggaggaggcgttcgttgggtttagattttcgattttagtttcggtttttcggcgtttgggttgcgcggagtttttgtttcgcgtttcggatttttacgcgtagtttttacgcgtttcgagttggagaagtcgttagttcgtttttttagggcgtgtcgttcgttttttgtttttttgtgcggggtatgtgaaatgtgtggggttagaattgt

SEQ ID NO: 3923 - DNA, 410 bp, Artificial Sequence
  Description of Artificial Sequence: Synthetic polynucleotide
tttttggagggaagttcgtcgggaagttgaagatagtggttatcgttttcggttattatttttcgggattcggattttaattttgcgttatatttttattcgtttttagtcgtgttttggttgcgtagttggaaaggttgagtagtttattgttgtttttttgttcggttttggatatatcgtttgaatttttgggcgtttttgttgttaagtgggggatagtattatttattggggaggaaaattttaggaatgtggattttggggttacgtaggggttgggaagtgaagggtagggaacgcgggcggcgttcggggtttgcgggtaggtaggcggtttggtcgcggaggttttttcgagttttgcgtttttttagagagggaggggtttatatcggttggtatagtta

SEQ ID NO: 3924 - DNA, 392 bp, Artificial Sequence
  Description of Artificial Sequence: Synthetic polynucleotide
ggagttcgttgggcgtgttcggttcggttcggtttcgtcgtacgttcgtttttttggtttggttgaggatttcggggtttggacgtgttaacgttattttcgcgcgtcgaagttgtgacggtttattaagtagagatttgcgaggtatatagagagggaatgaggcggaatcgttcgggggttcgttgatattgtagagtttttcgtagtatcgttgttttaaatttcgtttttttaggcgtgcgcgtatagcgagttagaggaggtttcgtttcgatttggggtttttcgcggtttttagttcgggggttcgggttttcgaagagatttttggtaatggtagaggttttaaagtttagatgttaagtttcgcgatggggcggatgttttta

SEQ ID NO: 3925 - DNA, 203 bp, Artificial Sequence
  Description of Artificial Sequence: Synthetic polynucleotide
agagaagacgttaggttgaggttttagcgattttaggtattagtttcgaaggagggcggggagatcgtaaaggggaagtgttcggagggttaacggttttcgcgtattttgcgtttttttgaagcgcgtcgttttttcgcgtcggggattgggatttgtttttggggaattcgtttagaagacggcggcggattggggtcggg

SEQ ID NO: 3926 - DNA, 398 bp, Artificial Sequence
  Description of Artificial Sequence: Synthetic polynucleotide
aaaattgcgggagtttatttattgcgtttaggtggttagtttttgagttttttttattcgtggttttttgtcggtatgtaggtatgtataagtatatcgtcgagtaggaggatttaacgaatttagtttgtggatatgttttaatttttattttcgttttttttaggtttgtttaggtgaggatgatgggagggaaaagcggtgtatagtcgtaatattggtattttgtaagagtcgtcggggtattgatatagagggatatcgtattggagatgcggtgtttacggagatttattgcgcgcggtgaaatattttaagtatcgcgcggaataattgggtttagtttttttatttcggattttttttaggattatacgttattttttattttcgaattt

SEQ ID NO: 3927 - DNA, 286 bp, Artificial Sequence
  Description of Artificial Sequence: Synthetic polynucleotide
tgtagagtttgaattttatcgtttagaaggaaaggtgagtgggggattcgggcgggaggtgaggtttgtcggtagcggtttttaggcgtgttgggtagtacggttagtagaggcggcgtttggttttggatgttgtagcggagacgttaaggagattgaatgtagggagcgaggcgtagcggtcgcggagggtggggtcgttcggaaatttaggcggcgttagttttgtagtatttgtaggtcgggggcgcgtatacgaggggtacgtgggtgtggaggaatcggc

SEQ ID NO: 3928 - DNA, 267 bp, Artificial Sequence
  Description of Artificial Sequence: Synthetic polynucleotide
ggttgttaaggaggcggggtggttagcgcggggggtggaggatgggggtaggacgcgggagggaagggtagggggtggggggcgaggtttcggggattagcgcgcgagagtgtttagttgggaaatgtagtttcgaattaatatcgtatgttttataattagtttacgagtcgatgtggggaaagttatttttagatggggaagagtagttcggatttttttaaggacgttttttagttagattagggaggggagaaggagatgggg

SEQ ID NO: 3929 - DNA, 260 bp, Artificial Sequence
  Description of Artificial Sequence: Synthetic polynucleotide
tagagtcgtttgtatttgttcgtattttttgggaggttgcgatgatcgtagttagggtggtcgagcgttcggtttattgtattcggcggttgttttgtagcgtttttggtatttagggaatggtttgtaaattttaatgtattatagattagtttttatcgtggagtaggaaaggcgtttattagttaggggtaatcggttttgtagatttgggcgggggcgtagggggaggggcggtggtgtaaatttatcgtgatttt

SEQ ID NO: 3930 - DNA, 239 bp, Artificial Sequence
  Description of Artificial Sequence: Synthetic polynucleotide
gaaggtaagttttaaatttttgtttggaagacgggttgtcgcggttgtattattagtaggaggaggaggagaagaaattatttcgcgatattttattttgcgggtgttttgtcgttgtcgtttttgttgtcgtcgattcgagttcgcgggttcgaatatcgtagcggtggggacggtgggttcggcgggcgtcgggaggaggatattagcggagttttgtattttcgtgtttcgtttat

SEQ ID NO: 3931 - DNA, 846 bp, Artificial Sequence
  Description of Artificial Sequence: Synthetic polynucleotide
gttggcgggttttggttttcgaggacgtagatatgtggtttgaattttcgtttttttagtcgttgtttttgtgtatttttttgggcgtttttagcgaatgcgagcggcgaggcgagggcgagcgcgtcgaggaagggcgggagaggcgcggagtttggtcgcgtcgcgttgcgtcgagcgtcgggtttttttcgcgagtttttcgggttcgcgcgcgcgttttttattgttttcgtttttcgcgcggcgcgtgttttttatttttcgtcgcgcgttttcgtattcgttcggttttacgcggcgcgcgtttgttttggcggtagcggcggcggcggcggcgcgttttttttcgaacgtcgtttttagggttgttggttgcgttttttattgtttcgcggttgttgttcggggtgggcggcgaggcgggggggaggtgtcggtttggtcgtcggggagggtttatcgttcgggcggatttttattgcgagagcgatgcgggtttaggcgcggcgcgcgggggttgtagggcgtttagtattgggggttgtcggcgcgcgggggtttttttttggtttttaggtattcgttgttgttgggcgtttttcgtattttcggttattatggatatttcgttttttcgtcgtttttttcgcgtatttcgggaggtcgtcggggcggtagtagcggcgcggtttcgcgggtgtttaggtgatcggttcggtagcggtagagtagtggtagtagtcgttattgtcgttgttattgcggtcgtcgtcgttggagagaggaggacgaggagggtaaggggtagaagtaggttttgttttgtttgttttagaggttatt

SEQ ID NO: 3932 - DNA, 526 bp, Artificial Sequence
  Description of Artificial Sequence: Synthetic polynucleotide
tgttgttttttttcggcgttttgtttttttataattggaagtcgcgaaggcggttattgcgttgagtcgttcgttttgttggttaagtttgggcgattcgcgcggaggagggtcgggttgattgtcgtcgttgagttgttttcggacgggagcgtttgtttacggtatttattttttttagcggtggaaatgtggagaagtaagtgggaggcggtgtcgggaattgattttttttaaaacggtcggcgtcgttgttttgaaatgggcggttaagtgtttgtgggattaagggcggttttagagatgttcggaaaatcgttgttacggttagagtgcggcgtagacgcggtagagttggaggtgttcgcggtgtaggttgttgtttacgtcgtttaggttaggtgttgagggtttagttcgcgtttcggtcgaattatttttagtttcgttgagttatttcgttcgttcggtttttatcgtatcggttagaggaaagttttcgcggtttttacgtttttttatagtt

SEQ ID NO: 3933 - DNA, 201 bp, Artificial Sequence
  Description of Artificial Sequence: Synthetic polynucleotide
gtttcgttcggggatttagggaggagggagagaggagggagggagtgggtagtttgggcgtacgttatcggttttcgtacgttcggtatttttcgtggcgcggcgagttaatgggatttgtatattcgaggtgtaatagtattattgtattaattattatttttattttacgtttagattgtttatttatttgcgggaaat

SEQ ID NO: 3934 - DNA, 523 bp, Artificial Sequence
  Description of Artificial Sequence: Synthetic polynucleotide
tgttttgtacgcgtgtgtacggttcgtacgaggcggtcgggttcgttagttttttgattatagcggtcgcgttagggttatcggggttcgcggttgtagtcgtagttgttgtagtcgttgcggttgtcgttatttggtaggaggtatagggtatgggtgagggaggttgcggtagcggttacgagttgttgaggaagttagattgtaggtatttggggggcgttaggtagtcgtagtcgtcggtttcggcgttcgttacgtcgtattcgtttgcggcgttttcggtttcgaagagttttttgtcgggttggaagtgcgcgggcggcggtcggaagggtttttttatgcggcggcggcgtcggtagttgtttttttcgaatatgttttcgtaggtcgggtttagcgtttagtagttgtttttgcgttcgtcgtcgttttcgcgcggtattttgatgaagtattcgttgaggttgaggttgtggcggatgttattttgttagttttttttatttttttcgtagaa

SEQ ID NO: 3935 - DNA, 276 bp, Artificial Sequence
  Description of Artificial Sequence: Synthetic polynucleotide
gttattttttttttttcgtgacgttacgggtcgtttcggggtgagcgtttgagtcgtttcgggttcgcgttagtgagcgcggttgttgtcggcgagttagcggcgtagcggcgggaattcgaggtcgagcgtcgcggcggtagcgttagaagcgtatttatcgggtacggcgaggcggtttacggtgcggtaggtatcgggaggcgagagtcggcgcggatagtaggcggcggttgtagttcgttggcggttgttgcgaggatgttgtttgggcgg

SEQ ID NO: 3936 - DNA, 357 bp, Artificial Sequence
  Description of Artificial Sequence: Synthetic polynucleotide
aggagggaggtagggtaggtttgagggtgaaagcggtaaggatttaggtttaagttggatttgtttatttttttttgtcgtagtttttttggtttttgtgcgttttggattttcgaagttagttttttgcgtagcggattagagaggtttattcgcggacgttaatttaatttttgggcggggttcgggggttgagtagaaggcgaggtttggggagtacggataattttgagggttgtttgtgtcggggtgggagcgtagtgggtgagtttcgagttttggtttagggacggttagagtagggcgttggcgcgtcgtggggataagtaggtgtttgtttttgtttgggggaaggat

SEQ ID NO: 3937 - DNA, 278 bp, Artificial Sequence
  Description of Artificial Sequence: Synthetic polynucleotide
tcgggcgttgggtagttttcgtcggtcgtcgtcggagtttttgtgtttacgtcgggggcgtcgttgtaggtttaggagaagattcgtgttttcgagtagtcgtttttaaaaattaaataaattaataagagaattaattaataggtagcgttgcgatcgttaggagcgcggagcgcgcgaggtttagcggttttttcgttaagtttttgttatcggcgcgcggtcgttcgcgttgcggtagcggcggcggcgcggttgattgcggcggtagcgcggta

SEQ ID NO: 3938 - DNA, 336 bp, Artificial Sequence
  Description of Artificial Sequence: Synthetic polynucleotide
gtttcgtatgtggggtataatgaaataagagtagtttcggttagaggtttagtaaagcggaaagacggtttcgttcgtatattttttcggaaaattgaagcgttttttttgatttttaaggttagaaagatttattatttttttcgagagggcgtagttatagatttattagagagggcgggtagggtgtcggaagttagagaacggcgtttcgcgtttttttatcgttttagggcgtagaggtgtttttagtgttcggagaggttggtagtgtcggtttcgagggaagcgtggagcggacggtcgataggggatttttgtttaaattttattatt

SEQ ID NO: 3939 - DNA, 311 bp, Artificial Sequence
  Description of Artificial Sequence: Synthetic polynucleotide
cgcgtgttttgttttcgtagtggtttcggcgtttaggacgtcgttggttcgcgttttttttcggaatgaaggtgtttcgtaggaaggcgttggtgttgtgcgcgggttatgtattgttgttggtgtttattatgtttaattttttggattataagtggtataaggagtcgttgtagtagtgtaatttcgatgggtcgttgggtgtcgtagcgggggtagtcggaggtagttgggggcgtttagggtcgttttcggtcgggtcgtttcgtgtttatgttcgtttggattttcgtattttttatcgttttttc

SEQ ID NO: 3940 - DNA, 201 bp, Artificial Sequence
  Description of Artificial Sequence: Synthetic polynucleotide
tataggtaatagagataaggttaggaggtaaagtatatttatgtgtaaatgagacgcgttagggaatttgtaattttttgtattttcgtttttgatgtttcgatttttataattatagaattttaggtagaggtcgtcgattttttcgttttcgttaagagggattcggagtatcgaagttttttagtcggtgtcggcgtt

SEQ ID NO: 3941 - DNA, 201 bp, Artificial Sequence
  Description of Artificial Sequence: Synthetic polynucleotide
aaacgtttttttagaaaataagttattaatcgtacgagagaaggagaggaaggtagtaatttaattttttgcggttcgcggttttgaagattaggaggttcgttttagtagggtgaggtttatagaatgtatcgcgtcggttgcggttttttaggggtcggttattcgagttttggaatttcgagaggcgcgaagtgggag

SEQ ID NO: 3942 - DNA, 481 bp, Artificial Sequence
  Description of Artificial Sequence: Synthetic polynucleotide
cgcgattgtatttggggtagtttcgtcgcgttttagtcgtttttcggtaggaagcgtaggtgtgtgagtcgattcggagcgagtcgcgttttcgggttagcgtgggtagggcgtcgtagtttgcgtagtttcgaggatttcgcgtcgttttttcgagttagggtttttaggagcgggtcgcgtaggagacgttagagggggttgttagcggttgttgggagaacgggttacggaaatagttttttttaaagtcggggttatcgtggggtgggcgagttcgtttttttaggtcgggggcgcggattagaggggacgtgtgtagacggtcgcggttagttttatttcgttcgggcggagacgtatagttggagttggagggtcgtcgttcgttgggtttttaggggtttgaacgtttaggggtcgcggcgagtttattcggagcgagttaggtgagtaggtcgttatggcgatgcggtttcgg

SEQ ID NO: 3943 - DNA, 280 bp, Artificial Sequence
  Description of Artificial Sequence: Synthetic polynucleotide
taggttttttggggttatttcgcgaggtagtcgagggcgtaattcgggcgtttggggtcggaggcggaattaggggtcggggttaggaggtaggtgtaggcggttgttaattcgtttaatttgttgcgcgggtggtcgtttagagtcgcgggtttgcggggcgtttttcgtcgtcgcgtcgtcgtttttttaggttcgggagggggcgtttagggtggagttttatttatgggttgaggttttgggcgcgcggagtcgtcgtcgttttttcggttggttt

SEQ ID NO: 3944 - DNA, 252 bp, Artificial Sequence
  Description of Artificial Sequence: Synthetic polynucleotide
cggagttttagttacgaattatttaatattcgtaggttatagagcgacggaggttgaggttgtgatcgaattatcgacgtttttttgaggggtgaaagtacggtcgtggagattttaatcgagtttacgttggcgtaaaaggtaaaagtcgcgttagatttcggatgtcgttttttttttttcggttgcgcgtttgattgggtagtttttaatttagcgttttgattggataagatattaagttttttacgt

SEQ ID NO: 3945 - DNA, 239 bp, Artificial Sequence
  Description of Artificial Sequence: Synthetic polynucleotide
ttatttgcgtgttgttttcgggtttcgtttcgtttcgtttcggagggatttttaggtcgggtttagatttaggagttatttggggatttcggggtggttgcgcgtcgagggggcgttagcggggacgtgagttggcgtcgagatagtttcggttttttagcgttagggttattgttaggagattttcggttagtatttacgtggggcgttttcgggagttcgaggggtttatcgtttgt

SEQ ID NO: 3946 - DNA, 405 bp, Artificial Sequence
  Description of Artificial Sequence: Synthetic polynucleotide
aagtttgcggagcgggtcgcgtttttggttcgttcgggttttaagtttcgcgtcgtcgttttggcggggacggtgtagtaggcggcgggatgcggcggggcggtagtttgagcgtttcggatggttcgcggcggggcggtttgtaagagcgacgcgcggttgttgttggggcgggacgcgttgcggtcggcgttcgttttgttggttttcgtcgtgttgttgggcgtcgcgttcggtttcggtttcggtttttggtttggttgtcgcgcgggtcgttagcgtacgcgatattaggtgggtcggtcgagtagatagcggcggggcggggagcgcggggcgcgtggtttttgggttttgcgggttcggagtttcggttttgcgattttttgagtttggttgggaatt

SEQ ID NO: 3947 - DNA, 237 bp, Artificial Sequence
  Description of Artificial Sequence: Synthetic polynucleotide
cgcgtacggtggtgtaggagtttcggtagtttagcgtgaggaagttcgagcgtttgttttgcgcgtcgtcgtcgtcgttattatcgtgcgttttcgggttcgagggtacggcggtcgtcgtttcgcgtagtagtagcgcgtcgttgttattttgcgagacgttgttttttaggtcgttttggtagttttcgtcgttgagagagttttgtttggtgattttgggcgatagtagtttga

SEQ ID NO: 3948 - DNA, 204 bp, Artificial Sequence
  Description of Artificial Sequence: Synthetic polynucleotide
cgatcggggcggtttcgtttagggttcggggtagcggcggcgtcggcggcgttcgagttttatcggaggagagacgcgcgagagaggagtttcgtcggtgcggcggcggtaatggagaggtaagaaggagttgttgtttttttggggcgagggcggggaagtgtgagagagatttgcgagaggttttagggttgttgttcggtt

SEQ ID NO: 3949 - DNA, 224 bp, Artificial Sequence
  Description of Artificial Sequence: Synthetic polynucleotide
aggattttttattggggttgagtttttttcgtttttaatagaatttttaaatataagtagtttttttttgtttttaggagtttacgaaacgttgttatatcgagcgaatgtaacgcgtatatacgtttatattcgaatagtataagtaagagatcggttgggtgtggaatagaggcgtatatcgcgtaacgtatttatagtatgtatacgcgcgtatttcgatt

SEQ ID NO: 3950 - DNA, 278 bp, Artificial Sequence
  Description of Artificial Sequence: Synthetic polynucleotide
gttttttattcggcgttttttaggatttttaaagacgttcgtttagatttataggtatttatttgagtttttttgtttttttataatttcgattttttttcgtttttttttttttttaaaaaaaaaatttaaataatttttaaataatatttaataggaaagaagaaggaaaaggagcgtataggaagggcggaggcggtattcgggggggattgtttttagaggaggtcgttgtgagtcggcgacgcgaggttgggggagtgggaggtaaattcgtt

SEQ ID NO: 3951 - DNA, 232 bp, Artificial Sequence
  Description of Artificial Sequence: Synthetic polynucleotide
ggtggggtaaaaagtaagacgaaatttatttagatagttttttcgatttttagaggatcgatatttttttcgagggttttaatagtggtcgtttagggttcgagggtaacggtcgaggcgttacgcggggtcgcggttcgttttggttacggaggatcggatttgttgcgtttttgtgagtttgttttatttttatttattcggtgtttttcggtacgtcgatttgtttttt

SEQ ID NO: 3952 - DNA, 331 bp, Artificial Sequence
  Description of Artificial Sequence: Synthetic polynucleotide
aacgcgtttcggattttatttttgtacgtgtagttgtttttggggatgagggttatttagtttttgtcgcgggtcggggcggcgaatttggtgttggggtcgtaggttaggcggtcgtgggtcgagttggttatgattattttttcgcgggcgttttgtttgggcgagtgtttttcgtagcgttcgtatttcgtttttttcgtgtgtagtttcgcgtcgtcgtcgttcgtcgtttcggtttcggggttcggcgcgggttcggcgtaggtgatgtttacgaaggcggtgtattatttttttttttcggttacggtaaagtttaggtagagta

SEQ ID NO: 3953 - DNA, 231 bp, Artificial Sequence
  Description of Artificial Sequence: Synthetic polynucleotide
gcggttatggtggtttcgggaacgggttcggggagggagggcgcgggaggacggcgagtcgggggtatcggaggggaaggcggcggcgtagatcgtggttcgttttcggggtagaggagggggtgttaggcgggattggggagaggggaaggggggtttagttttgatcgggatttatcgtttttttcgcggggcgcggggttaggcgcgtagatgcgtttagggcgtagt

SEQ ID NO: 3954 - DNA, 201 bp, Artificial Sequence
  Description of Artificial Sequence: Synthetic polynucleotide
ttcgtagtggttttttttgtagtttttttgggtttcgcggttagtagtgtagttcgtggagtcgcggttttgttcgttttttttgggtggttttagtgcgcgggttgatatttatttagtcggggaaggtgaggcgagtagaggttggtgcggaatttgtcgtttttagtagcgtcggcgggttaagtttagggtcgggta

SEQ ID NO: 3955 - DNA, 201 bp, Artificial Sequence
  Description of Artificial Sequence: Synthetic polynucleotide
agtttaggagttcggggcgttcgcggcgggtatgaggcggcgtcggcggttgtagtaagaggacggtatttttttcgagtattatcgttatttcgagttgcgcgaggcgttcgtgttcgtgtggttgtagtgtatcgttattagtaggatttatacggtggggcgtagtttcgagggtcgggagtttttggttatcgagtt

SEQ ID NO: 3956 - DNA, 219 bp, Artificial Sequence
  Description of Artificial Sequence: Synthetic polynucleotide
cggttggcggtgtttcggcgttttatcgggcgcggtttttttaggttcgggggttcggcgttcggcggtattttttcgtaatgggagtggtttaggtcggcggcgtcgttggtatattcggggttgtaggatagggttatgttgtagtcggggggcgatatttcggggtggtcgatgagttagttatggaagtaggggttttttttatggttgtagcgg

SEQ ID NO: 3957 - DNA, 284 bp, Artificial Sequence
  Description of Artificial Sequence: Synthetic polynucleotide
gcgggaggagggcggcggggcggttggcggcggcggggttcgggagcgtcgcggcgtaggattttttagagcgcgtcgggttgagcggcggcggcggcggcggcgggcgtaggggtagggtatgattgacgcgttttttgtttgcgtttatgtgagagaaagcggtcgagggagggagcgtgtcgagttcgggttgttttttttttttattttttttcggaagtcgtttttttggagtttttcgtttttttcgtttttttttcggcggttttatttttttcggt

SEQ ID NO: 3958 - DNA, 429 bp, Artificial Sequence
  Description of Artificial Sequence: Synthetic polynucleotide
ttttttttcgggtcgcgatattgattcgttaacgttaatgggggttcgcgattgttgcggggacgagggcgtagagtagttttcgttacgggtcggtttacgtaggggtcgagaaagtggcggagaggcggtggtcgaggtttaggggcgagcgcgggttgagttggtttttgttgcgtttacgagcgatatttattttttcgttgcggacgtttcgcgggcgttaggttgggggttttgcgatcgatttttttcgttttcgaggtatcgtcgggttcgtttggtaggtagcgcgtttcgcgagttggagggtcgagtttcgcggggtcgtggggcgtgtgggtgaaggcgatatttcggatgcgggacgtatgaatggtggtagagtaggggtcgggattcgtttatgggttgggagagagatgtttt

SEQ ID NO: 3959 - DNA, 283 bp, Artificial Sequence
  Description of Artificial Sequence: Synthetic polynucleotide
ttcgttattattgtttaatcgagaattagtaacgtttttcgtcggtttttattttacgtcggaatggatttttagaatttattgcggtcgtaagatagttcgtaagagttggttaaaatgtttttaggtgcgtgggggtttcggggttttagttggagttcgatattttgagattggcggttcgagggttgtagggtcgtttcgggcgtgcgtttatcggttttgtatttttgggtagtcgagtgtcgcggagaacgttttattttttttatcgcggtttttt

SEQ ID NO: 3960 - DNA, 241 bp, Artificial Sequence
  Description of Artificial Sequence: Synthetic polynucleotide
tcgtttatatcgttttttttttgtaggtgaggaatggggtttgtttcgtttggaatgtgtttttgtcgggttttgtttgatttttattttttagtcgggacgcgcgagttttttcgtttggttgagttaaaaagggatcgcgcgtatttcgtcgttttttattacgaagcgtagatataggaggttgtagggttagtgttgcggagaattttagacggttttatagtcgtcgttattcgcg

SEQ ID NO: 3961 - DNA, 244 bp, Artificial Sequence
  Description of Artificial Sequence: Synthetic polynucleotide
tcgtcgtttttatttcggggcgcgtaggtcgaggaggatttcgttgattacgaagagtttgaggatttttcgagtttgttagatattcgtagtatcgtttcggacgattttttttattttttcgaggacgaggaggagtacggcgtcgagagcgcggagagcgtttcggagggcgtttcggaaagcgtttcggagacggcgatttttttgcgcgtcgtttgcgttaataacgtggggttgttgc

SEQ ID NO: 3962 - DNA, 225 bp, Artificial Sequence
  Description of Artificial Sequence: Synthetic polynucleotide
ttagttcgggaagaggcgtgcgcggcgtcgttcggttttagggtaaggttttgattttgtttaattgtagtatttttcgtttttgttgtttgagcgcggtcgcgggataagggatgttggcgggcggtaggggcgagcgtcgcgggcgagaggcggttttcgacgcgagtgcgtagcgttcggttcggcggttttttcgagttcggcgagcgtagcgttttttgt

SEQ ID NO: 3963 - DNA, 249 bp, Artificial Sequence
  Description of Artificial Sequence: Synthetic polynucleotide
gagtttggggtcgtcgcggcgttcggcgtcgagcgttttcgagttgcgtttcgcgcgcggttcgcgttatttgtgtcgtcgtcgttttagtcgtcgagggcgaggtttttttcgcggcgcgcggtagttttagtttttatttaaatttcggcggtcggttcgggcgttcggttagtgagggagcgttcgtttcgtcgtcgaaatcggtttcgggtgcggagtatgtttagtgtcgtcgcgagagcggcg

SEQ ID NO: 3964 - DNA, 255 bp, Artificial Sequence
  Description of Artificial Sequence: Synthetic polynucleotide
gtatagtagatggtacgagtacgtgcggcgtttagtttaggttttcggaggtagttgagttggaaatttcgacggaaagtatttataagtttttattttgcgttggtttattcgcgtgtacgtttattttttacgcgcgtttttggtttagaagcgtatagatgtttattgtttagagtcggtatcgttggggagatcgagcgatttgcgcggcgtatagtgcggcgttggtagggttttgggttttcggtcggg

SEQ ID NO: 3965 - DNA, 243 bp, Artificial Sequence
  Description of Artificial Sequence: Synthetic polynucleotide
ttagtagcgtcgtcgttttttagcgtcgatgttttagtcggcggggcggttgaggggtgagggggaatttcgcgggcgggggcgagggagcgtgtgtgcgcgagcgtgtgcgcgcgcgaggggagcgcgtgcgcggtgaggacgcgcgtcggcggttggggcgggggcgggggtcggggcgtttttgtgggaagggaggggtgaaaggtcgttggttttcggtaatacggtttaggtaaacgt

SEQ ID NO: 3966 - DNA, 201 bp, Artificial Sequence
  Description of Artificial Sequence: Synthetic polynucleotide
tggagagaaatgagttggagagttatatcgagttaacgcgggatacggttttcggttcgggtcgggttaggggtgggaggcggttttttatcgtaggcggcgggatttttatgcgtcgagggatttaagtttttattttatttatacgtttattcggcgtcggggcgttgcggtttcgttttacgagtttagagtaggtcg

SEQ ID NO: 3967 - DNA, 208 bp, Artificial Sequence
  Description of Artificial Sequence: Synthetic polynucleotide
gtcggatatttttttttaggattattcgtattttatagtcgcgttaaaagcgttttatttttttgtttttcgtcgcgtaggttttttatcgacgttcgttcggaaggcgagagtttttacgtggttcggcgcggcgcggttttcggggatcgcgagtaataaaagttcggttcgtagtttttgtttttcgtttttttttttaattttt

SEQ ID NO: 3968 - DNA, 257 bp, Artificial Sequence
  Description of Artificial Sequence: Synthetic polynucleotide
tttagtttttcgtaagtatttttttcgtttttttattttttttagtttttagtcgtcgtcgttttcgtagtttcggtttcgcgttttttcgtagtttcggcgttcgtttattcgttaggtaggcggtggtgtcgatttatttgagtagttgtttcgcgtttagttcgtcgcgcgtagtggcgtgcgtcggttggatggtttggtttatgattatttcgtcgggcgtcggtcgttttatggttagggcgagagcgtta

SEQ ID NO: 3969 - DNA, 350 bp, Artificial Sequence
  Description of Artificial Sequence: Synthetic polynucleotide
gaacggtttagtttaggttttgcgttagagtatcgtattcgggggcggacggttttgtagttttttagttttttttcgtattaattagttgacgttcgggcgtattggtttttttcgttttcgttcgtacgaaagttttgttcgacgtttgtagttagtatcgttcgtattgtttagggagggtttgcgtcgagatttagtggtcgagtgagttatagagtcgttggttttggggacgttgttttttatcgttttttatcgttttttttttttttgtattttatttcggtatttcgtattttttttttcgttcggtttcgcgtattttgtttagattttataagtatttt

SEQ ID NO: 3970 - DNA, 216 bp, Artificial Sequence
  Description of Artificial Sequence: Synthetic polynucleotide
attaaattaggggttgggagtttttagattgaaatgcgttttttattattaagagggagtttacgcggtcgcggggggtcgaggtagttagtcggcgtcgcggttttggggagttcgtgtaggggtgtgttttggtgtgaaatttggtaggattttgtttgggtttgtatgtagggaggggttagagattttgaaatgtattagcgggtagggtgg

SEQ ID NO: 3971 - DNA, 269 bp, Artificial Sequence
  Description of Artificial Sequence: Synthetic polynucleotide
ggtattgttgttcgaacgaacgaacgaacgaacgaacgaagcggtttcgtttaggaaaaatatttttttgacgcgaagttacggttgaagtttcgggttacgtagaggggttagtaattttatgggtggtggggttttttatttttggacgtagcggggagtagcgggcggtttttttttttgtttattttttttgggggtgggggagttttgtgttattcgacgttgcgaggggttgttacgggttttttaggttgtgtttttcgcgg

SEQ ID NO: 3972 - DNA, 258 bp, Artificial Sequence
  Description of Artificial Sequence: Synthetic polynucleotide
agatcgggtttttgttcgttttttttttgcgtttcgggatgaggtagagattgaatagtcggcgagtaaattaacggtatttagaaagttatgtcggattcggcgtttagcgtttaagcgttaattcgttgaaagttttttagcgaaattttagggacgatttggatttcgttgagaggaattgtttttgagtgagatggttttagaggtttggaggagcggattggtaagtatcgggagggtagtgggagttttgtt

SEQ ID NO: 3973 - DNA, 224 bp, Artificial Sequence
  Description of Artificial Sequence: Synthetic polynucleotide
tgtgttttttttttttttttttttttttttttttttcgtcgtttttttttttttttttattttttttttttgttcgttttttttttttttttcgcggtcgcggttcggatagaggttatttagcgttttttcgtagtttttcggagagtatgtgattaggtcgttagtagcgtcgcgagtgttcggtaatggtagggatggtgttttaaatatttttggaagtt

SEQ ID NO: 3974 - DNA, 256 bp, Artificial Sequence
  Description of Artificial Sequence: Synthetic polynucleotide
cgttatttcgcgttagtgtttgagttgtaattgtaaattgcgcgttttggtacgagtagcggtgggggcgggtgggggaaggagcgagtgattttttaggcgtttttcgttatttgatattagttaggtagtttttagggttagagcgttagcgtcgaagttaggtttattcgggaagttatttcggtggtcgcggggtgtttatgttagtattagattttttttcggaaggaggagcggggcgggttatacggtt

SEQ ID NO: 3975 - DNA, 310 bp, Artificial Sequence
  Description of Artificial Sequence: Synthetic polynucleotide
gggaaggggcgttaatagggttattatttcggggtttcgttattttttagtcgttttttttttcggagattttgtttgttaagagttttgttttttgtttcgtttagggttggggttcggtgggaattttttcgtgttcgaagggacgatttcgttagagagtttttcgatttttgtatttatcgtttttggtaggacgtggagttgttcggaagttatttcgggttggtttttttattcgtgtgttacgatttttcggcgggtttttgtcgttcgagtgtttttatcgttagttttcggagcggcggag

SEQ ID NO: 3976 - DNA, 410 bp, Artificial Sequence
  Description of Artificial Sequence: Synthetic polynucleotide
aggataattgggacgggttggatttatatttgatattcgggaaatttttagagcgtgtggtgtttttgttagcggtagttattggtggagttgaggttatcgttattgtcgtcgttggcgttttgtttttggaattttttagtaagatggtatttattgtttgttttttttcgattagtatttttagtcgcgttttttttttttcgggatacgtattagttatatattgtggggagaagatgggttatgtaaatgtaagttaacgcgtttttttagttatttttgtataatgtaataggaatagcgattcgcgcgtacgaatcgggtagtgtgcgcgtgtgtgtgttcgcgtgtgtgagcgcgtgtgttagcgtgcgttttcgcgcgggcgtgcgtttgggtggattttt

SEQ ID NO: 3977 - DNA, 274 bp, Artificial Sequence
  Description of Artificial Sequence: Synthetic polynucleotide
ttggggttagttttttttttttatcgtcgtcgtttttttatttatttcgcgtttattttataattatttcgtttggttttttttcggttttatttttatgcgtttttattatttttttaaatattgtagtaagttgtagtaaggcgggtaaatatcgatagcgcgcgtgggggcgggcggcgggcgtcgcggggtttatttttttttcggttttttcgcgttttcgtcgtttttcgcgttggtttttatcgtatgagtagcgttttttcggttt

SEQ ID NO: 3978 - DNA, 201 bp, Artificial Sequence
  Description of Artificial Sequence: Synthetic polynucleotide
tttttggttggcgggcgtttcgtcggtcgtcggttttttttttgaaattcgtcggcgtatatgaggtcgttgttttcgtcgtaggcgttggcggttttttcgcggtgttcgtggtgatgttatgtttcgttattacgcgggaggagaggagggcggcgtcgtcgggttttgggtgaagagcggcgtagcggcggcggcggc

SEQ ID NO: 3979 - DNA, 265 bp, Artificial Sequence
  Description of Artificial Sequence: Synthetic polynucleotide
ttttcgtggtaggcggtagcgagttgggttcggggtcgggttgagttttgggatcgcgttgcgtagttttcgagtcgttcgttatttggttgcggtcgcgcggttatttgtttttcgttttcggggcgtcgtttagtttcgcgttaggcgttttttttagcgttcgtcgttttttttcggcgagattattcgggcgcgtttcgttcgtcggttttcgatgtaaatagttgggtttcgtaggcggttggtttcgcgtttttcggtt

SEQ ID NO: 3980 - DNA, 201 bp, Artificial Sequence
  Description of Artificial Sequence: Synthetic polynucleotide
attattattattttaagtgtttgttcgttggggattcgtcgtcgtcgtcgtcgtttggtttgttttgttttggggttttgcgcggtttttttttgtttttcgttttttcggaagaggcgttcgtttttaagtacgtggagcgcgtttcgttcgtagtcgtcgcgttgttaggagcgcgttatgcgtagttgttttttgcgt

SEQ ID NO: 3981 - DNA, 362 bp, Artificial Sequence
  Description of Artificial Sequence: Synthetic polynucleotide
tttggcggggagtttgggtagcgtcgattaaagttcggagcggtagtttcggggcgcgggacgcggggtatacgggtttagttgttcgacgggagttcgacgcgcgtttttcggcgggtcggcgggttcggaagtttcgttgttcgggtcgggtttttaagttcgtagtcgttttgattaaaataggtatcgcgacggcggcggtaggcggcggtagttagggttggggtcgtatcgcgtacgcgtatgcgttcgtcgtttcgcgtttttcggcgggcggagttcggcgtcgcggttaggattttttatttcgttttcgcgatttcgttgcgggtttgtatattcgaggattcggtttgaaa

SEQ ID NO: 3982 - DNA, 298 bp, Artificial Sequence
  Description of Artificial Sequence: Synthetic polynucleotide
gttttcgttttttatcgttttttttcgtttcgtagttttcgagtggcgttagtacgttcgtcgggtatgggttttaaatgtttattagcgggagtttaggcgtttttgttttggagcgcggtcgggagtaaaatcgtaggagtgggagggtagcgagttagttggatttcgagtcgcggagcgcgttggttttgtttcgtttgatgattttagagcgcgggtttaagcgtcgtttatgtagtatttttgagtttcggggaaggagagttaatgaaaaaatatttaatcgttttcgttg

SEQ ID NO: 3983 - DNA, 295 bp, Artificial Sequence
  Description of Artificial Sequence: Synthetic polynucleotide
gagcggcgcggagagcggtaggggcgaaatttcgcgggttagatgttcgagggcgcggcggcgttgttaggttgtcgttgttgtttttgcgggtttcgagcgcgttttcgtaggcggtattgttcgcggcgcggcgtgtgtatcgagcgagtgaaggtatgtgtggcgggcgcggttggagttgtcgtcgtcgtcgtcgtcgtgttagtaggttttaatgtttgttattttttaggacgttggtagtagtagtagttcggagttttcgagttttcggtaggtttgcgtgtttttt

SEQ ID NO: 3984 - DNA, 203 bp, Artificial Sequence
  Description of Artificial Sequence: Synthetic polynucleotide
cgaaggtatttgggatttttagacgtaggatgtttttgatcgttgagtaaatgataagggaggcgcggtcgcggtattcgtttatttagcgtaatcgtttcgcgcggggagatttcggttgggtttttaggttggatttcggtagtcgaacgttcgttattcggttaggaagttagggagcgagcgtttgcgcggtcgtattt

SEQ ID NO: 3985 - DNA, 215 bp, Artificial Sequence
  Description of Artificial Sequence: Synthetic polynucleotide
cgcggatcggtcggtttgggtttttgtagagtagattttgtttgcgttttttaggaggagtgggtggtaggattggggttttttataggttttggggcggcggcgagattggtacggttcggggtcgtaggcgcgtagttacgtttttggaagttcgtttcggttttcgtttttaattcgttttttcggggttttatggcgtgaggtttggggtt

SEQ ID NO: 3986 - DNA, 201 bp, Artificial Sequence
  Description of Artificial Sequence: Synthetic polynucleotide
ggaggttgtagtcgttcgagtcggttcgggtgggggcggggtgggggcggcgcggagggtacggagattacggcggcgttattcgggatatttagggtttcgaggttttgggcggtttttacgcgagatcgtaaattatgataataggtagttattcgaggttaaataaaaacggagtgggtttttcgcgcgtcgtcgttt

SEQ ID NO: 3987 - DNA, 340 bp, Artificial Sequence
  Description of Artificial Sequence: Synthetic polynucleotide
ggcggcgttgacggatgtcggtttttagggagttttaaggcggcgggtattagcgggttgattttgaagcgttgttcggagtcggagcgttattgtttggcgcggttgatggttgacgcgttgcgcggttgcgtgtttgttttttacggcgtggtggagcgcgacggcgaaagttatttgtagttgtaggatttgttcgatggtttcgacggattttgtgtgttcgattgtaaaatgggcgttaggtatgcgtgttttgttaggtcggttggggggattaagtaggggttcggggtcgggatagttgtttgagggggattcggggcgagtgttcgaaggg

SEQ ID NO: 3988 - DNA, 201 bp, Artificial Sequence
  Description of Artificial Sequence: Synthetic polynucleotide
agggtttagggcgtagggcgggtttcgtacgtagggcgggcgcgcgggtatttttgtggttaggcgatttcggttcgttttttcggagtttagggattttcgaggttggcgcgggttgttcgcgataaggtgttagtagtttcgggttcgcgaggagtagtttttattcgcggttttcgagtttagttttgttttttcgtt

SEQ ID NO: 3989 - DNA, 236 bp, Artificial Sequence
  Description of Artificial Sequence: Synthetic polynucleotide
tttgagtagtgtatttttttaaaggtaaagagagataagggaggaaatatagtatttaaggtgattagtcgattggatattgttgatggtatatttttttcgtttttaattaatcgtataaaattcgtaatatttcgcgttttcgcggggtttttcgcgtttttggttcggttttttcggtcgtttttagtaggcgtttcgtttttcgcgggaattttgggatttggtcgagcgtt

SEQ ID NO: 3990 - DNA, 251 bp, Artificial Sequence
  Description of Artificial Sequence: Synthetic polynucleotide
gttttttagtttttcgcgtatttttttgcgttcgggtttcgtcgtttcgtttagtgttggttacgggtcgtgttattagtttgtgcgttttcgttattcgcgggtcggggtatttggcgttttgtgtgggtggcgggagcggggacgtttcggtgttcggggatcgtagcgcgttggcgtttaattttgtcgtcgttcgttttggagtcgggaggttttagtcgtttaagtgtttcgggagatttaggtat

SEQ ID NO: 3991 - DNA, 201 bp, Artificial Sequence
  Description of Artificial Sequence: Synthetic polynucleotide
tttcgttttcgttttattttttattggcgtaggtttaggttatcgttgttaggatttttcgttgtcgtcgtttttcgttttttttatttagattttgagtcgtttattttagtcggtgtaggtcgcggggtcgtttttgatggtttgggtattttttattttcgtttcgtttacgattatcgcggttgtttgagttgttta

SEQ ID NO: 3992 - DNA, 206 bp, Artificial Sequence
  Description of Artificial Sequence: Synthetic polynucleotide
gttttcgagtgcgtagcgtgcgtttttagtttttgttgcgtttttaggtttggcgcgcgattcgagcgtagcgggtaaagttggaggaatttggcggcggcggagcgggcgtaggtttagttcgataaagttcgggggttcgggtcggggtcgttgtcgtagttcgtacgttgtttcgtgttttcgagaggttttttttttagcgt

SEQ ID NO: 3993 - DNA, 201 bp, Artificial Sequence
  Description of Artificial Sequence: Synthetic polynucleotide
ggtcgtcgtttatttcgcgtatttcgttttttggaaatttagtagtcggggggcgaatatcgcggcgtttttatgggaatttggtttcgggtttagagcgcgggtagttggtagagtttggggggcgcggcggcggtagtagtaggttggagggcgcgcggcgggggttaaggggatttggtcggcgttcggagtcggagt

SEQ ID NO: 3994 - DNA, 203 bp, Artificial Sequence
  Description of Artificial Sequence: Synthetic polynucleotide
gttgtaattttgggtttgggattgcggggacgggacgggtgggaagcggttaaaggcgtagcggtttttggttagagtcgtagaggtttgagacgtgggtcgcgtttcggtttaggagatttcgcggtcgcgttttaatttttagtttttcgattgcgattgcgattcgggaaaacgtttacgtttttggaaaggaagtttta

SEQ ID NO: 3995 - DNA, 216 bp, Artificial Sequence
  Description of Artificial Sequence: Synthetic polynucleotide
ttggggggttgggagaacgaaaatattagttgcgtttttaatatttaaggaaggaagtggtagcggggacggggagaggatgggaaggggatgttgattgcgagttggggcgggacgcggtgatgggaggggatcgggtcgggaatgcgggaggcgaggggagcgacgggatttgtcgtttcggcggtcgggtagttaatcgattcgtttttttta

SEQ ID NO: 3996 - DNA, 335 bp, Artificial Sequence
  Description of Artificial Sequence: Synthetic polynucleotide
agtgtcggagcgttcggtggtcgtcgcgtcgcgcgtttggagggatgttaacgtggagtcggcgtcgagttcgttcggcgtgcgtgcgtgtgtgggagcgcgcgagttttttgacgcggggattagttatgaatcgggggtgtgtgtttgtttttagagatttggtaaggtgcggagttttttagaagtgcggttaagcggtagcggagacggcgagttaggaattttttttcgcgtttttagttttttagcgtggcggcggaattttcggagaaagtttgtaaatttttagcgggcgcggcgaggacgtcgggttatttagggggcgggtgggc

SEQ ID NO: 3997 - DNA, 230 bp, Artificial Sequence
  Description of Artificial Sequence: Synthetic polynucleotide
gagagaaagtgagaagggagagaaaagcggcggttgagtaaagcgggagtcggcgcgggcggtggggtttgattcggacgtcgcgtattcggtttcgtttcgcgtttagcgtttcgtttattttttggtcgcgtttgttttcgcgtttttttgtttttttttatttattagtagttttgttgataagcgagaaaattgataagtgagaaaagtcgtttgttagcgttcgg

SEQ ID NO: 3998 - DNA, 224 bp, Artificial Sequence
  Description of Artificial Sequence: Synthetic polynucleotide
tagtatagggggtgagatggggtggtggttggtgaacgttggttattttattttatattattttattttgagagttgttataattatcggcgttatttttcgtgtattttgaggtttggttggcgagtcgttgttgggagttttttgtaaatattttttaaagtttgaaggcgggttttaaacgtaggcgtcggggattatgggagtttttaaatagttgcgtt

SEQ ID NO: 3999 - DNA, 211 bp, Artificial Sequence
  Description of Artificial Sequence: Synthetic polynucleotide
ggttaattttaggtatagtttattcgagttaggcgaggtttagaaaggtttgattcgtttggtagttttaacggatttgttttcgtagtcgttgattagtcgttgacgagcggatttttcggtcgttatggcgattgtgaaatgtagggtggagcgtatgcgttcgaagttattcgcgcgggtagtttttgcgtgtttttttgcgtgtttt

SEQ ID NO: 4000 - DNA, 205 bp, Artificial Sequence
  Description of Artificial Sequence: Synthetic polynucleotide
cgtgtaattcgattttttttgatttataagttttgagtgatagttttgatttggtttaatcgcgggagggaggggaaagagaaagaaagaaatttttagtcgtacgttttttttggtatttaatcgattttttggaaaaaggttttatttcggtttggtgtttcgtgttgggtggagaagtttttcgtttcgatttggtatcgtt

SEQ ID NO: 4001 - DNA, 398 bp, Artificial Sequence
  Description of Artificial Sequence: Synthetic polynucleotide
tttcgttcgtttcgcgtttcgcgtttcggcgtttcgtcgttcgtcgttcgttcgtttcggcgtcgtcgttcgcgtttcggcgtttcgggtcggcgaggggcgcgttcgcggtcgcggtcgttgtatggcgttgagatggcgggggcgtcgcgcggcggaggcggcggcggaggcggcgcgggcgagttcgggggcgtcgagcgggcggtcgggataagtcgtcggcgcgggtttcgggcgtgcgacgaggagttcgtttgtttagagttggaggcgttgtttcgcggttatacgttgcggttggagtaggcggttacgttgaaggcgttggtcgtttttagtttgttggcgggcgcgttggcgttggtcgagttgttgggcgcgtcggggttcgcgtt

SEQ ID NO: 4002 - DNA, 290 bp, Artificial Sequence
  Description of Artificial Sequence: Synthetic polynucleotide
atagcgggcgtttttagatattggggaaagtgttttacgatgtttcgagtttttttagtttcgttagcggggcgagcgtgagggtgtttcgatcgattagcggtttcgggtgtagggtggcgggttcggcggcgcgcgttttttttttttttttggcggttcgtacgtgtcgttcgcgtcgcgtttttacgggttacgcgcgggtttcgtagcgtcgcggtcgagtcgggttgttcggttcgcggatatagcgtcggtcgtcgtatttcgtgcggggtcgcggcgcgatg

SEQ ID NO: 4003 - DNA, 307 bp, Artificial Sequence
  Description of Artificial Sequence: Synthetic polynucleotide
cgtgaaattgtttaattaagtgcgtagttatagaggaagaggcggtttttttaatatggcggggtttttgttttttagttttcgggttttgattttagttcgcgtttttattgttttatttttttcgtttttggagtttttcggtgattttattatagtttttgttattttgtgatttgtaggtattgggagatttatagggaggacggcggaatatttggaggttgggaaatggtgagtgcgtggagtgggtgtttcgagaatggggaagaggttgtttgaattcggtcggaatcggttgcggtgg

SEQ ID NO: 4004 - DNA, 212 bp, Artificial Sequence
  Description of Artificial Sequence: Synthetic polynucleotide
agtgttgttaggcggaggttcgttagaaggtttcgtagttgttgaggcggggtgggattgcgttttaggggtcgcgttgaagttggcgtcgcgattattgcgtatcgatttcgtttattttttgttcgttttcgggagttttttttgttttaggacggttttttattttttaaattatgttcgttttttatttcggatttatagttattttt

SEQ ID NO: 4005 - DNA, 375 bp, Artificial Sequence
  Description of Artificial Sequence: Synthetic polynucleotide
tggtttttgagtagtatcgtttagtgtagttttcgttaggaaaagtagtagaatcgatagttttagggggcgagcggggtttatggtgtagggggtcgggcggttcgttgggtaaggcgttcgagaaagcgtttggcgggaggaggtgcgcggttttttgttttaggcggttcgggtgttcgttttatgcggggcgagcgttcggtcgattttcgtcggggcggagtttgaggggtggttgatttatgtacggggattgttatttcgtcgttttcgcgttgtaaattgtgtaagagggagaggaatttttcgttaagttgaaaagttgaatttgttttttaaatttttttttgtagtttagacggggacgttttg

SEQ ID NO: 4006 - DNA, 201 bp, Artificial Sequence
  Description of Artificial Sequence: Synthetic polynucleotide
ggggttgttcgtaatatgtagggaaatgagtatttcgttttgttttttatttttttttagtttttcgtggtgggtgtataggaaaaagaagggcgaaaagcgggggtaatagttagtcgtcgcgcgcgtttttagcgtcgtttttagtaatagcgttaggaggaaagtttgtcgggtttagttattgcgttttatgtcgtc

SEQ ID NO: 4007 - DNA, 356 bp, Artificial Sequence
  Description of Artificial Sequence: Synthetic polynucleotide
ttggagacgtcgggacggaggagttacgcggagagaaggcgagaagaaggcggacgggagcggaacgggttcgggagcgggtttgggagcgggttttcgtcgagaagtttcgcgggagacggcggtttttaaagttattttgggtcgcgggagcgcgggatcggggttgcgggcgtcgagagcgcgtcgtttgtcgttttcgtgcgtcgtcgtcgtttttgcgcgacgtttttcggttaggtttgggaaagcgttcgtttcgttttatatttttttaaagtttcgggcgtcgcgtttttttcgtcgtcgttatacgtgtttcggtcgttttttcgttttcgcgcgtcgtttcgttc

SEQ ID NO: 4008 - DNA, 265 bp, Artificial Sequence
  Description of Artificial Sequence: Synthetic polynucleotide
gtcggtttttttgtttgagtcggttgcgtttcgcgtttttcggggttcgtagtttgttagttcgggcggttcgtattcgttttgggaattcgttcgaggtcgcgaatcgttaggggttttcgcgttttttttttatttaggttttttgtttttttcgtcgcggtcgttcggtttttcgcggtagcgatagagttttatttgtagaggattttaaaatgagattaagcgaaagtggaattggtagattcgagtggtgtttggaaat

SEQ ID NO: 4009 - DNA, 697 bp, Artificial Sequence
  Description of Artificial Sequence: Synthetic polynucleotide
gattttagtcgtacgttgtgcgaggtttgtaatattcgttttagtcgttacgagatttatatcgtgtataagcggtattattgcgtttcgcgttacgattcgtcgtcgcgtcgatcggtcgcgttttcgggattttttgggtcggtcgcgttttcggttttttttttcgtcgcgtttgtgcgtacgcgtagacgtcgtaagttttacgagttgtacgcggtcggcgtttcgtttttttcgtcgttcggttacgttttcgcgttcgagtcgtcgcggttcggaagcggaagcggaagcggtttcggtttcgtttttgcgcgttcgttcggtttcgcggtcgacggttttatcgatttgagtaagaagtcgcggcgttcgtttttcggagtttcggtatcggcgttggtcgattattacgagtgtacggtttgtcgcgtgagtttttatagtttcgaggtttatttggcgtataagaagtattcgtgtttcgttgcgttatcgttcggcgcgttcggtttgttcgtcgtcgtttgtttttattgtttttcgaacggttcggtgcgcggggatttgttggagtattttcgtttggcgtacggtttgttgttcggcgcgtttttggtcggttcgggggtcgaggttcggacgtcggtcgatcgcggtttttcgttcgttttcgttttcgtcgttttttcgt

SEQ ID NO: 4010 - DNA, 226 bp, Artificial Sequence
  Description of Artificial Sequence: Synthetic polynucleotide
tgggaggagcgtagatatttttcggtgatagggagggttttttatttggttgttatttggaagtttatagtggtttcggcgggtaggcgggcgggtagagcgcgggttcgaacgtttttcgcgtttgcggcggcgtacgtgcggcggcggcggcggcgtcggcggcgcgggcgggatttattgggtggtcgcgcgcgttattcgcgcgttttttgcgcgtttttgt

SEQ ID NO: 4011 - DNA, 201 bp, Artificial Sequence
  Description of Artificial Sequence: Synthetic polynucleotide
ttttttttatttttttaatttttagtaggatacggaatttcggcgtttttcgaaagttataaaagaggggtacggaaattttaagttcgtcgtgttaattcggagaacgtaaattcgaggtagagcgtgcgtcgtgcggggatgtgggtgtcgaggatttcgaagcgttcggtttttttcgcgatttttattttttttaga

SEQ ID NO: 4012 - DNA, 201 bp, Artificial Sequence
  Description of Artificial Sequence: Synthetic polynucleotide
tatttcgttatttcggcggggtaagttcggattttattagggtaggttcgggaggttatttagggtagacgattcgaggtagagcgttttaaaattttgtcgtcgtacgtttagttagagcgtcgagcgcgtttgtttttttttcgttattttttagttttttattcgtcgattaaatttttgggggattatatttttaag

SEQ ID NO: 4013 - DNA, 215 bp, Artificial Sequence
  Description of Artificial Sequence: Synthetic polynucleotide
ttgttttttagttagaacgtgaatgtattgttgacgtatattgttttgggagaagattagcgtgatgtagtgtttttatgtattagcgtcgtttttttttcgtcgtttgtttcgcggggttaacgtcggcgttttttagcgtcgcgtcggtcggcgtcgcgtagtttcgcgttttcggtcgttcgtttttttttttttttttttttttttttttt

SEQ ID NO: 4014 - DNA, 252 bp, Artificial Sequence
  Description of Artificial Sequence: Synthetic polynucleotide
tgaacgtgtgcgtgtgcgcgcgtgtggttgttttttttagttttagtttcgaacgtaaatattttatcgaggtatagggaagtcgggagtagtcgaggaacgcggagggcgtcgaattagagtttgcggggtttgatagttttttttgcggcgtttaaggtgggcgtaatgtttaataaaaaggtcggaaaatggggatcgatttcgaatattttttttttttatttagtttcggagttcgagtagcggcgg

SEQ ID NO: 4015 - DNA, 203 bp, Artificial Sequence
  Description of Artificial Sequence: Synthetic polynucleotide
cgtttcggcggtcgcggagggagcgtaggcggcgtcgttgtaggggtcgggcgggttggcggcggcggcggcggcggttgtaggagcgcgggtaggttcgcgcgtcgttggtaggggtagtaaatggtagttttttttcgtagtatttattcgcggttgtatcgtatcggggtattgtgggaaatttcgtttattttttcgtt

SEQ ID NO: 4016 - DNA, 201 bp, Artificial Sequence
  Description of Artificial Sequence: Synthetic polynucleotide
cggcggtattcggcgtagaggttttagcgcggggagtcgggtttagtttcggtttgttagcgtcgcggttttagtttattcgaggtcggtttggggggttcgtagggcgcgcggagcgtcgagtgcgcgtcgggttgggtttcgtatttcggtgtaggagcgcgggcgcggcgcggcggagcgtttcgtatggagtcggtt

SEQ ID NO: 4017 - DNA, 201 bp, Artificial Sequence
  Description of Artificial Sequence: Synthetic polynucleotide
gttgaatatcgttcgggtttagtttttatttcgcggtttggtgaagttggttttcgtgtttgtttgggaagtttttgtttggggataatcgttaggttttcgagtcgttttttttttatttttcgttgcgtcggtaattttattttttcgtttttattaacggatcggtatttaaattaaagtttagttttttggggttta

SEQ ID NO: 4018 - DNA, 201 bp, Artificial Sequence
  Description of Artificial Sequence: Synthetic polynucleotide
tttcgtttttcggtagagtttttgttcgcgttaatttatttattaggttttgttcgcgttacgcgcgtttttggtaggtttggggcggggaaaggcgaagcgttgggtacgcgagggtttgtgtattttagtttttacgacgtttttggttttttttaggttcgtcgttgtcgtatttaatttttttttttcgggggttat

SEQ ID NO: 4019 - DNA, 213 bp, Artificial Sequence
  Description of Artificial Sequence: Synthetic polynucleotide
tagtttatttaatattatttatgtattttgtgtaaggaattgtgggatttcgttttacggtaaataatatggaaattttaaaaatagcgatttttttgtgcgtgtttatttacgcgtttcggggtgatttggcggggttgtcgtcgggtgatttatatttttgaatcgcgaagcgatagggaaagcgcgggcgagcgtaggagacgcggtcgg

SEQ ID NO: 4020 - DNA, 385 bp, Artificial Sequence
  Description of Artificial Sequence: Synthetic polynucleotide
ttattttttgtttgtttaagtcggttggttttcgtgattgattcggaataatagagtagatgtttgcgtgggaggtaagttttatttaatatttgttttgcggcgggaaggtttgggtgtttatagatagagttggagtttttcggtgggtggtatagataattagttggggttgttttatatgtaatttaattataggggaaataggtttaaatatcgggtgataagtagcgtaattgtttcgggtgattttgtaattttttttttattaattttttttataacgtatatgattgttataagggttaattaaaaagagcgtgagtggttttatgttatatgtagttggattagaaagtgttgagtatttgtttatgcgtgtaag

SEQ ID NO: 4021 - DNA, 278 bp, Artificial Sequence
  Description of Artificial Sequence: Synthetic polynucleotide
ggtattgcggtttagttttcgttcggggattcgcgggtcgattgtggttttttttggggaagtcggggcgcggggaggcgtttcgggtattttagtcgtacggggtacgttcgttttcggcggggtttttcgtttcgttgtgggagtggtagtgggtgtcggggtggagaaagtacgcgtggcgcggagttttggggacgcggcgttttattcgttttggggagtttcggattttttttagtttttaggttcgtatgtttttttttttttagtgtttt

SEQ ID NO: 4022 - DNA, 248 bp, Artificial Sequence
  Description of Artificial Sequence: Synthetic polynucleotide
acgcgagtcgttagcggtgggatttatcgacgatttttcggggcgataggagtagtttcgagagttagggcgagcgttcgttttaggtggtcggatcgttcgtcgcgttcgcgtcgcgttttttgtaggtaacgggagacgttttcgcgtagcgcgagcgttttagcgcggtcgttcgttttttttttcgagggataaattttttttaaattcgattcgagtttttggattaaattcgtttgcgtcga

SEQ ID NO: 4023 - DNA, 216 bp, Artificial Sequence
  Description of Artificial Sequence: Synthetic polynucleotide
tataatataagggagagaaagtaacgttttggttttagaaatttttatcgttaaggttagttttggttagacgtatagttaaagagtttttttagtttagcggatgaatcgttcgcgagtggtattttttaaaattttggttttattttttaagatgtttttttattgcgtaatttagaaagtattcggatcgtcgttatttattagcggcggcga

SEQ ID NO: 4024 - DNA, 201 bp, Artificial Sequence
  Description of Artificial Sequence: Synthetic polynucleotide
tgaggtgttttttttattaattttaggtatcggtttttggtggaattgtttttagattgtttgagtttttagggttaagttttttttttattttttagtacggagttttatttagaattgtatttcgaaagtttaaagtttatttatggtttttagagataggcgaaggcgaggttttttacgggacgttttggtaggtgt

SEQ ID NO: 4025 - DNA, 208 bp, Artificial Sequence
  Description of Artificial Sequence: Synthetic polynucleotide
cgagtagttagggttagcgagcgattttagtagtagggacgcggtcgtgcgagagttcgcggataggcgagggggattttaggggagtagttgttgtttacgggttacgggcgatgtacggagtggagaagtgaacgtggtttataggatttttgttcggaaggtggagagcgttataggggaattttttcgatttttgttcgtttcg

SEQ ID NO: 4026 - DNA, 201 bp, Artificial Sequence
  Description of Artificial Sequence: Synthetic polynucleotide
ttaggagttcggatttttgtttagttttttggcggagttaagttcgagcgtatagatttttcgagttttagcggttagggggtattgtgtgagcggttgacgttattttttcgttcggtcgaaattaggcggcgggattttatatagttgaggagagggagtcgaggtcgtgatttagggttggcgacgattaaattaagt

SEQ ID NO: 4027 - DNA, 364 bp, Artificial Sequence
  Description of Artificial Sequence: Synthetic polynucleotide
gtcgcgggtgaggtttgtggttaatttcgcgttgtcgaggttttattttttcgagtttagtttgattttaggtcgtttttaggtcggtgtttagttgaggcgggaacgttgtagtttggttgagcgtgatttttaggttttgtgaggaaaagtcgagcgcgttatatcgaggcgttagtcgtttattttattataaggtaaaagatttatgttgttttagttattttaaagttgggagatatattgtattttttattagatttcgaatgtttttagtgtttgtaattttttaagaagtttttagagtagatagtttttggatcgtgggtattttttttcggggacggggattttgttgatcgtt

SEQ ID NO: 4028 - DNA, 213 bp, Artificial Sequence
  Description of Artificial Sequence: Synthetic polynucleotide
gtttagtttttttttagtatgtaaagttttttgttttttttcggagttggcggaggcggtaattttttattttcgtcgtcgggggtcgggtagtagcgggcgcgcgggttagcgtttagtacggcgggtagcgtcgcgttgcgtatcgtcgtcgattatgagcgaggatagtcgcggagatagtcgcgtcgagagcgttaaggatttggagaa

SEQ ID NO: 4029 - DNA, 201 bp, Artificial Sequence
  Description of Artificial Sequence: Synthetic polynucleotide
ttttttcgttacggtaatttaattggaggtagaagtcggcggggcggtcgagcggggcggggcgggagcgcggtcgtcgcgagttacggtggggagcgggcgcgggggattttggcgggtttcgggtagcgcggttgtatttatttgtgttataattgcggcgacggggggttgaggaatcggtttttttaaaagtaaatc

SEQ ID NO: 4030 - DNA, 201 bp, Artificial Sequence
  Description of Artificial Sequence: Synthetic polynucleotide
ttttgggcggttgtagaggtcggtcgttcggtttggtttattttttttaggaaattttatattggagaggtaagggcgattttaaaatgtatcgttgagtcgttaagttgttatttttttttatttttttttgtttttttaaattgtatttaaaaaaaaaaaaaagttaattgtatagagtggttgggcgcgatgggtggg

SEQ ID NO: 4031 - DNA, 296 bp, Artificial Sequence
  Description of Artificial Sequence: Synthetic polynucleotide
ttcgggatcgcgtttcggtcgttcgagtttttcgcgttcgtcgttttttatttcggtcgggggtttatttgggagttcgttgttttcggttagtcgttcgcgtgtgtttagggttagtagtacgtataagtgttagcgtacggtcgtcgcgtttatgtttaatgcgggtttcgttgggcgtgcgggcgtgcggggcgcggggattcgatcgatcggtcgttttcgtaggcgttgttcgttgttcgtcgtttcgttatcgttcgggttttcgagtcgtttagttagttcggttgatg

SEQ ID NO: 4032 - DNA, 201 bp, Artificial Sequence
  Description of Artificial Sequence: Synthetic polynucleotide
ttttgtttggcggtttttgcgttcggggttgttgagttcggggttcgttttgaggtcgcggttgtggtttttggttttttcggttcgcgttattgtcgcgcggcgttcgttgtattttgttttttttgcggtttcgtatgtttttggtggaatttagttcggcggacgacgaggaggatgagatggaagtttgttggaaat

SEQ ID NO: 4033 - DNA, 297 bp, Artificial Sequence
  Description of Artificial Sequence: Synthetic polynucleotide
ggggagggaggcgcggcgcgggaggaggaggggcgtagtcgcggagttagtggtttcgtttggacgcgttgttttttagatattttcggagttttagtcgcgcggatcgcgcgttttcgtcgttttgtttttaaatttttgtcgtagtttttttttaagttagcgaatttattttttaaaattagaaattgaatttcggtacgggaaaggagttcgcggaggagtaaaattatagtagagtaagaagagttttagagagtagttttttcggagtattaatttcgtgtcgggagtgta

SEQ ID NO: 4034 - DNA, 268 bp, Artificial Sequence
  Description of Artificial Sequence: Synthetic polynucleotide
tcgcgttcgggaggggcggttgtcgttcgcggggcgttcgcggtgttcgggtttgggtagcgaggaggtgacgtcgttttcgcgggatgagttcgggaggcggaggggcggaggaggtgttggcggcggtattgagcggcggcggcgtagggcgcgcgggtttttcgcgtcgattttatcgatttaaggggcggcggcggtggcggcggttgagcgattttgggtcgggcgcgtgatgaggaggggtcggcgttagatttcgttgtac

SEQ ID NO: 4035 - DNA, 201 bp, Artificial Sequence
  Description of Artificial Sequence: Synthetic polynucleotide
ttgagtagtcgaagggataattagatagttatagatagatagacggttagttcgagtttcgggtaggagagaggttgcgaggagtagtttatgtttgtttcgtttagttttcgcgttttcgggttgtttttttaatttcgattcgcgtacgttgcgagttttcggcgttgtcgtttagtcggaggggtagtttcgtttttt

SEQ ID NO: 4036 - DNA, 201 bp, Artificial Sequence
  Description of Artificial Sequence: Synthetic polynucleotide
cgcgattagtattttttcgttacgaatttgagagataagaagcgaaaatagggtgtgtgggggatggagagagtttcggggaggtagttgcgttttcgtacgttttaatttaaagaagagagggaaggaggaagcgaatttattgtttagtacgagtcgcggagcggtttaatttagagcgggtagttgcggacgagttgg

SEQ ID NO: 4037 - DNA, 201 bp, Artificial Sequence
  Description of Artificial Sequence: Synthetic polynucleotide
ttttgtgcgagtaaagtcgggagagcgagttttaagtatttggtagcggtgtttttagtaggcgtcgaggaattcggttatttatttttggtgaattttgcgtttattgaggtattcgaggtacggatgtgttcgtttagtattcggagacgaaggagagagagcggggatatgcgttttagttttgttaggttttagggt

SEQ ID NO: 4038 - DNA, 201 bp, Artificial Sequence
  Description of Artificial Sequence: Synthetic polynucleotide
tttttttttttcgcgtatttcgtggttcgattcgagggcgtcgaatacggcggcgtttattagtaggtaggtgaaggtgtagacgatgagggatagagttcgtacgttttgtttttttatggtcgttagtaaggagtcggcgcggggggtatgtttcgtaggtttatagtcgcgcgcgttttattgtagcgttcggcggtc

SEQ ID NO: 4039 - DNA, 302 bp, Artificial Sequence
  Description of Artificial Sequence: Synthetic polynucleotide
cgtttattcgggcgcgcgggtgcgtagcggggttttcgtcgggcgtcggtcggtgcgcgaagtttgttcggtttaatttttaaggcgcgggagcggggcgcggttttaggacggtagggatcgcgatggagcggtttcgggggcggtcgggggacggcgcggtggcggtcggttagttcgttttttcgggggcggcgggcgcggcggcggcggcgggaggggtttcgcgggtttcgcggagtagcggggcggacgcgggcgtatgagtcgcgcgggggtcggggtttttcggcgttcgggcg

SEQ ID NO: 4040 - DNA, 201 bp, Artificial Sequence
  Description of Artificial Sequence: Synthetic polynucleotide
tcggtggtcgcgttcgtgaaatggggacgcgggttttgttttcggattttttttagttttcgatttttcgtatttgtttcgagatttaacgtgttcggttcgtagcgtgttgggtttgcggcgttagggtggttcgagtttcgagattatttgcgtttgcggatatagtcgcggggtttggtatgaagggttttagggagg

SEQ ID NO: 4041 - DNA, 220 bp, Artificial Sequence
  Description of Artificial Sequence: Synthetic polynucleotide
gcggggcgggcgattgtcgggtttcgggttagttttcgtttttcgtttcgttttcgatcgttcggttttttcgttcggcgttttttcgggttgcgtttcgcggtttttggcggcggcggcggcgggcgtagagcgcggtatgggcgttcgggtcgcggggtttggcggcggcgggcggacgggcgcgcggttgcgggcgtaggtgcggggcggcgggtcg

SEQ ID NO: 4042 - DNA, 347 bp, Artificial Sequence
  Description of Artificial Sequence: Synthetic polynucleotide
tatcgtttcgggtgcggcggttttaagcggagatttgagcgcggcgggtcgagttttttaatttgttggcgttgttttttttttttcggcggtgcgcgggcggcgttttaaaggggaggattttgcggcgcgggtaagaggcggcgggagcgcgcggttcgggagtgtggttgtagtgcgtcgggatattagggtttcgcgtttcgtatttaagaggttttcgcgttttaatttttcgcgttcgcgcgttcgcggatttaggtcgaggatcgaaaggggtcgttcgagttttcggggtcggcgtttagagagtttagtaaggtcggtcgttttgtcggtgtgtcgtc

SEQ ID NO: 4043 - DNA, 201 bp, Artificial Sequence
  Description of Artificial Sequence: Synthetic polynucleotide
tggtattaggtttttttatgggtatcggagtaggcggataggggtggggtttcgcgagcgatacggaagggttagtgtggcggagcggattttgtggaggcggggttattgtgtttttgagaagggttttcgggggtggagtttattaaggttgcgggggcgtggttacggagcggagttaataaaagcggggcgtgtacg

SEQ ID NO: 4044 - DNA, 201 bp, Artificial Sequence
  Description of Artificial Sequence: Synthetic polynucleotide
cgttttggtatcgggggcggcggcgtagaggtcgggaggaagaaattcgggttttggtttaggtcgggtttttatttttgcgattcgcgagaggtttaggcgggaaaggcggcgagtggcgttagcggtttcgaaagtaaatttggttcggtgttattgttcgagggtcgtcgggcgcgttttttaattttttcgagtttg

SEQ ID NO: 4045 - DNA, 225 bp, Artificial Sequence
  Description of Artificial Sequence: Synthetic polynucleotide
agtgcgtacgttgtaggaattacggttacgtttcgtcgtttaagggttataagcgtttttgtatgtggcgcgattgttagtgtaagaagtgtaatttgatcgtcgagaggtagcgcgtgatggtcgcgtaggtgggtgcgggcgtgcgggagttcgggtttagttttagtttttttttttttttttttttttagatggagtttcgttcggttgtttaggttgtag

SEQ ID NO: 4046 - DNA, 318 bp, Artificial Sequence
  Description of Artificial Sequence: Synthetic polynucleotide
gttgttaatttattcgggagttcggggtatgaacggttacggttttttttatttgtatatgggcggttcggtgtcgtagtcgttacgggcgtttttgtagcgtacgtttaagtgcgcgcgttgtcgtaattatggcgttttgttttggtttaagggttataagcgttattgtcgttttaaggattgtatttgcgagaagtgtatttttattatcgagcggtagcgggttatggttgcgtaggtggcgttgcgtcggtagtaggttaacgagagtttggagagttttattttcgattcgttgcgcgttttgttagggtt

SEQ ID NO: 4047 - DNA, 265 bp, Artificial Sequence
  Description of Artificial Sequence: Synthetic polynucleotide
aggaaggggagcgtagtttgtagattgaagttagtggcgttgcgttgaatgtaattgcgcgcgttcgtcgggtgagttagcgatttgagttaggcgggggcggttcgatttttttcgtttagtttgggttagaggaagtcgaaagcggttttagtaaggtgaggcgttcgaggttgtagaagatcgagtagaattttgtagagttcgggatgtgttgggttaggtcgttgaggatttgattggttttttttttttttttttttat

SEQ ID NO: 4048 - DNA, 259 bp, Artificial Sequence
  Description of Artificial Sequence: Synthetic polynucleotide
cggaggggaggtcgcggagggtcgggtggaggtttttatcgttagttttaaggtttgtagtatttttttttggtttttgtttttagggtcgatgtgttttcgagcgaagtcgtcgtgtttgggtagaaggcgttttaggaggcgcgaggttttagtcgcggcgttgttttcgtcgttattgttgttgtttcggtttcgcggcgtttagtacggtttcgattttttagttaggcggcggtcgttttcgatttcgcggttt

SEQ ID NO: 4049 - DNA, 201 bp, Artificial Sequence
  Description of Artificial Sequence: Synthetic polynucleotide
gacggggtatcggtattaattagcggttcgtttcggggttttcgcggttaaggcgagaacgtaggattaggagtattgttgtttattttttatcgtaattcgtatatttcgggattacgtaacggcggatggggcgttcgggagcggtttttgtaggggagagtaataggttttcgcgttttggaggtttggtttgcgttt

SEQ ID NO: 4050 - DNA, 323 bp, Artificial Sequence
  Description of Artificial Sequence: Synthetic polynucleotide
ttttcgcgattttatcggggaaatatcgcggatagtcgggttagtagcgttcggagtttattttaggtttttaaatttgtagtattttttagagcgcgcgcgttcggagcgggatttgtttgttttagtgtacgtcgcggagcgaattatcgggttggcgggggtggaggggtgtaggcgtgggggttgcgggtcgttcgggttttgggttttttttgtcgtcgtcgtcgtttttcgttttcggttaggagtcgcgcgtgacgcggttcgtcgtaggagtttcgaaggcgcggcgtcggcgagttttttttcggtaggcgcgt

SEQ ID NO: 4051 - DNA, 201 bp, Artificial Sequence
  Description of Artificial Sequence: Synthetic polynucleotide
agtcgttttcgtatttttcgttatagttttcgtagtaatcgttttagtagtcgtagttttagtagtcgttttatttcggtaagatgtaggaggcggcggtcgtggcggcggcggcggcggcggtcgcggtagtcgcggtgggtagcgtgggacgtttgttttagtttttattttacgggttgggttcggtcgtcgtcgttg

SEQ ID NO: 4052 - DNA, 355 bp, Artificial Sequence
  Description of Artificial Sequence: Synthetic polynucleotide
gcgaatataattgttttagttataggcgaggtttggttaaggtgtgggcgtatttggggtaggttttgagaggtttagcgttcggtggtgcggatagaggcggggtatcgcggcgttcgtcgtcgttttttcgtaggtgattatttttttgtaggtgttttcgggttttaggtggttgcgtgtttgcgttatggttgatattttgggcgagcggtatttggtgatttgtaagggcgcgacggtggaggtcgaggcggcgttgtagaataaggtggtggtattgtatttcgcggcggttcggtgcgcgtcgagtcgcgattttacgtcgttgttttgcgatttttatacggcgttg

SEQ ID NO: 4053 - DNA, 201 bp, Artificial Sequence
  Description of Artificial Sequence: Synthetic polynucleotide
ttcgcgcggagcgattgtgaggggttttgttggaatttggtagcgcggaggtttggagagaagttttatgttggtttttatttagtcggttcgtttttttcgagttttggaagttttatttagtcgtgtatttaatggttttataaagttgattataagttttagcgtatttttgaaggagttaaaagcgacgtaggtgta

SEQ ID NO: 4054 - DNA, 290 bp, Artificial Sequence
  Description of Artificial Sequence: Synthetic polynucleotide
gatattttgtggagtaggtggtttaggttgtcgggtttatcgtcgggcgttttgcgtagcgtttcgtcggatattaagtagggagtcgtcgtcggggtcgcgcgcgtcgtcgaaattttgttttcgtcgtcgtttatcgataggttgtggagaaggttatcgatcgatgttatcgagttatttttgaagcggttatatttggtgcgtggaagtatgttttttcgtgggttcgttgtattcgttcgggcgttgttggtgtcggtttcggcgcgggttgtcgcgtatagtag

SEQ ID NO: 4055 - DNA, 201 bp, Artificial Sequence
  Description of Artificial Sequence: Synthetic polynucleotide
tagagattgtagttttcgtcgggttggatgcgagttttttaggttagagtttagaagcgcgttgggatttgggtttggtttttgggtttgtgttttttttcgtttggttttaattgttcgtatttaagattataataaaaaggtttaggaagtaaattttttggacgcggaagggtcggttcgcgggttttcgtcgagtga

SEQ ID NO: 4056 - DNA, 201 bp, Artificial Sequence
  Description of Artificial Sequence: Synthetic polynucleotide
agaggtcggttcgtcgcgcgggagatattttttttaaagtggaagcgttgcgtgggtagtagcgcgggtcgggttttcggattttagtttttgttgttttcgagattttcgtttcgcgtcgtatttttcgagtttagcgttttcgggttgcgttgggcgtagtggttttcggttagggcgtagtcggtttgggcgttagag

SEQ ID NO: 4057 - DNA, 288 bp, Artificial Sequence
  Description of Artificial Sequence: Synthetic polynucleotide
cgatgtagtttagaattcgcgatttagttcggtttattatagtttttagtagcgatattcgtagttttcgattttttagatcgagtgagtttaattaagtcgttattcgcgtgttagtagttgggcgtttcgattttttagatcgcgtgagtttagtaaagcggttaggcgcgcgtttgtagttcggcgttagttcggatttcgggagtcgttttcgagttcgcgtggacggtagagggcggttgtagttcgggcgtaggcgtcgttggtttgcgggtttttttgggt

SEQ ID NO: 4058 - DNA, 212 bp, Artificial Sequence
  Description of Artificial Sequence: Synthetic polynucleotide
ttatttttcgttgcgggaaggggttgtttggttgtttttgggggtttttagagttattttggtttcgggggattggaggaggaggttatttattttgcgtcgtttttaattcgtgtattattatttattaaatagagatagattttgggttttttaaagacggatgattgggggtggtgattggtttatttttaaatatttattacgtaagg

SEQ ID NO: 4059 - DNA, 201 bp, Artificial Sequence
  Description of Artificial Sequence: Synthetic polynucleotide
agtagtagtaggagtagcgacgtttagattttcgggtgttgtcggggcggtcgcgttattcgtgcgtatagatttcgtagttaggtcgttcgggtcgtagcgggggcgtcgcgggcgcgggtcgggattgagttttcgtcgaggttattagtacgcgttcgcgtagtcgcggagtttttcgtattttcgtttttttgtttc

SEQ ID NO: 4060 - DNA, 246 bp, Artificial Sequence
  Description of Artificial Sequence: Synthetic polynucleotide
gcggggatattttcgggggtttcgggcgcggtttcggggaagaggcggaagttgaaattgcgcgacggggatatttgttgaaaggtcgtttagttcgaaacgagcgttagattttagtaataaaaggttaggcgaggttatatcgcgttggagatagagcggttgtttcggagcgtaggcggcggttcgggcgggaagaggcgttgggcggtcggattcgtagaggggcgtgcgcggagttgggcg

SEQ ID NO: 4061 - DNA, 201 bp, Artificial Sequence
  Description of Artificial Sequence: Synthetic polynucleotide
ggcgttgtatcgtttttgcggttttagaggttcgcgggtgtttgggcgcgggtggcgggcgggtcgggggtttgcgggcgtgtttgtgcgagagttgtttcgcgagcggcgtagagatattcgggcgagttgagagttttattttgttttatcggtggaatgggtatattcggaaggcgtagttgttttatttttgggagg

SEQ ID NO: 4062 - DNA, 201 bp, Artificial Sequence
  Description of Artificial Sequence: Synthetic polynucleotide
ggttgcgcgacgtttttcgtcgttgggggagattagtaaagttattcgtttttggatttcggggtttgggtttttagatttcgtttcgcggcgggagatgcgtttgagttttttatagacggagcgcgttttagtttgacgtagagggatgaatagataagcgtatcgggcgggaatttcgattgtttgtgtatttggggt

SEQ ID NO: 4063 - DNA, 358 bp, Artificial Sequence
  Description of Artificial Sequence: Synthetic polynucleotide
gatatttagcggttttagggtgaatttcgatcgtagtcgtcgtcgtttcgggtagagtttgcgtttttgttttgcgtttcgggcgttgaagtcgggcgggcgatgttcgcggcgtgaaagcgttcgcggcgggcgtcgatttttgttttagttttttgtttttttcgtttcgtttgtttcgtgtttttgtgattttggttttggcgtcgtcgtttaggcgtttcgtaatgtagttgtttttgcgtttcggcgggaggcgttttgtttcgcgagcgttcggggttcggagttcggtttgggggtttagtcgagttcgggcggggtcggggtcgcggtggcgatgtatcgggttcgttag

SEQ ID NO: 4064 - DNA, 201 bp, Artificial Sequence
  Description of Artificial Sequence: Synthetic polynucleotide
cggtcgggttttttggagagggagtgtaaggaggagtagtgttttttcgaggaggttcgggagatttttaaggacgcggagaggacggtgagtttagtttcggggcgtttcgcgtcgcggatattgtaggcggcggtgaattaggtcgcgtggggtcgtttgcgtttttttggttgcggttgtgggcggcgaatacgtagc

SEQ ID NO: 4065 - DNA, 201 bp, Artificial Sequence
  Description of Artificial Sequence: Synthetic polynucleotide
gttcgggacgcgagagggggcgcgacggcggttgcggtcggttcggcgtttatttggtcgtttttgcgagtagcgtttcgcgtttcgttcgcgcggagttcgtatttttcggtcgcgtcgtcgtcgtcggcgaggagtcgtattcgggcgtagcgtcgttcgttcgcgatgacggtcgttcgggtcggggacggggaggcg

SEQ ID NO: 4066 - DNA, 201 bp, Artificial Sequence
  Description of Artificial Sequence: Synthetic polynucleotide
agagagaattcgaggttgtttttgtcgttgaaatttgagcgggagagtatttcgaagtcgtttgcgtggagcgagtagttttcgcgttatgggttagaggcgttcgggagaatttgcgggttacggattatattcgtaggggtttggcggagtaaggtgtcgttcgtcgtttgcgggtaggagtcggttttgggtttcggt

SEQ ID NO: 4067 - DNA, 277 bp, Artificial Sequence
  Description of Artificial Sequence: Synthetic polynucleotide
tcgtagagatttagttttgtttgtcgattggtttttcgacgtcgtcgtcgtgtttgagtttcgttgtttgttcggataagtagaatttcggtaggcgtagcgggcgtcgaggtttgggttttagtcgtggcgttcgtttcggcgtagtggggagtcgcgggcgtcggagaagcggtcgcgttgtttcgggttattgtatcggttgaaaaaattaaaagtaaaattaatatttagaaacgaagtttgcgtgttttcgggggtttcgttttgttttttt

SEQ ID NO: 4068 - DNA, 201 bp, Artificial Sequence
  Description of Artificial Sequence: Synthetic polynucleotide
agttagtggaatcggagggggatttcggaggaatttgtttttgatgtttcggttttttggttttttattagaattcgtagaggattcgttttggagttttcgtgcgttttggtagaggtcggggacgttagagtgtacgtagttttttgcgcgtcgagtttaggtttcgggcgtagggaggatcgggttgagagtagggtg

SEQ ID NO: 4069 - DNA, 247 bp, Artificial Sequence
  Description of Artificial Sequence: Synthetic polynucleotide
gtaagggtcgggagtttggttttttatgaagttgttttaggtcgggattagttttagtttcgacggtcgttgcggtttcgtttcggtagtttcgtgagttcgcggaggagtttcgtattcgatcgtgtatagcgatcgagttggcgcggttcgtatgaagcgaagcgtcggttttagtagcgtagtttgagtaggggattcgcgtggtaattagggttgcgcgcgagttcggggcgattgtggcggt

SEQ ID NO: 4070 - DNA, 201 bp, Artificial Sequence
  Description of Artificial Sequence: Synthetic polynucleotide
ttttcgcgcgtagttcgcgtagcgtttagagtcggacggcgtttttcggtggcggcggaggagttcggagggacgtagtcgggtaaggtagggcgtagggcgggcggcgcgaggcgtagggcgcggcgggtagaggttatttggttattttttttggcgttcggggaaggtgcggcgatggtcggggcgcgcggggcggcg

SEQ ID NO: 4071 - DNA, 201 bp, Artificial Sequence
  Description of Artificial Sequence: Synthetic polynucleotide
cgttaggttcgttttcgttcggtcgttcgttcgttcggtgggtcgcggtggtcgcgggttgcgttgcgcgggtcgggtttggcgggtcgggggttgcgcgcgttcgcgagggcgttcgacgcgggttgaggggcgttggcgtgtgttcgtaggcggttttgcgcgggggacggcgcgtttttggatatcgtcggttttaag

SEQ ID NO: 4072 - DNA, 201 bp, Artificial Sequence
  Description of Artificial Sequence: Synthetic polynucleotide
ttttcgagtttcgcgattttttcgtttatcggggaaggagattttagcgtcgttgttttgttttttttgaacgttgtttttgttcgatttggagtcgtcgcgggagcgttttatgttgcggaaatattgtttttagcgttgtcggtcggcgtttttttttagttttttttttttggttcggcggttttggaattaaatttg

SEQ ID NO: 4073 - DNA, 356 bp, Artificial Sequence
  Description of Artificial Sequence: Synthetic polynucleotide
aatacggagtacgaatataagtaggtatcgtatatttgcgagttattcgggttttcgggggaaggtaaaaagttttaataagttttaagtaagattaggacgtttttatagttttgttttgatagttaaggaaaaaatttgttaaaaattagaggcgttgttgagtgttggcgtgggaatgttagtttagttagagttttgttttgggttatttaaataaaaatagatatgttggtggtaaatgttagttgaatacgtaggagagcggtgtttttcgggttcggagaagggtttgtagttgtatttttttttttttttttttttggtttttttagtttttttattattacgattag

SEQ ID NO: 4074 - DNA, 201 bp, Artificial Sequence
  Description of Artificial Sequence: Synthetic polynucleotide
ttaacgtttgtttttattttaagttttgttatagttgttatatttattattgttcgcgtttgtgtcgtcgcgaggattgggacgtttataaggcgcgttgcgtgtacggtcgcgtgggtagcgtgtgtcgttacgtattgtagttttgtcgcgatagcggttcggtgtatcgcgttttttcgcgtatcgcgcgtgtcggtt

SEQ ID NO: 4075 - DNA, 281 bp, Artificial Sequence
  Description of Artificial Sequence: Synthetic polynucleotide
agtttcgtgcgtcggtttttgtttcgttagtttcgttatggttttttatttattttcgcgggagcgtttttgtttttttattttgtattttttttagagtcgcgcgttagtttttcgtttcgtggaagcgtttttttttcgatttcggttgattttcgttcgtcgtttttttcgcgggtgcgcgttcggtttttttttcgttcggggcgggtttgcgtgggcggtgtttcgggtcggcgggcggagtttcggttttttagttttgcgtttcggtggagttc

SEQ ID NO: 4076 - DNA, 222 bp, Artificial Sequence
  Description of Artificial Sequence: Synthetic polynucleotide
gtttaggttatatattagattttattggggatgtgagaagggtgtagcgggcgtgaggtttcgttttcgtcgttttttgttcgtttttagattcgcggttcgtttggtcgttttatttggtcgatggcgttggtggtgagtataggaaggttattatagttttaatttttgaggtaatggttgaagttcggcggggcgaagtcgttgtacgaggggtcggta

SEQ ID NO: 4077 - DNA, 237 bp, Artificial Sequence
  Description of Artificial Sequence: Synthetic polynucleotide
cgggtttggattaggacggcgaggcgggtcggcgcgcgcgcgaggtggtttttatttatatttagcgcgagttgcggttgcgcggcgtttttttgcgttacgagttttcgcgcgtttacgagtagttttgcgagttcgtcgaggttaataggcgttttacgtttattattatttattttacggatcggcgtatcggtcgtttttttatgtgtatgattatggtcgttttcgagtcgc

SEQ ID NO: 4078 - DNA, 201 bp, Artificial Sequence
  Description of Artificial Sequence: Synthetic polynucleotide
tttggttttttaatttagtagtgtttttgaatgaacgtgtgatagtttaatgaagtagtcgagtattttgatttgaatgttggagtcggggtttatagggggttgtattagttagtataggttgggttatgttattgtgataaagagttttagattttaaatttcgtttttgtgggttagttgaggtttttgttttaggtt

SEQ ID NO: 4079 - DNA, 364 bp, Artificial Sequence
  Description of Artificial Sequence: Synthetic polynucleotide
gttttattagtttttcggtcgagcggaaggcgtcggcgtttagttgggttaagttgttgtagttgaggtcgaggaatacgagtttggtcgagtcgttgaacgtgtttttttttagcgagcgtagcgagttgtttttgaagtttaggtagattaggtcgtcgtagaagatgaagaagttttcggggattcgttggatgcggttgtcggttattagtagtttgcgtacgtttagggggaaagggtttggtacgttgggtagttcgcggtcgcggtagtttacggtgtgcgggtcggtgtaggcgtagttcgcggggtacgcgtgttcgggcgcgagtagtagtagaaggttgtagagttcgagcgt

SEQ ID NO: 4080 - DNA, 201 bp, Artificial Sequence
  Description of Artificial Sequence: Synthetic polynucleotide
gaaattaattcgttagaaaaattttttgggagaggcgggagcggtaggggtggtcgagtggtcgtcgttaaaacgcggttttattttggtagttgattttcgagatttggtagtaagacgtcgcgcgtatcgggcgggttgtattcgacgtttaagtttagttattaagtttaggagcggtttttttaaggcgtgtttcgg

SEQ ID NO: 4081 - DNA, 201 bp, Artificial Sequence
  Description of Artificial Sequence: Synthetic polynucleotide
gcgtttttttttggggtgggtagcgtaggtttggtttgcgggtggggggtggagagtgagaggtacgcggggtattagtttagtttttttttggggatttcgtattcgtagtttaaggaatcggtggagtacgaattttatttttgagttggcgtaagcgttttttttttatggagatttatttcggtttttttttgaggt

SEQ ID NO: 4082 - DNA, 201 bp, Artificial Sequence
  Description of Artificial Sequence: Synthetic polynucleotide
aggaatcggcgttgtcggtgtttgggggtcggggcgcgggcgaagtcgggtcgcggaggatataataggtagagtcgggggtgttcggtcgcgcgtttttcgcgtattatgtagttttttgttatttttttcgtttttaggttaaaattttgagtatgatggaagataataagtagttcgcgtttcgtatcgatggggcgg

SEQ ID NO: 4083 - DNA, 222 bp, Artificial Sequence
  Description of Artificial Sequence: Synthetic polynucleotide
tgcgcgcgtgcgtgtgtggcgtgtgtttgggtgttttatgattgtttttcgtgaggtcgtgtgtgagtttttgcgtgggtcgtgagtgcggtagggagcgcggtgttcgggggtcgtttgtcggtgtgtttgtgcgtgtttgtgcgttagtttttgtttttgcgagtgcgtatttttaggatcgagtttgtttatatgagtttgtgtttgtgtgtgtgcgtt

SEQ ID NO: 4084 - DNA, 201 bp, Artificial Sequence
  Description of Artificial Sequence: Synthetic polynucleotide
gataataagatttgttattgacgttatcgggttggtgatatttaggtatagtagttttagtaaacgaatatatttttatgagaattaagttttttgagagcggtaagttgttttgttttgtttatagttgataagaatacgtttgtacggttatttagtatttagtattgttatttaatcgttttattagtatgtatgaat

SEQ ID NO: 4085 - DNA, 265 bp, Artificial Sequence
  Description of Artificial Sequence: Synthetic polynucleotide
aggcgtatacgaggagttcggtttagtatttttaaattagatttcggaggcgtcgttagggagcggttatcgttgggcgtcgtcgagcgtgttcggggcgcggtcgtggcgggttttttggggcggtagttttaggcgcgggcgcgtagtagtttcgaaggcgtcgtttggtttagtcgttcggttttcgagcgtcgttgtaagtggggggcgtttcgcggcgtcgcgtatattttattggggggtcgtttcgtcggcgttcgtt

SEQ ID NO: 4086 - DNA, 242 bp, Artificial Sequence
  Description of Artificial Sequence: Synthetic polynucleotide
tcgggttgttttcgtcgtttatcggagagggtcgttcgggtgtttggttttgttcgaaagtttttgggtttttttttttttttgtaaaatttaaagtaatcgaataaaaagagtttaggtcgcgcgggcgggttgcgcgttcgcgttttgtagcgcgtcggcgggggttcggttcgcggggttattgtattgagtcgggtagtgtgtggtggtggtggtggtgtagcgtcgtcggcgggggc

SEQ ID NO: 4087 - DNA, 201 bp, Artificial Sequence
  Description of Artificial Sequence: Synthetic polynucleotide
ttttagggcgtagggttacgagttttcgtttttattttcggtttttggtattcggcgtcggtttcgtcgtttttttttatacgtatttttggtagggtttcgcggggcgttttaaagtttgggggtagtttttaggtgtttttgggaagggaaagaaaggttataaagtaaaagaaggagtaaagagaaggcgagggagga

SEQ ID NO: 4088 - DNA, 261 bp, Artificial Sequence
  Description of Artificial Sequence: Synthetic polynucleotide
tcgtttatcgatgagtcgtcgtcgttcgcgttcgggtgtaggtgcgtcgtcgtcgcgtgtaggtcgttcgcgtgtgtatgttcgtgtgcgtgttcgtgggcgtttagatgcggcggcggcgacggttttagttgcgtttcgtggttattttcgtgtagcgcgtggtgtaggttcggtttcgcgtcgttatcgttcgtcgttagtatttcggttaggtcgtcgtcgtcgtttttcgggtaggtcgtttgcgcgtatagttcg

SEQ ID NO: 4089 - DNA, 201 bp, Artificial Sequence
  Description of Artificial Sequence: Synthetic polynucleotide
cggtgttttgggtcgagtcgtttggagattttagattagtatgtgggtgggaaagggcgtttcgttttgggttttttcgtttttgcgcgtagagtagagacgcgtagattcgtttttatttcgtttggtttttttggagtagtttcggcggcggtagcgatgggttgggaggggtcggtacgttggtttgcgcgggttttt

SEQ ID NO: 4090 - DNA, 337 bp, Artificial Sequence
  Description of Artificial Sequence: Synthetic polynucleotide
gaattggataataatgtggcgtttgttattggttaggggaggtagacggcgttttgattggtcgggttcgcgttcggggagtttcgtattttgtagtgttcgaaagattcgaaattttaaaagttttattgcgtgtttttgggaggggagggggcgcgttaggaaaggagtggaaaaaagtgggcgaggaggagcgttgaaaattttttgataagtagttttcgtgcgttcgagagcgtgtgaattgtttttaattatcgtgttcggtgcgtttttttgcgtagatttgtgtaatttttcggtttttggggcgtcggttcggttgtatcgtttttat

SEQ ID NO: 4091 - DNA, 201 bp, Artificial Sequence
  Description of Artificial Sequence: Synthetic polynucleotide
tgaagttgttttttcgggataggaagggttaaatggttgcgcgttaattcggtttcgattggggtgttagggagtaagagtcgtttgtttcgggggatttcgtttggggggtttttaggggtcgttttggcgtttcggttataatttgggcggttttgtgcggcggttttcgtttgcgtttttgcgcgttatttaaaattt

SEQ ID NO: 4092 - DNA, 201 bp, Artificial Sequence
  Description of Artificial Sequence: Synthetic polynucleotide
tagtaggtagtgcgggtatagtgttgtagattattatttcgttaggttcgggtagcgtttattagacggataggcgttcgcggtcgtttttatttcggcgcgtttatttcgagttttttacgtcgcggcgggcgggcgtaatatatttttttatttttagtcgtcgaggattatatttttcgtttagttttttcgatttat

SEQ ID NO: 4093 - DNA, 201 bp, Artificial Sequence
  Description of Artificial Sequence: Synthetic polynucleotide
ttttgaatcgttatttgtttattattcgggcgttcgttatttattaggcgttgtattagaggcgttatacggcgggtatgttggcgttgttttgggcgttcgttttgggtttcgtgttgttgttttcgttttgggtatcgcggttcggcgtcgcgttatcgcgagtttattattcggcgttgttggtcgtcgcggcgttgt

SEQ ID NO: 4094 - DNA, 201 bp, Artificial Sequence
  Description of Artificial Sequence: Synthetic polynucleotide
gtttcgtgcgtttagttttgtcgggcgtcggcgacgcggcggtcgttgtcgttgtcgttatagtcgtgttcgtagtgttttaggcgtaattgggtattcgcgtcgcgggttagtattggtaatttagtcggggttcgagggaagcggagattttcggttttcgacgtttttgggtatcgtcgttttttttttttttagggt

SEQ ID NO: 4095 - DNA, 386 bp, Artificial Sequence
  Description of Artificial Sequence: Synthetic polynucleotide
tgtttgttgaaaaataatattgtgattatttttagcggcgaagggtgtgtttgggaacggtttggggaggggatagaagagagaggggtgggatggacggcggtagaagtgggaggtatacgaggagttattggaaacggcgtttttgtggaggagtcgggggggatggggagtagagggagggggttttgttgttttagcgtttcgaggtcgtggagcggtagtagttgtagtcggagtagtattagtaatagtaatagtgagcgggacggagttaggatcgttcggagcgtataggtttcgaggtagtataaggtttgttatttttttatttgttggtagttgtagaagaagatttgttttttaagtgaaacgtatatgttatt

SEQ ID NO: 4096 - DNA, 201 bp, Artificial Sequence
  Description of Artificial Sequence: Synthetic polynucleotide
aggttatataggggtcgggtgtaggttttacgcggaaaggcgcgtagtgttcggggtttatgtcggtttagggcgtataggttttcggggtttcggggttcgcgttgttcgcgtcgtttgtgagcgttcgttaagggggagggatttgggcgcgggggcgcggagttttcgggagcggcgcgcgtcgcggggggcgggggg

SEQ ID NO: 4097 - DNA, 201 bp, Artificial Sequence
  Description of Artificial Sequence: Synthetic polynucleotide
tgttagggcgtagggagggcggtattcggttttagttttcgtaatttcgcgcgtttttttcgtcgtgggatttgggttttcgcgtcgtttttttgagtttcgagcgcgcggcgggcgggagttaggttgggattggtggtgaggtagggagtgaggagcgagcggagtcgcgtgcgtcggcgcgtagtttcgggtcgtttt

SEQ ID NO: 4098 - DNA, 309 bp, Artificial Sequence
  Description of Artificial Sequence: Synthetic polynucleotide
tttgggtcgcggcggtttttatttcgttatcgtcgtcgtcgtcgtacggttgttcgtcgcgaataagtatcggtattattacgcgacgtagtaggtcgggcgcggcgtgtagttcggcggatgttgttaggttaggcgatttcgtcgtttttggagcgcgagcgcgttttagtttgtagcgatgattttggaattagattttgatttgcgtgggcgtgaggcgaagtaggttcgttagttgttcgcgttcgggcgtagataggtatcgttgttgtcggaagcgtcgttttaattttagcgtttgcgttt

SEQ ID NO: 4099 - DNA, 203 bp, Artificial Sequence
  Description of Artificial Sequence: Synthetic polynucleotide
tattttgttttcggtcggtgattcgttgtggtttttaggttaagtgtttttcgtgttcgggcggttgacgttgtttgaagtttacgcggcgtgtcggcgacgcggcgtcgtggtggttaaggttgggtatttttacgtcgtttggaagttttcggggttagattagtgcgacggcggttggttggttgacggtagtgtgcgtt

SEQ ID NO: 4100 - DNA, 388 bp, Artificial Sequence
  Description of Artificial Sequence: Synthetic polynucleotide
atcgggaagtagttcggtgttttaagttttttgagatttttcggatttgcgcgtcgttcgttcggtagggggttcggtaggcgcgggcggcgggtgggggcgggaggttttgttcgttcggtggttgtcgcggtttttttcgcgttgttttttacgtttggtttattatgtacgaggtaggtaatttgttttttttttcggggatttatttcggagataagaaggtagtttgttttttgtaatggtttttgttggagtgcggcggggtttaggcgcgagcgggggtacgggcggggagttggtagcgaaggatgcgttcggcgtttttcggcggtcgttcggagttcgaggtcggcgcgggaggagcgttgatttcgcgggtcgagtt

SEQ ID NO: 4101 - DNA, 241 bp, Artificial Sequence
  Description of Artificial Sequence: Synthetic polynucleotide
gagggcggcgcgtagcggcgtttcgcgaggtttttacgtcgggcgatatggggtgtttgttgtttttgttgttttgggcgtttttttaggtttggggaagcgttgaaggtgggtggaacgagggcgtttgagtgtattcgcgggagggcggagagagggagttgggtagggacggggagggtaacgtttgatggggattggtgagattcgggacgtattggcgcgatttaggtagaaaatt

SEQ ID NO: 4102 - DNA, 232 bp, Artificial Sequence
  Description of Artificial Sequence: Synthetic polynucleotide
gggttttttatttgtatttttttataaaattgtcgttcgtgtgtgtttttgcgtttggttttttgtatttttaaggggtttttgaagatagggtcgaatgcgcgcgggggttttaggtattttgcgttttacggcgggtttcgtagttcggttcgagtcggttttggaagtttcgttttggattagattggtatcgacgtcgtttttagtttgagcgttgagagggaaaacg

SEQ ID NO: 4103 - DNA, 214 bp, Artificial Sequence
  Description of Artificial Sequence: Synthetic polynucleotide
gaattttttttagtgtcgtaattaggaaagttttaaaaagtaaggattttagatagataagagatttatttttttttttagtataagaaatatttcgcgtcgcgttagtcgaacgttgttcgtataaggttattcgttttttttggtcgggacgtattcggtgttttttagttttttattagaattggtttagggggcgcggaaatagagaggt

SEQ ID NO: 4104 - DNA, 250 bp, Artificial Sequence
  Description of Artificial Sequence: Synthetic polynucleotide
agtagggattagttggtcgtcggtttttcgggtaagatggggaatcgggagatggaggagttgatttcgttggtgaatcgtttgtaggacgcgttttcggcgttgggatagagttgtttgttggagttgtcgtagatcgtcgtggtgggcggttagagcgtcggtaagagttcggtgttcgagaatttcgtgggtaggtaagcgcgtagggcgcggagtaaggatgcggtagtggggcgatttcgttgcg

SEQ ID NO: 4105 - DNA, 201 bp, Artificial Sequence
  Description of Artificial Sequence: Synthetic polynucleotide
ttaggattttgtagattcggtcgcggtcgggtcgagtgtttttcgtcggggttttacgtttacggtttacgtttgtaatattagggttgtacggcgggttcgtagttgggtttgcgtttgggattcggggttttttgcgtttttcgtgtcgtattttttgttttaattttaagcggacgggttttggggttttatcggtta

SEQ ID NO: 4106 - DNA, 467 bp, Artificial Sequence
  Description of Artificial Sequence: Synthetic polynucleotide
tcgtttttttttacgttttttttttcgttttttttcgcgtttagtttcgttttttttattttgtaaaataaagtcggggaaaatgtttgttcgtgtagttcggagcgcgtagttcgtttttgaataagaagtgagtataatggcgtgtttgtaaaaaaaagttttaagttcgttttttttaaaaaatattttgaatgttgtatgttttatgttttttagcgtttcgcgggagagattcggttatagagtaggaggtgagatttttttttcggtatttttatttttttggtcgtacgtttttttgttttagttttttttgggaggattgtaaatgtttttttttagtaagcggtcgttttttattttcgtttcgcgtttaaagtgttgggttataatttggatttggaggtaaatttttgttagattttttttacgtcgttttttttttttttttcgtcggtgttcgg

SEQ ID NO: 4107 - DNA, 201 bp, Artificial Sequence
  Description of Artificial Sequence: Synthetic polynucleotide
ttcgaggggtttatagtttggtattaatttgtaggtgttcgttgttgatttggtttttttttcgatttgcggacggttttttttagcgattttcgatatacgtttttttgttttcgtcggagggtcgggtttggggtcgtcggagtttgcgggaatttagcgtttattcgttgattttcgagtcgtttcgttagttgtgcg

SEQ ID NO: 4108 - DNA, 232 bp, Artificial Sequence
  Description of Artificial Sequence: Synthetic polynucleotide
ttggggtgtttttaggaagtgaaggaaaaggttttcgacgatattgttattggaaaagtgttggttacggttttcgttttattttttttatttacgggttcggagtttttaggagtagttagatcgattatcgtttttgtagttttatttgttttcggagagatatttataagttagtttacggagagtttggattcgttcgttttagtatttacgtttttttcgcgttcgg

SEQ ID NO: 4109 - DNA, 222 bp, Artificial Sequence
  Description of Artificial Sequence: Synthetic polynucleotide
ggttagggatagtaaaggagatacgggtgggtgagacgtcggattttacgagggtttgttgtttttttggcgcgggcgtggaggtattggttagagggtacgtttattagttcgagattttcgggatgaggttattttttgagtttatatttggatatttattttttcgaatgcggtgattttatttatattatagcggttattagcgggtttgagatcgtg

SEQ ID NO: 4110 - DNA, 239 bp, Artificial Sequence
  Description of Artificial Sequence: Synthetic polynucleotide
ggtttttaggcggagcgcgggcgcgaggtgcgggtttcggggcggagcgtacgttcgggaggcgggaagtgggtagtagcgttttcgtttggtttttgtgcgtttcgattcgacgttttttcgttcgattaggtgtttcgagagcgtatagttgggagggttttttcggtcgcggcgagatttacgtttgcggtgtgttagggcggcggcgacggtgacgggcgtggggcgcggcgttg

SEQ ID NO: 4111 - DNA, 209 bp, Artificial Sequence
  Description of Artificial Sequence: Synthetic polynucleotide
cgtttcgggggtttttgtattttagtcggggaatgttgttattttgaggggggttgtttggttgcggggcgtcggggttgggggtattgtttttttaggacgcggtttcgtagtgtagagcgtcgtcgtttgcgtggggggatttggtagttttaggggttgttttgagttttttggcgagtaggagtgagttgttgcggcgagtgagt

SEQ ID NO: 4112 - DNA, 380 bp, Artificial Sequence
  Description of Artificial Sequence: Synthetic polynucleotide
gaggtcgggtttcggcgattttcgagggaggttcgggaattattttcgatttaggcgttagattcggagtcgtacggggtttttagtttagtttcgcgagcggttgttgatcgtttttttcgcgttcgttagggtttttgtttcgcgttagttatcgcgcgttttttttttgtttatgtcgtagttttcgtggtttttgttttggattcgggatgttaggttgagatacgttttgtaaatttttggtagaaatgggcgtaagggggtggatttcgttttcgtttttcgggtttttttttttttttcgtttatatgtttttttattattttttttttttttttttattgtattttgatgaaatggttttgtttgtttaaat

SEQ ID NO: 4113 - DNA, 394 bp, Artificial Sequence
  Description of Artificial Sequence: Synthetic polynucleotide
cgggtcggtagggattaagagtttgaaagggaatttgttttttttttttcgtagttcggttattaaggtaagaaattgtaggtagagaagttttcgaattcgatttaggacgtcggcgtttgttaggattttttcgtttgtttttcgcgtttcgcgcgcgtttatgttattattacggggagggtgtatgcggtaggtgtttggtcgaggttttcgggagcgagtcgtttttacgtgttttagtttgtttttttttcgaagttagacgttggcgttgtagttttgttgtttgacgttgttgtagaagttcgcgtttattcgggttaggtttggggagggttttttggggcggtttttgagttttatttgttcgaagtttttatggggggaggtc

SEQ ID NO: 4114 - DNA, 201 bp, Artificial Sequence
  Description of Artificial Sequence: Synthetic polynucleotide
tttcgttcgggttttttaaatatgtcgtagcgtggttgtttattgttttttttgggtaagaggaggttttagatatttttacgggatttgaattttcgagcgttttgtacggagtagttatttcgttagtattttaaagtgaagttgtttataacggataagttcggagattttatgagaggtcggggtggagaagtcggg

SEQ ID NO: 4115 - DNA, 557 bp, Artificial Sequence
  Description of Artificial Sequence: Synthetic polynucleotide
gtcgttatcgtttagtttcgttgtttaggtgggaggggttatttgtcgcggggtttttaagttagtgtcgtttgttttcggtttttatttattgatagtacggcgttcgagtgattttgtttagtttcgttttgcgtttttgtaaattacgttgttgcgttaattataaatttggttaatatgtttttgtaattttattatttaaaaacgtttttaggtatttggtcgttgttagattaggttcgcgggttcggaggaggtttttttatttgttttcgttagtttcggggatcgtgcgcggttttcgtgtggttttcgtttacgaggtttttcgggtaggaatcgtcgcgcgatttttgtttagcggtcgcgttttggttacgggcgatttttgtcgggaattttgttttcggttaagttgcgttttcgtatttcggtggtttttattcgagttcgcgtttgttggttttttttttggtttttttgtttgatttcgattttgttttcgaattttatttttagatttttttcgttttggaacgtcgatttttttttcg

SEQ ID NO: 4116 - DNA, 212 bp, Artificial Sequence
  Description of Artificial Sequence: Synthetic polynucleotide
agttgggtttttttttattttaaaatttttatttttagtttttaaaagttattttagttcgttatattgaaattggtacggtttttaaagatttttttttcgtagttgtggcgtttttaagaaaatacgagtacggattaggttttggatgagtgttcggttatcgagaattagttattttttattttttaggattttttagttttttttag

SEQ ID NO: 4117 - DNA, 201 bp, Artificial Sequence
  Description of Artificial Sequence: Synthetic polynucleotide
tttttaatggtttagtcgatcgtgtgtataaatttgcgttttattcgtcggggatcgttgggagcggagataaatttaatttttagggtaattttggtttcgttcgttttattttattttgtgtttaaatagagttttttttgaagttgcgaatatttttaggttttttgggtagggttggaggggtcgaggagagttatt

SEQ ID NO: 4118 - DNA, 201 bp, Artificial Sequence
  Description of Artificial Sequence: Synthetic polynucleotide
ttttggataataatgcgcgttttcgtttttttagaaagttagggacgtttttagtcgtcgttagagttggttcggttttttagttttttttcgtggtattcgtaggcgagataaagttcgttttcggtgaggttgcgcgcgtttaaagcgtgcgggatgtttagtacggaggtttttaagcgggggatttttggttttttt

SEQ ID NO: 4119 - DNA, 294 bp, Artificial Sequence
  Description of Artificial Sequence: Synthetic polynucleotide
ggtagatgacgattcgtcgagttcgtcgtttgttttttcggaggcgttcggagttgttgcgggtttcggtcgtcgttgttattgttgttgtcgtcgtcgtcgtgcggggttatttgaaggttggggcgcggaagtttaatttcgtgttgattgggttttaagttttttgcgttttcgtttcgtttcgagtgttcgcgaatttttcggacgtttacgtagattatttagttatattataattttgtttgcggagagaggagaggagaaaaaggggtcgttttaaaaatttttaaa

SEQ ID NO: 4120 - DNA, 244 bp, Artificial Sequence
  Description of Artificial Sequence: Synthetic polynucleotide
tagttttgagtcggttgtcggttaggtgttgggtatattcgcgtcgtcgtcgtcgttcgtttttggtcgcgttagtcgtagggttttcggcgttcgggggcggtagtaggttggagcgtatcgtgcgcgttttgttttttcggcgttttcgtcgtttcggaggttcgggtttttcggttttcgtcggttttcgttttatggtcgcgtgtcgtcgcgttcggttttttcgtcgtttacgttcgtt

SEQ ID NO: 4121 - DNA, 303 bp, Artificial Sequence
  Description of Artificial Sequence: Synthetic polynucleotide
ggtttggggttatgggaataggattaaggttttttgagcgtcgggtttggtttttgtggtttcgtaaattttttagtttgtgtgttacggcgacgcgtagcggttgagtcggagtttacgcggcgcgcgtttttcgcgaggaatttttcggtttgtaggttgtttgttattttcgtttttcgacgcgtttttttttggttcgcgttttcggagttttttttttttttggcgaggatttttttcggcgttcgcggtttcgattttcgtcgcgttgcgttcgttttttcggtttcggttgtttcg

SEQ ID NO: 4122 - DNA, 286 bp, Artificial Sequence
  Description of Artificial Sequence: Synthetic polynucleotide
aatagattttcgagttgaaaaaataaaaataaattggggagttagagtttttgaaagtttcggtaggaaatttaatgggttttttgtttttttaaattttcgttttcgttttcgttgatattttgtaaagtcgcggcggtagcggcggggattacgttgcggtgtattatttttcgttattttttcgcgttgggttggggtcgagggggtttcgtagagtcggtaatcgaatcggttttggtttgttttttttattttttagttattattagaattagttttcgcg

SEQ ID NO: 4123 - DNA, 261 bp, Artificial Sequence
  Description of Artificial Sequence: Synthetic polynucleotide
tggttgtggaattagatttgttttgaatttagtggagcgtatcgttggggttcggaagttatcgttcgcgggtatcgggttggcgttgttcgagtggaatcgatagtttgcgagtttcggttgtaagtggtttttttttttcgcggttgttgtttagtgtcgggtgagggttgcgagtgtggtaagttgtaaagagagttttagaggttcgaagagcgttgcgtttttattcgcgttcgttttttttttttttcggttttt

SEQ ID NO: 4124 - DNA, 201 bp, Artificial Sequence
  Description of Artificial Sequence: Synthetic polynucleotide
gaacgcgtagagagttttttggagtgttttgattttgttttcgagagggtttttaattttcgtatttttttagtggttgttttggtaggtgcgcgttttgcggggagttgcgtttcgggggttatcgtcgagcgggagttgttttttggaattttgtttatcgcgaattgggtgtttattttttatttttgttttttagtg

SEQ ID NO: 4125 - DNA, 201 bp, Artificial Sequence
  Description of Artificial Sequence: Synthetic polynucleotide
tcgcgttttagtatcgagtgttttaagttttgcgcgtagcgtcgggtttggaaggcggcgaatggttgtttagtcgtcgtttttattagtgatattcggtcgttagttttcgtttaggatgtgtatatttgttggtagtattggttcgggtggtagttatcgggttatttattttataggtataatcgtatttaatttaat

SEQ ID NO: 4126 - DNA, 201 bp, Artificial Sequence
  Description of Artificial Sequence: Synthetic polynucleotide
gcgtttcgggaagtgtatggttttaaggtttaaggcgttaggatttaggtttttagagtttttaattagtgttattttttttcgtagcgcgggtgttagtcgcgagttcgtagtttttcgatattcgtttttttttggggttttcggggatttttttagaggttgtaaaggtgttagaagtttaaggtaggaggtagtttg

SEQ ID NO: 4127 - DNA, 201 bp, Artificial Sequence
  Description of Artificial Sequence: Synthetic polynucleotide
tcggcgtcgtcgttgtcgttcgggtttcgcgattcgggtcgggttgtgggcgcgcggtaggcgggttgcggcggcggcgggacggggcggtcgcgggttgcgtggggtttgtgcgcgcgtgtgcgcgggcgtcggttgtgcgcgtcgcgggcggatagggttcggtcggcggcggtaaagttgggattcgcgggtcgggcg

SEQ ID NO: 4128 - DNA, 201 bp, Artificial Sequence
  Description of Artificial Sequence: Synthetic polynucleotide
tgtttcggttgatttcgttttgtagttagtttgaggttaggcggtcgttttttgtaggttataaattttcggcgtaaaagtagggttttgaacgcgatatcgtattagagcgtttagttaagcgagttgtttttatttttattgtgtcgggcggcgtaaattgcgggcgtaggtagaggagtcgcggttttgcgtcgggcg

SEQ ID NO: 4129 - DNA, 201 bp, Artificial Sequence
  Description of Artificial Sequence: Synthetic polynucleotide
ttgcggaggggtcggtgggttagagttaggttaggtagttgttgagtttttttttttttttttggcgggagtgtgtgtgtaaggggttagggggcggagtcggagaaagggttgggggtgttcgtgtttagcgttttttcggacgcggttttataatttagttgcgagaatagatggacgtagcggcggtttatttcgggg

SEQ ID NO: 4130 - DNA, 201 bp, Artificial Sequence
  Description of Artificial Sequence: Synthetic polynucleotide
cgcggtttttcgtgggttggtcgggttaatgagcgcgcggttgtaggggcggcgggcggggagggggcgtcgagttttgcggatggaggcgcgggtagcgcggcgcgtttatttcgcgcgggcgttgttggcggggggcggcgtagttattggattcggatcggggtcgcgattcggggtggcgggtggcgtgggcggcgt

SEQ ID NO: 4131 - DNA, 201 bp, Artificial Sequence
  Description of Artificial Sequence: Synthetic polynucleotide
ttcgtcgatttttagaggtatcggttgcgttttttggtggtttggaacggcgcggagggtaagtttgttgtgatttgttacgatcgtatcgcgtagtagtcgtagcggcgcgagggggttcggttggggttggagtataagttcgaggtcgtcgtgttttcgtttagttgggtcggtcggttttcggtcgcggggtttcgc

SEQ ID NO: 4132 - DNA, 344 bp, Artificial Sequence
  Description of Artificial Sequence: Synthetic polynucleotide
gtcggttagagggtttacgtaagtttcgaaattcggggggacgttttttttatttttatttttgcgttcgttcggggttgggcgcgtcggggcgtacgtacgtcggtttgttggcgatttggcgtatttgttcgcgcgttttggttttagttgtcgtaggttttttttgtatttatttttagtttttaaagttagtgtagttagtatcgtttatttggagttttaatttttttttgcgattttcgtatatttattgtattttatttattattttcgggtcgcgtaggttcgggtttgcgaagatacgcggtttattttcggttatttcgtttatttggttaaag

SEQ ID NO: 4133 - DNA, 201 bp, Artificial Sequence
  Description of Artificial Sequence: Synthetic polynucleotide
attttttttcgcggcgttttttcgcgtagtttttagattgtttagtcggtgttcgcgggcgttcgttttttgcgagttttaggttcgcgcgagttgtttgcgggaggggtcggggatacggatagacgttgttttattagggattcggaggatttggtgggtaagagtatgatttagcgattttcgtttcgggtaagcgtt

SEQ ID NO: 4134 - DNA, 218 bp, Artificial Sequence
  Description of Artificial Sequence: Synthetic polynucleotide
attatttttttttttgtttaaaggattttttttttttttttgattttacgaatttatttttttaataggtttttaaagtatgggcggatgtgttttttttcgtttatcgttaggagtcgagtttcggtaggtgagcggtgtaaaatacgtatttagttgtttttagtttttttcgttttcgttgagttggttgtttttatttcgtattacggtattcg

SEQ ID NO: 4135 - DNA, 234 bp, Artificial Sequence
  Description of Artificial Sequence: Synthetic polynucleotide
gcgcgtttcgtgcgttttcgtttttcgcgcgttttcggtttattttcgtttttggagagttgtcgtttgcgttcgggcgcgcggttggttgttttttcggcggcggcggcggcggttttattagcggagttttcgtttatgattggtttcgttcgggaagttggagacgggcgatgaataattgatgtgtgcggtgcggtagtcggacggcggcggcggtggcgggtagtagcg

SEQ ID NO: 4136 - DNA, 201 bp, Artificial Sequence
  Description of Artificial Sequence: Synthetic polynucleotide
cgggggtattcgggtaggggtgttagatatagtattgtatttggtaatttttcggggcgtttagtgtggtttttttattcgggagtttggaagggtttttcgtagttcgtaggagacgtagcgtttttcgtttagggggagtaggaggatagttggtcgttttcgggagttttaggcgcgaagcggttttttttcgtttta

SEQ ID NO: 4137 - DNA, 201 bp, Artificial Sequence
  Description of Artificial Sequence: Synthetic polynucleotide
agttatagtagtcgtatttttcgtagcgcgtcggcgtttagtgtagcgtttttagtagtagcgttagcgcggtcgttcgtacgttttttttcgtcgtcgtcgttcgtatggttgcgttttttttaggtgcgcgtcgcgtagtttttcgacgttcggtgttcggcggtttaggtgtttcggcgtgcgttttcggttttgatt

SEQ ID NO: 4138 - DNA, 235 bp, Artificial Sequence
  Description of Artificial Sequence: Synthetic polynucleotide
tttcgcggtttgggggacgggagaatggggggtttacggtcgttttgggtttttatcgcgtatcgcgttcgtagcggagtttcggagttatggttttgagcgagttggcgttggttcgttggttgtaggagagtcgtcgttcgcggaagtttattttgtttatcgtgtttttggcgttgttgttggataatatgttgtttattgtcgtgggtacgtgcggatagggtatttttgt

SEQ ID NO: 4139 - DNA, 201 bp, Artificial Sequence
  Description of Artificial Sequence: Synthetic polynucleotide
attcgtttattttttatttttggtttatttatcgttatcgatatttgggttatcgtttttaaggtacgtgttacgtcgcggaattgtagcgcgtcgttttcgtcgtattttttattgttttcggtttgtttcgggtgggcgtttggtaaggtttgggcggaggttttttcggttcgcgggttagcgcgttttgttgggaaa

SEQ ID NO: 4140 - DNA, 241 bp, Artificial Sequence
  Description of Artificial Sequence: Synthetic polynucleotide
gttaataacgggcgggtttttatagttcgaagttaaagcgttaaaattcgagggaaggcgaggagggggcggtggcggaggcggttgcggggtcggggttcggttgagttttcgtttgtttaattttatttgttattgtacgcgtttaatcgtcgtatatttttcgtatttaatttggatgatattttgattttattattagtattcggcgtcggattgacgtagtttcgagtcggggatt

SEQ ID NO: 4141 - DNA, 201 bp, Artificial Sequence
  Description of Artificial Sequence: Synthetic polynucleotide
ggggtatttgtatcggggttgggcgggcgtatttagagttaggcgggtaggaatttttgcgtagttattcggtgtttgtatgtttttggcgcggaagggacgttttattagtttcggcgttttttttttttagatttttttttcgtttttttttattgtttgtttgttgtattattttttatttagattatttagatcgtt

SEQ ID NO: 4142 - DNA, 201 bp, Artificial Sequence
  Description of Artificial Sequence: Synthetic polynucleotide
ggtcggcgcgcgtgggtttcggcgaggcggcgttgtaggagttttgcgggtagttggagcgttatttgggcgcggcggtttacggttgtggcggcgttatcgtgcgcgacgtttttttcgcggttaagggtcgcgcggtcgattgcgagagttcgcgcgagtttcgggagcgggttttgcgcgtttgatgggtcgaggcgg

SEQ ID NO: 4143 - DNA, 217 bp, Artificial Sequence
  Description of Artificial Sequence: Synthetic polynucleotide
tcggcggcgagcgttgtattattttacgcgggcgtcgagtcggggtcgggcgtcgcgatcggagggattttttgtttcggcgagttagtttcggagttttcgcgtagcgttcgcgtcgtcgttgagtttttttagttttttatttttaaaaaagttttttttcgtgtgtgtgcgtgcgtgcgcgcgcgcgcgtcgttttggtataagttagttttga

SEQ ID NO: 4144 - DNA, 201 bp, Artificial Sequence
  Description of Artificial Sequence: Synthetic polynucleotide
tagggtttcgatttttcgtggggtacgcgcgatttcggcgtagatgttagttcgttgtttttcgggttgagggagcgaggattttagacgattttagggtcgttgtttaggtttagtttcgcgttttttatttcgttatttcgttttgcggttttagtttggagatttacggattttattgcgattttttgcgtagtgtag

SEQ ID NO: 4145 - DNA, 201 bp, Artificial Sequence
  Description of Artificial Sequence: Synthetic polynucleotide
taaatgggttaaataggttcgtaaggttttcgcgggttttttggttcggaagttgagtcgcgggtgtttggtttgaagtttcgcgttttatagtggttcgcgggtttcggcggtttttgttttacgttttttaaggtattaggtaggtggttttagggtttttgtttacgatattttttgggtggggtaggattatttttt

SEQ ID NO: 4146 - DNA, 201 bp, Artificial Sequence
  Description of Artificial Sequence: Synthetic polynucleotide
tgtagttcgttcggcggcgttttcgggcgagggtttggtgttggggagcgagcgcggagcgaggtgtttttttaaatacgttttgtagtgtgacggcggtcgttcggttggaagagttatttttattttgcggtaggagttcgttcgtcgttatcgttcgtttcggtttttatggttacgcgtttgttttcggtttcgggt

SEQ ID NO: 4147 - DNA, 317 bp, Artificial Sequence
  Description of Artificial Sequence: Synthetic polynucleotide
cgcgttttgttattaggcgttgtagttgttggtcgagttttgtgttcgtggggttttggagtacgatagttgttaggattttatttattatttgcgggatcgtgttagatttcggtttcgcgatttaggtgagtgtcgttatcgtcgtttggagggatttaagggttttgggttgggatttggggtcgtatcggggtttgaggtagaatagcgacgcggattgggagagggcggggggcggttatcgagttaggagagtgattaagaattagcgtattgtggtttgatgttgtaattaggcggggattcgggcggtg

SEQ ID NO: 4148 - DNA, 221 bp, Artificial Sequence
  Description of Artificial Sequence: Synthetic polynucleotide
tttgtattgtggagtacgttatgattgtttacggtggtcgtaggtgtagacgttagtcggaatcggaatcggaatcggagtacgggttgtcgttttcgatcgaatcgcgggcggcgcggacggcgtcgcgcgagggataaggtgcgcgaggcgtacgtatttttatttttattgtcgggagttgatttgtttttttcgcgtggttattcgtcgttgtaaat

SEQ ID NO: 4149 - DNA, 201 bp, Artificial Sequence
  Description of Artificial Sequence: Synthetic polynucleotide
tcgagagttttgcggcgttcgtttttttgttggcggacgtgttttttgagtcgttttcgcgtaggtaagaggttgtcgtttttagcgagggagagagtagcggcgattttatttagttatcggacgtcgtttcgtagtgttttgcgggtgcgaattttaattcgatatattaggtgttttgaggggatggtggtcgtttat

SEQ ID NO: 4150 - DNA, 201 bp, Artificial Sequence
  Description of Artificial Sequence: Synthetic polynucleotide
gtaggggagagcgagtatgtttttgtttcgggcgtcgtgcggtcgtagtagtagcgcggttttttttagtgcgagtcgtgtttggaatgtttcgggtaagcgaagggttagtaagcgaggcgaaacggatattataaagtagagagtggtgtgagttttttcgttttttgaaaagatggtaagttttcgtttcgggaaggt

SEQ ID NO: 4151 - DNA, 201 bp, Artificial Sequence
  Description of Artificial Sequence: Synthetic polynucleotide
gagttttacgtcgtcgtcgtcgcgttagcggtggggggcgggttgggggcggggcggtcggggttgttttttcgggcgtatatgcgagcgtagtattcggcgttgtcgagttatttttttcgtcgttcgttagtaagtttggcggttttaagttaggcgcgttttaggatttaggtttatttgtttttatttagtttcggt

SEQ ID NO: 4152 - DNA, 201 bp, Artificial Sequence
  Description of Artificial Sequence: Synthetic polynucleotide
gggtatagttacggtaatttttagtttgttaatgttaaggcgggcgcgtaaggtcgtttaaatttagatttttttttttatttattttaaaaaataataacgtgttagttattttcgtagatatcgtcggttggtgtttgtttaggagacgttagggttagagcgttatttttagtatcgaaatggtagagagaaagcgta

SEQ ID NO: 4153 - DNA, 230 bp, Artificial Sequence
  Description of Artificial Sequence: Synthetic polynucleotide
tcggtgttttttttcggtcgttttatttagtaatttttcgtgttttgtttttcgattggaaatgttttacggaagcgttttggatagggttttcgttaggcgataagagttcggtgttgagatgtgttacgtttttatttttttattaattatggatggaaataaataaggaagagttaattttgttgagtttttttttcggtaacgagaggcgttttgtagtcgggagg

SEQ ID NO: 4154 - DNA, 201 bp, Artificial Sequence
  Description of Artificial Sequence: Synthetic polynucleotide
gttttttcgagttggtcgtttttgtagatttttacgtttagttgttatagcgtcgtttcgattttttcgttaagtatattttgtattgtaaggttaagtacggtcgtcggtttgggatttagtgttatcgggaggaaaagagagagatttggggttggggtatggatgatggggggaagggcggtcgtttttgttattgtt

SEQ ID NO: 4155 - DNA, 201 bp, Artificial Sequence
  Description of Artificial Sequence: Synthetic polynucleotide
tcgtagacgtcggaggcgttatggtcgttaagttcggcgagttgatgggtatttgttttagttattaggcggtgatgtcgtatttcgtgtgtttggtcgacgagttttcgtagttcgtgcggttcgttaagttgtttaagggtcggggtcggttgcggcggtcgcgttagtttcgttttaagacgtagtcggtgattttcg

SEQ ID NO: 4156 - DNA, 201 bp, Artificial Sequence
  Description of Artificial Sequence: Synthetic polynucleotide
gtagttttaggaagtcgtagtcgtcgtcgtcgtttaggtagagtagtagcgcgcgcgtggcgttggtgcgtaggttgaagttgagttcgtcgttgttcgtcgcgttcgtttagcgcgcgtagcgagtttattgttcggggtcgtcgtcgaattttaggtcgttcgcgcgcgtcgttagcgttagtagtagtagtaatagta

SEQ ID NO: 4157 - DNA, 201 bp, Artificial Sequence
  Description of Artificial Sequence: Synthetic polynucleotide
aagtttttattttttggattcgggtttggcgttttcgttttcggcgcgtttttattcggcggacgcggtcgcgtataaggtttagtacggttcgcgttttcgtagttcggtcgcggttgaatatttttagcgcgaagcgggtgggcgttagtagtttcggggacggcggtttttaggtttgaaagttggcggttcggggtt

SEQ ID NO: 4158 - DNA, 201 bp, Artificial Sequence
  Description of Artificial Sequence: Synthetic polynucleotide
ggttttttagtttgggttaggtcggggcgcgtgtttcgggttttttgtggttgtatcgcgcgttttgtgtttacgggcgaaggcgttggaattcggcgttcggagttcgagtttttgaaggcgggaggcggcgttcgattttaggggttgcgttgggttgtcggagttaagagtgtttgcgtttttagtttcgcgttagaa

SEQ ID NO: 4159 - DNA, 201 bp, Artificial Sequence
  Description of Artificial Sequence: Synthetic polynucleotide
ttagagtgtgattgagcgggttggttcggcggtcgttgtttttcgttttcgttttttcgcgtttggtcgcgttatttattgtcgcgggtgttcgcgtgcgcgtcgtcgatgcggtcgtcggggagcgtttggaggtggaagtcgatgtttacgttgtagtagagtcgtcgtagtcgtttgatgtttagtaggtagtcgtcg

SEQ ID NO: 4160 - DNA, 201 bp, Artificial Sequence
  Description of Artificial Sequence: Synthetic polynucleotide
tatttagaaaatggaaagttgagtggtcgatgaatcggaattgggagtagttttttatgaattagagaaaatgtaagttaaaaggagatattattttttacgtattagattggtaaatattaggaaatattaagttttgttgaggaggaggggtttagggagtttttatattatgtgggtgggattgtaatttggtataat

SEQ ID NO: 4161 - DNA, 201 bp, Artificial Sequence
  Description of Artificial Sequence: Synthetic polynucleotide
ttttcgggacggacgttttaggcgcggcgtcgagtggaggcgagggggttgcggagggggaaggggttacgcgggttacggggtttaatttttgatttttcgcgacgttaagaatgtaggagggtagagttgagggagattttaggtggaatttttaggtggggaaggttgagttgtcggggttgcgggtatcgggaaggt

SEQ ID NO: 4162 - DNA, 201 bp, Artificial Sequence
  Description of Artificial Sequence: Synthetic polynucleotide
tcgtcgtcgtttgttcgggacggtttcgtgaagaaggacggaggtagattgcgtgttcgtagcgggatttttttggtttttgggatcgtcgtggttttcgcggggtttgttacgttttttttcgcgtttttagtgttcgtattttttagttcggtcgtcggcgtagttattttatttttcgtcggttcggtattttcgggg

SEQ ID NO: 4163 - DNA, 268 bp, Artificial Sequence
  Description of Artificial Sequence: Synthetic polynucleotide
gcggttagatttcggttttgtaagttggcggtcgcggcggtttgcgacgtttttcgtcggggggtagttttgtcgtgggtcggggtcgcgattgtcggggcgttaggggcggttagcggtcgtttggttggcgtgtcggcggcgttcggggagggcgggtcggggggcgcggcgtttatgaggtcgttgtagcgtttgatttgtttttgtaggtatttgcggtggtttatttttcgtttcgatttgttcggtttgtttagcgttagtt

SEQ ID NO: 4164 - DNA, 614 bp, Artificial Sequence
  Description of Artificial Sequence: Synthetic polynucleotide
agagttattttgttcgttgttttggattttgaaatttgggagatttatattaaaggagggaatcggtttttttattttttaagcgcgtcgtgttttttatcgtttttttttttggttcgattggttttggttttttttacgtttttagtttttaaattggcgttcgttttatggttcgtgtaggacgttaaaagtacggtaaattttagggcgatttttagtagacgttttcgacgtatgatgtcgagtcgttatcggttttcgtcgttttttgtcgcgttcggggttcggtttgcggtcgtcgttgcgttttgaagcgtatcgcgtcgtcggggtttcgttatttcgtcgttcgtttttcgggtcgggtttttttcgttttttttaggcgttgtttttattttaggcggtttttgttagttgtaatatagagataaattttcgaggcggggagatttttagggtatcgggatgttgaagtttcgcggtttttatttttaagtttaattcgtgcgtcgtttgcgcgtggcgtagttaatttgggtaagggaagatcgtttggtttatagttggttggaaagtttaggttttcggcggtagtagtttcggtcgat

SEQ ID NO: 4165 - DNA, 201 bp, Artificial Sequence
  Description of Artificial Sequence: Synthetic polynucleotide
gggtattagtttcgagtttaggttttattttcgggcggttcgggacgaattttttttataggttagtgtgtgtgtagggtaagtgtagggggttgaggggcgttggcggggaggtagtagaggtggtttggattattttggcgcggcgcgcggtgagcgcgaggatttcgttagtgggagtcgttgagttaaagtgtattt

SEQ ID NO: 4166 - DNA, 201 bp, Artificial Sequence
  Description of Artificial Sequence: Synthetic polynucleotide
ttcgcggcgacggtgacgcgttttggttttgataagtttggttttttttattttatcgggtggcgtcgttgttgattttacgtttagtcgtttttattttcgtttgaaattttttcgatagggtttcgtttcgggggtttagtttttagcgcgtatatattcgcgtggtgtcggtttagttttttgtaaaggaagtagggt

SEQ ID NO: 4167 - DNA, 201 bp, Artificial Sequence
  Description of Artificial Sequence: Synthetic polynucleotide
ttgtagttagtcggcggtttaggtaagagataaggtgtgagtaaaggtttttgatggtcgggtggtttgacggttaggtgcgagtggggaggatagtttacgcggtttgagtagttatttttggttatagttttagttttcgtttttgttttcggtttttgttttggtttgtttgcgcgttatttcgttatttcgtagtgt

SEQ ID NO: 4168 - DNA, 201 bp, Artificial Sequence
  Description of Artificial Sequence: Synthetic polynucleotide
cgttcggtcgtcgtttttagttaattcgggttttttttacggcgattaattagtgcgaagttggttgggcgggaagtcgcgagaggtttttattgcggcgcgggtggcggttaggagttgttaggatagtttttcggtgttttagtttaacggtttcgtttatttatcgttaagagaaatttcgttttgcggtcggttttt

SEQ ID NO: 4169 - DNA, 201 bp, Artificial Sequence
  Description of Artificial Sequence: Synthetic polynucleotide
cgggtattgcgaattgtcgggcgatgttgtcgttgtcgtcgtgatacggagagtaatagttttttagtaatattttttttcgatataggtatatatttttcgataggtacgtatatttattttatagtgttcggttcggttgcggtgagtgaggggtcgggaagaggcgtatcgtttagcgagcgtcgcgcgtcggggttt

SEQ ID NO: 4170 - DNA, 261 bp, Artificial Sequence
  Description of Artificial Sequence: Synthetic polynucleotide
ggatcggcggtgatatcggagttcgtcgtgcgttttcggtcgttttcggtgggtgtcggtttttgtatttgatgcgttcgggatgttttttttattttggcgcgttcgtcgttagttcgtatagcgtttcgtatattttcgtacgcgtttgaaatgcgtacggtttcgtcggttcgcggaattattcggacgtacggagcgtttcgtatcgattcgttcgtcgttttttcgagacgttcgtatcgtgtttgggtcgggcgc

SEQ ID NO: 4171 - DNA, 201 bp, Artificial Sequence
  Description of Artificial Sequence: Synthetic polynucleotide
cggttagggtaatagttagggtaaagggagagagaagtcgtttcggggcgagaaggagaaaagttagagggttgaataggtgacgttgagtttgttggagcgtgtgtgttttattacgtaagggcgcggagttcggtcgttttatttttcgttatttgcgcgttcgggggtacgttttttgcgatagtttggaatttagat

SEQ ID NO: 4172 - DNA, 201 bp, Artificial Sequence
  Description of Artificial Sequence: Synthetic polynucleotide
gggtatcggtgtcgacgtcgcgagggtagcgttcgcggcgggaatattaatgtattttaaagggtacggtcgtcgtcgtagtaggtaattagttggatcgcggcggagcgcgcggaggtggttgttggttgtaaggattgcgtttagttttcgtttcgtttttcgaggttttcgcgtgggtcggcgggtagtgcgtgggtt

SEQ ID NO: 4173 - DNA, 201 bp, Artificial Sequence
  Description of Artificial Sequence: Synthetic polynucleotide
ttttttgtttcggtttcgtgttttcgttggggattgtttgcggtgagtttgtcgtacgtacgttagggtcgaggtagtgatgcggggtagcgtgggaggacgggttgcggagttcgcgttattttgtttgtggggagcgttgtgtttgtttttttgttagcgcgtttagttgtttcggtcgtcgttacgcgggattgtttg

SEQ ID NO: 4174 - DNA, 201 bp, Artificial Sequence
  Description of Artificial Sequence: Synthetic polynucleotide
ggaaaatagggtattcggagtgtaggagattttttagggtcgttttttttttcgggggtgttttgaggaatcgcggcggggattcgtcgttggtagtttgcgggttttggtgttagcgcgtatgggcgggttgtgcggacgtggttggttttttaaaggttttagatttcgttcgggtcgtttagttttttaaagttgtgt

SEQ ID NO: 4175 - DNA, 219 bp, Artificial Sequence
  Description of Artificial Sequence: Synthetic polynucleotide
tttcgggttaggaagttgttaggtaggggagggttagcgttagttgtggacgtttcgggatagttttttattttagtttttgtttttgttttcggcgcggcgtaaacgtaaaagttttcgtggtcgtagttttagtttcggtggtcgttcgattttcgtcgggatttcggttgtatttattggagaagcggcggtttcgattttcgaggaggcggcggc

SEQ ID NO: 4176 - DNA, 268 bp, Artificial Sequence
  Description of Artificial Sequence: Synthetic polynucleotide
tttattattgtttttttttttcgttttttatttttttgtagcgttaagtcggttttttaatttggtttgttgaacgtaaatcgttgagagtttgttgtatcgttttttggggtttttggttgtcgagtttcgttaaggtaaagacgttagtaagcgaggaagcgtagcggaagaaaaataagcgggcgcgcgaggggagttttaggagggttgtcgagtggttggtaggcggttttcgtttttttcgggtggtttcgtcggcggttga

SEQ ID NO: 4177 - DNA, 201 bp, Artificial Sequence
  Description of Artificial Sequence: Synthetic polynucleotide
tttttcggttttaggattggggagtgtgtcgcggggtcgagggtggggaatagttagagggagacgcgaattaggtcgttggcggagggtttagggggagcgtagaggcgacggtttttatgtcggcggttaatatgatggagaatcggtcgttgttcgttttgtaggtgttcgagtcgtagggtgcgttcgagggtagtt

SEQ ID NO: 4178 - DNA, 517 bp, Artificial Sequence
  Description of Artificial Sequence: Synthetic polynucleotide
tagagcgcgggttttcgggttttatttcgggaaaagtttgggtttgttttgcgttgttgcgtgttgcgtttttgggatttgttgattgttttagagggaacgtttcgcggtagtgttagttttttggggattaggaagggcgatttttgtttgggagttagtgtttgggtcgtcgggttcgggtaagcgttgggggtttggttcgagaagatgcggataggtggtttagggcgtcgcggattttcgttttttgcgggtatcgggagtttagggtcgaggcgcgtcgtttcgaggggtttttttttttaataatgcgttcggaatggagttcgcgttttgatagcgcgggttagttcgaaatcgtttagaattcgtttcgatgagtgggtgagtcgttttgggagtttgtcgcgtttcggtagcggagggtttgagtggaaaaatttttattggatgtattttttaatggttggtttgtttcggttttcgttcgagtttttttcggtagtaggcgttg

SEQ ID NO: 4179 - DNA, 226 bp, Artificial Sequence
  Description of Artificial Sequence: Synthetic polynucleotide
cgcgtttttttagtcgcggttttttttttcgtcgtttttttttgtttttttagtttttttttttacgtgtggatgacgttaaaatttcgcgaaaaagtcgcgtggtggtttttcgagcggaggcgcgatttcgtcgtttagcggttttttttcgggggcgtttggagggggagaagggcggaggcggtcggtttttttttttttcgggaggtaggatttttcgacg

SEQ ID NO: 4180 - DNA, 201 bp, Artificial Sequence
  Description of Artificial Sequence: Synthetic polynucleotide
ttttcgggaggcgagtcgcgggttgttgggcgcggaggttggagtcgcgagaggttcggttgttgaagcggttattgttttttagagttaggtttcgcgtcgcgcgttttcgtcgtcgtcggtattgtgtatttatttatttttcggagattggggtaggggaaaaaagttttgaggcgtttttatttttgttttcggggt

SEQ ID NO: 4181 - DNA, 212 bp, Artificial Sequence
  Description of Artificial Sequence: Synthetic polynucleotide
tttcgggcgtttggtatttttttttatcggggtttcggcggcgcgcggcgtttgttcggaggggggttcgggtatggtgttgcggtagttggattcgtcgcgagtttttcgcgtttcgtcgtcgtttgcgtcgcggagttggtttagttgtaaataaatagtagttttttcgtttttttcggttatcgttatttttttcgttttattgcgta

SEQ ID NO: 4182 - DNA, 388 bp, Artificial Sequence
  Description of Artificial Sequence: Synthetic polynucleotide
ttttttcggttatttgtgttgttttcgttttggttgtttttgtttcgagggaagatgttcgagtattttttttattttatttggtcggcgaagtatagttcggtgacgatgtgtagagttttttggtatagattgtttatttcgttttttttgtggaaatttatcgtttggtttttttttcgtttttttttttttttttagttagtcgttttttttttttttcgtatttttaatttttttggcgttttaagttatagttcgttcgcggtgattttggttggagattgcgtcgttgagagtcggtaatttttaggagttttacgttggttttatggcgggagcggagggcgtaggggaaggagaggcgcgcgaggaggttgcggttgtc

SEQ ID NO: 4183 - DNA, 201 bp, Artificial Sequence
  Description of Artificial Sequence: Synthetic polynucleotide
tttttggatgttaaattcggtttagggagtttaggagtcgttgtagttttagtttttttttttttttttttcgatgattcgggtaatgttaattttttttcgggattgaaagttttaaatttaaggtgttaagttgatgggcggtttttgtttttatttttcgatttcgggcgcgtgttttgaaagataggagagaaaaaa

SEQ ID NO: 4184 - DNA, 201 bp, Artificial Sequence
  Description of Artificial Sequence: Synthetic polynucleotide
tcgtggtattttcgttagagtttaagtagttttttaggcgtggggtttggtggacgttggtttggagcgttcggagggcggggtgggggtgggggggacgcgttgtcgtttggggtgttttcgcgtatttttgttgggcgaattttggtttttcggtgttggttgttatttgagtaattgatgggtttttaggggaagtaa

SEQ ID NO: 4185 - DNA, 212 bp, Artificial Sequence
  Description of Artificial Sequence: Synthetic polynucleotide
ttcgtcgttttttttttatttcgttttttatcgtcgtttttagttttttttcgggatgagagagagtcgcgttgcggagtaattttagtggatgggttcgcgggggttgagcgggcggaggacgcgggaatttcgtgatatcgattagttgacgttgttcgcgtgaaattagagtcgggtattagggttttatttttattgtttttgtattt

SEQ ID NO: 4186 - DNA, 250 bp, Artificial Sequence
  Description of Artificial Sequence: Synthetic polynucleotide
taggagggtgggtgttagtttttttttttatttttcgagtttttttttcggcgtttacgtgggcggagtagcgcgagggtgtgcgtggtaggggtcgcggcggcgtgtgtcgtgcgtggggtggggtgcgggttgggcggtttcgttttcgggtttcgcgtcgtcggggcgcggtttttagttttattttttttgttatttgggcggagatttgggggattgtgatttattttgcggaagatacggaggg

SEQ ID NO: 4187 - DNA, 488 bp, Artificial Sequence
  Description of Artificial Sequence: Synthetic polynucleotide
atacgtttttcgttagtttgggcgtcgggtttcgaattttcggtttgtaaatttgcgtattttttttcgtcgcgttcgttagataatttggcgaatagttcgttcgttcgtatttcgtttttttcggttttttttttaaattttaaacgtatcgtcgtgttttaaagaaggtgtttacgtcgtttttagatttcggagcgttttttttttattttcgggattttttaggtcgtttatttttttcgtttttcgtttagatttgagagggatcgaaaatatattttcgattcgggtagttagggtcgaaattgttaagaggagaaaaggtaaagcggaaggagggtggttataaatagatttttttgtttttttttaaaaggatattgtcgttttaaaagtttttttttcgggtttttatttttcgtattttcgtattttgggggagcgtatttaattgaggtaacgtagtttttttttagtgtttgtag

SEQ ID NO: 4188 - DNA, 201 bp, Artificial Sequence
  Description of Artificial Sequence: Synthetic polynucleotide
ggttgaggagaagggagggagagtagagggaggggggaattcggtcgggggaggaggagagaggcgaggaggcggttttggtagcgcgcggcggcggcggcggtagcggtagtagtagcggcggtgcggagagtttggattgggagtttaaagttcggttgggtagcgggagaggaggagtcgtaggagttgtagttttgt

SEQ ID NO: 4189 - DNA, 364 bp, Artificial Sequence
  Description of Artificial Sequence: Synthetic polynucleotide
ttttataattaaggagtatggtggagttgggttaattttaggtatagtttagtcgagttaggcgaggtttagagagatttgattcgtttggtagttttaacggatttgttttcgtagtcgttgcggatttttcggtcgttatggcgattgtgaaatgtggggtggggcgtatgcgttggaagttattcgcgcgggtagtttttgagtgtttttttacgtgttttttagcgcgagtagtattttcgtttttgcgttttttagagcgtgtagttttcggtgagggtagttttacgtatagttttttatattttttttagcgtttgtagttttcggtgcgcgtaggttttaagtttatatgcgtagt

SEQ ID NO: 4190 - DNA, 220 bp, Artificial Sequence
  Description of Artificial Sequence: Synthetic polynucleotide
gtttttatttcgagcgcgtagttttacgtagtttttttatattttttttagcgtttgtagtatttttagtgcgtatagttttgttagtcgttttttcgggcgtcgtttttgtattatttcggtttataattttgcggcgattgtttgaagaatttttcgtggttttattttttttttcgggtttagttttagttgtgatattttaattaaaagattatac

SEQ ID NO: 4191 - DNA, 201 bp, Artificial Sequence
  Description of Artificial Sequence: Synthetic polynucleotide
tcgtttttttcgtttcgagcgattttttgttttagttttgtaggtttcgtattgtagatgtttgttggtttttttgcgttcggcggttttcgcggtgtttcgtaagttttcgtgattttttagtattagtcggttgtgcgttttttgtttttacgggtcggttagtcgtagatatttatttagtttcgcgagtttagtcgt

SEQ ID NO: 4192 - DNA, 201 bp, Artificial Sequence
  Description of Artificial Sequence: Synthetic polynucleotide
ggggtatcgcgttggtatttgtagggagcgattggtttggaagggtagagggtagacgggggtttgggtggggtagcggttattttaggcgcggagaattcgttgtttttatttttttttcgcggatttttattttgcggtttgtgtgttcggtttttttcgcgtggcggggaagtgcgggtggttgttcgggtttttaga

SEQ ID NO: 4193 - DNA, 201 bp, Artificial Sequence
  Description of Artificial Sequence: Synthetic polynucleotide
gtgtcggttttcgaacgtatttcgaggcggggtgagggttggtagtcgtttttgtattcgtcgttgcgagtcgcgttttttaaatttaggtatgggatttcggaaaatcgattcgttgttttgagtgtttattacgtgaggaattggagtggtcgagttcgttaaggcgtcggggatatttgagtagatgagaattggagt

SEQ ID NO: 4194 - DNA, 358 bp, Artificial Sequence
  Description of Artificial Sequence: Synthetic polynucleotide
gcgtagcgtttgagtttgcgtttcgttaagtgtattaagtacgagatttagagcgttatggagatcgtgttgttttggggtttggtcgcgtattgtacggcggttgcgttggtcgtattgtttttttataatatgagtagcgtcggcggcgatcgtttgggtcgcggtaagtcggttcgttgcggttttatttttttcgtgggtcgcgtgtatcgttggatggtggatagtcgcgtggcgttgcgtatttacgagtacgtcgttatttatttgatagtttgtatggagagtttttttcgggatatttattcgcgggtcgtggttttcggggtgtttcggagttgtagtggttttgggt

SEQ ID NO: 4195 - DNA, 201 bp, Artificial Sequence
  Description of Artificial Sequence: Synthetic polynucleotide
ggagttttcgggcgcgttttgggcgtattggggaggttttcgggcgggtaggcggacgttttggggcggcgggcggcggttgtcggggttcgtcggggttcggtcgttcgttgtttatcgataggtattaggaattgatttcgtcgttgttttttgttcggtttagttatcgattagttgtcgcgattatggagaagcgtt

SEQ ID NO: 4196 - DNA, 328 bp, Artificial Sequence
  Description of Artificial Sequence: Synthetic polynucleotide
cgtagggagggagggggtatcgtttgtttttttgttcgaaaggtggaggtaaagagggatttcggattttagagaggtttataattttttataagtaaggcggggggcggaatttagagaggtaaagtgattcgtttttaaatcgtaatattaggaggatagtagggttagatggaatttttcggtttatagttttcgatttcgggtaagtgttttattcgggcgtacggtttgtttttagattagaattaggcgcgttcgtagttaaggaagtttggcgggagattttttcgaggttttcggtttttaggttagcggggttaaggag

SEQ ID NO: 4197 - DNA, 201 bp, Artificial Sequence
  Description of Artificial Sequence: Synthetic polynucleotide
cgttcggtgaagtcggtgtatttattatattttttgttgtttttagtagggaagtcggcggtgaggcgggggagtaggtatggtggtttcggggtttatgcggggtttattgtttatttagaatagcggttattgttgtttattagggcgtatttatcgttggagttttcgcggcgattgtttatttttaatatatatttt

SEQ ID NO: 4198 - DNA, 319 bp, Artificial Sequence
  Description of Artificial Sequence: Synthetic polynucleotide
tggagtcggcggtcgcgttcgcgtcgttgttgtttggttcgttggcggcggggtcgggggttgtcggagttgattttatgtttttttttaatgtagagatcgttggagatggcgagtttcgagattttttttattttttgtttttagagtaattttatggtattaaaaaaaaaaaaaaaaaaaaaaaaaaaaaaaaaaaaaaaaaaagaaggagaaggcgatcggcgaaagtaggagggaaaaagtaggcggcggcgggcgggtaagtaaaagcgcgagggagcgcgcggagtgtttgggtggacgtgtgtgtgcgttc

SEQ ID NO: 4199 - DNA, 201 bp, Artificial Sequence
  Description of Artificial Sequence: Synthetic polynucleotide
atcgcgggaggagagcgtaaggaggtttttcgtaaagttggaggttaggtcggagcgatgtttcgggagcggagtttttttagtttcgggtttttagtcgcggatagttggtagtgttaaagatttcgttattatttgcggttcgtagttgcgattcggtcgtagagtcgggtatcgaggaaggcgtaaagttgagtttgg

SEQ ID NO: 4200 - DNA, 370 bp, Artificial Sequence
  Description of Artificial Sequence: Synthetic polynucleotide
agggcggttcggggtgggggcgttttatttttgttttttatggcgtgtacgaagtttttttggtatagttggttgcgaagttttttttttaggttgaagtcgcggacgttgacgattttttttacgttcgataagttttcgttttcgtcgtatcgttggcggttaatcgggcgttgcgaggatttaaattagagagttcgggatattattgtgggggttggaggtcgttttttaatttgggtttagtattaataggtgtagtagtcgagcgttttttgtattttattattgtaatttaagtaattttgcgtaattgttaaagatgttgaaaagtaggataaggagaggggttcgtatttcgagggtttag

SEQ ID NO: 4201 - DNA, 201 bp, Artificial Sequence
  Description of Artificial Sequence: Synthetic polynucleotide
gttatgttggaatttggaggggaggggggatgttggagaggtatacggtgatggatatggaaggattcgggaggtgtggagtggtgggttcggttcgtcgcgggaaggatatagagggatataggttgttttggagaggcgttttcggatatttggaggggcgtatagtgttgggatttggcggcgtttggggcggagggg

SEQ ID NO: 4202 - DNA, 201 bp, Artificial Sequence
  Description of Artificial Sequence: Synthetic polynucleotide
gtttttcgtttttacgtcgtagttcgggttagcggggttcgtcgcggtggcgttcgcggatgttgtcgtattggtcgttgcggtacggacggcgtagtttcgggcgcggttcggtataggcgtcggcggttttcgttagttagtagttcggcgaggcgttggtttatttatggttttcgggcggcggtttttgcgtttagt

SEQ ID NO: 4203 - DNA, 201 bp, Artificial Sequence
  Description of Artificial Sequence: Synthetic polynucleotide
attcgttcgttcgtgggtgagttgggaggggcgcggcgagggagggtgggttcggggcgggggcggcgcggggcgcgtttgcggttatgcgatattgtttcgttcgcgtttcgtttttttttttgggttttttgggttttttgggttgtaggattcgtcgacgcggcgcgttggtcgtacgggggttgggcgtcgttgtat

SEQ ID NO: 4204 - DNA, 263 bp, Artificial Sequence
  Description of Artificial Sequence: Synthetic polynucleotide
tgggttattcgtgtcgtatgtcggcgtagttgttcgttgtggtaaggggggggcggtcgggtttcggagcgggtcgggagggcgcggggcgcgtatttcgcggtaggtgagcggcgcggttgtaggtgagtagtagtttcggttcgcgcgtttagtttttttcgtcgcgttcgttcggtttatacgtttttcgcgcgcgcgtcgttttcgtttcgcgcgcgttcggtcgttcgttcgttcgtgggattttcgcgaggtcgcgc

SEQ ID NO: 4205 - DNA, 201 bp, Artificial Sequence
  Description of Artificial Sequence: Synthetic polynucleotide
gttttgttttttttgtttttaacgaattggtaagtaaaatattagttgtttattttgaaatttgttttaattattttcgtattttttgaagttcgttgggcgcgttttgggttgtttttttttgagtagtcgggtttagagttaaggcgcgatgattgtcgcgtaagttagggtttacgcggtcggggtttttttttcgtt

SEQ ID NO: 4206 - DNA, 201 bp, Artificial Sequence
  Description of Artificial Sequence: Synthetic polynucleotide
ttttttatttcggtatttttttttggtgacgttaaggggttttttattttttattcgtttttttatttattttttttttttttttaggttcgtttttttgcggttacggagaggggcgggggtcgacgagggcgggtggttcggggtcgagcgcgcgtggggaggtgttggcgacgcgggttcgggagcgcggtttcggta

SEQ ID NO: 4207 - DNA, 201 bp, Artificial Sequence
  Description of Artificial Sequence: Synthetic polynucleotide
ttatttagttttgggggtcgttcgaaattggggaagggataaggttgaagtttcgtcgtttggttttaggggcggaaagttcgatttaagggaagttggtcgcgttttcgcgacggtgtttttggtacggaggattgaggcgtagttcggttgtttttttttgtttgtttttttcgcgttgtttcgtcgtttttgattttt

SEQ ID NO: 4208 - DNA, 201 bp, Artificial Sequence
  Description of Artificial Sequence: Synthetic polynucleotide
cgcggggtcgggcggggatcggtcgggggcgtcgcgcgttcggtcgggttgattgtcgggggcgattttcgcggggtaaggcgggggcgcgggagtagcgcgtagttgcggggttattttatttgagcgttttgaggttagggtcggggtttgaggatacggcgttgggtttcgggggacgcgggtttacgtcggcgttcg

SEQ ID NO: 4209 - DNA, 215 bp, Artificial Sequence
  Description of Artificial Sequence: Synthetic polynucleotide
ttatatttatcgtttcgggcgcgtcgttcgcgcgcggtttcgtttcgggtcggtatttttcggttcggttgttttcggttttcgtttcggtttcggttttcgtttcgtagggttcggtttcgcgatggtggtcgcggcggcgagcgcggtagggagggcgtgtgtatgcgcgtgagagcgcgtagcgtgtgtatgtgcgtgtgcgcgggagggtt

SEQ ID NO: 4210 - DNA, 201 bp, Artificial Sequence
  Description of Artificial Sequence: Synthetic polynucleotide
cgcgagtgttttttaatggtagcgcgggcgtttttaatcgcgaggggttgcgttattatcggcgtttgttggagcggttgcgggagttgggcgtgtagttcgtggttattttgtattattgggatttgttttagcgtttgtaggacgtttacggcggttgggttaatcgcgttttggtcgattattttagggattacgcgg

SEQ ID NO: 4211 - DNA, 201 bp, Artificial Sequence
  Description of Artificial Sequence: Synthetic polynucleotide
gtgttagtagtttcggggtcgttcgtacgtaacgttttcgggtcgggttaggttggttagggtagggcggtcgtttttcgaggaattgcgggcggggcggcggggttaagttgagcgttcgttttgttttcggcgtttcgcggttgcgggcggagcgggttttgcggagtttttcggtcgtttttttcgtagttttcgttt

SEQ ID NO: 4212 - DNA, 201 bp, Artificial Sequence
  Description of Artificial Sequence: Synthetic polynucleotide
ttaggttgtttgtagcgtcgttttgtttttttattttagagcgtaggtgagtggttatttttttaggggatcgcggttgagagcgtttatttttttttttcgtatttggaaattgagtttggcggtagggttgggttatttagagtttgtatatttcggaagggaaagtgattttagaagggagagaggaagtgttgagtt

SEQ ID NO: 4213 - DNA, 217 bp, Artificial Sequence
  Description of Artificial Sequence: Synthetic polynucleotide
tgtagttggtgttgtttttgggacgatgtagacgttttatatttaggcgcgggtgttaggtcgtcgggtattagtttatttttagggtttgtgagttgcgcgtattttttcggtcgcgtattttttgggaggttgtagttagagcgtttttgaagggagggcggtagaagatattttttttcggtttatgtaaatcgttgggggaattttagttaat

SEQ ID NO: 4214 - DNA, 317 bp, Artificial Sequence
  Description of Artificial Sequence: Synthetic polynucleotide
aagcgagcgattttttgagttcgggtggttcggcgggtaagggcggcgcgggagattcgtagggcgcgggcgcggattcggggaattagggttatcgttgcgggcggatgggggttatcgaggcggttcgtttttaggcgtatatttcgtatatttttttgttaagtgaaggggttaaaatgtatagatgggggagtttatttaggaatagaggcgcgagacgtatagttatttttgggttgggagtacgagttagtagattttcggagcgcgttaaacggataatatgttcggtgttgtaaatagaggtttttgtt

SEQ ID NO: 4215 - DNA, 201 bp, Artificial Sequence
  Description of Artificial Sequence: Synthetic polynucleotide
tatttttgtgggggggagggtgtagcgaaggttgttagggatttcgcgatcgcgttttaatacgtattggagcgagtgtgcgagtgattatgagtgtgagcgggtgcgagcgttcggcggggttgatcgttacgttggcggggtcggcggggttaggtagtttttttcgcgttttttttttttcgtttcgtgttttttttt

SEQ ID NO: 4216 - DNA, 201 bp, Artificial Sequence
  Description of Artificial Sequence: Synthetic polynucleotide
acggtgttaagggatttagtttggcggatattttttattaggagatcgtaggtaagcgcgggcgcgttgtaggggtaggttgtagttttcggttgtcgtacgttttattggtcgttcggcgtttttttttttttttttgttgttgagttggtgtttattttttgttatcgttatgggatttcgcgttttcgtgttgggcgg

SEQ ID NO: 4217 - DNA, 201 bp, Artificial Sequence
  Description of Artificial Sequence: Synthetic polynucleotide
gcgtcgtagtttttcgggtatcggcggcggtgattaatttgtaattttagcgtttagagttgttatggtgttcgcgggcggcggcggcggcgatagtgggcgatcggtaggattagtgttaggcgcggcgtttagggcgggcggggacgcgggttttttatttacggcggtttagtttaggtagcgcgttcggttcggttg

SEQ ID NO: 4218 - DNA, 201 bp, Artificial Sequence
  Description of Artificial Sequence: Synthetic polynucleotide
gcggtgtgtacgggagttcgtcgggtatacgcggggtatatttaagtgtattgttaggaggtcgggagtttagcgtgcgagcgtgaggttagattgtgtacggtatcgaggattagttttatttttgagtatgaaagggtgaaatcgtttattttaagttttatttcggagttattaaataatgaatgtattagttatatt

SEQ ID NO: 4219 - DNA, 201 bp, Artificial Sequence
  Description of Artificial Sequence: Synthetic polynucleotide
gggttggtcgcggattcggacggtcgggagcgggcgcggcggtcgtagagacggttttttttcgcgcggttttagcgtagattttagatttggagtcgtgcgggcggagacgcgcggggttttttttcgtttcgtcgtcgttgggtttttagcgttttcggattcgcgggaggataggaattattcggagtgaagttgcgt

SEQ ID NO: 4220 - DNA, 221 bp, Artificial Sequence
  Description of Artificial Sequence: Synthetic polynucleotide
tcgagatataaagatcgaggttgagatcgttaggggttgagggtgaggtcgcgtttcggggtcgttggagcgcgggcgttatgcgagattgtttcggttgcgcgtcgttttagaggagttcgagcgttttttttagtcgcggcgcgttggttttggtcgggattgtagttaggtgggcgtcgcgcgtgtgagcgtcgcgcgtgtgagcgtagatttggatt

SEQ ID NO: 4221 - DNA, 311 bp, Artificial Sequence
  Description of Artificial Sequence: Synthetic polynucleotide
gattattgtcgaatagtcgttggagattcgtagagaagggcgggttttgcgttcggggcgtttcggaggtaagttcggagagttcgggtcgggcggagggcgggagcgtacgagtgtgtgtgtgtgtgtgtgtgttcgcggtgtgttcgcggttcggtgtatacgcgcgcgggttgtaaagttaggagttgcgggagcgtttttttgtttcggtttggtttcggagtattgcgggtcgcggaggtgtgggggtttttgtcgttgcgtttagggtagcggcggaaaaggtgtgtgcggatgcggggcggggt

SEQ ID NO: 4222 - DNA, 308 bp, Artificial Sequence
  Description of Artificial Sequence: Synthetic polynucleotide
ttgagtcgtagaaggtttttttcgcgtttttttttagtagggatttttggacggggagatcgacgggtttgtgggcgttttttcgggatatatttcggttcgttttgtttgggttgggtttatttacgttttgggtggggtttaggaattgcgtgcgggcgtagcgggtgagtatgttgatgatgattatttggttttatttttttacgtcgattagtaggttatagagttttcggtagtttttgtgaattaggtcgatgcgtttcgggtagatttttttaaaggttattattatattgttcgttatt

SEQ ID NO: 4223 - DNA, 201 bp, Artificial Sequence
  Description of Artificial Sequence: Synthetic polynucleotide
aatgtgatatagatattagtttttcgtgtttttggtttttagggttttttttatcgcgttttagtatttgtagtttttttatttttatagcgttcgtcgtcgttaaggtaatagagggatgttcggtgatagattcggcgtcggttttcggcgtcgtaagagaagcgttcgcgcgggcgttttggattcgtagagttttcg

SEQ ID NO: 4224 - DNA, 201 bp, Artificial Sequence
  Description of Artificial Sequence: Synthetic polynucleotide
ttattttatttgagcgtggttaaattgttgttatttagtggggagtaaaaaaaaataatttgtattatcgaaacgagttagtaattggttgggaggcgggcggtagttgggtttcgcgtgttttcggcggtcggggtttttttcggggagaggtatatatacgtatagtcggatcgcgtttcgttagggtcggagttattt

SEQ ID NO: 4225 - DNA, 201 bp, Artificial Sequence
  Description of Artificial Sequence: Synthetic polynucleotide
ggtgggagtcgcgaggagcgtttagtggcgcggtttgtcgggtatggtggtcggttcggcgatcgttgattcgtcgggttcgggggttttggaagcgaggcgcgtttttcgatttcgagattttgtagggttgtaatagacggtggggaggtaaaaaaaaaaaaggaaaaggaaaaaatggtgttaaagttattaagtttt

SEQ ID NO: 4226 - DNA, 630 bp, Artificial Sequence
  Description of Artificial Sequence: Synthetic polynucleotide
tcggttagtttattttcgcgtttcgtaaatttttttaatcgggtaataaagtgagtagcggtggtcgtcgcgatttttttaatttcgtatttcggaggttcgagggggttttgggatcgagcggtttcgtagcggcgatagaaatatatattttacgaaaaagaaaaaaaaaaaaacgagtcgcgcgaattcgttaagttagatgtgcgcggtttgaagcggaggaggttttgacgttagttttatttcgcgtagttcggtttggtcgtagattcgtcggttattcgtcggcggtttaggtcgggaggggttaggatagtttcggtcgcgcggtggacggaggggttattttttcgggcgttagtaaataaattttattcgagttaatatcgtttagcgaacggtgtttttttttagttattcgagaacgagaggtatttttaattagaaattaattaatgagtagttgttttttttcgttttattgtaattattcgttttaattataaatgagatttatgaaaggatacgttgaagatgtaattaatagttaaaattagttcggcgttgcgtaggcggtcggttcggtttcgcgttggcgcgttttgtttcgagtggtaggaaggggtt

SEQ ID NO: 4227 - DNA, 201 bp, Artificial Sequence
  Description of Artificial Sequence: Synthetic polynucleotide
aaatgggattagagcgcggagggagtttggttaggaggttttttaggatttagtcgcgacgttgaaaagtatgaagggtcggaattaggtatttatttagcgagcgttattaattcgaagttatagcgttaattttttgattcggtcgtttttatacgtagcgtcgggattagaggcgcggtcgtcgttcgtttcgttttt

SEQ ID NO: 4228 - DNA, 239 bp, Artificial Sequence
  Description of Artificial Sequence: Synthetic polynucleotide
gaagaaatcgggtaaatagttgtttttaggttcgtgttacgagttttggcgggatttttttttttttttgtattttttatttttcgattttttttgtgtgcgtcgcgtttcgttgtagtttcgttggagagatggggacggtttggtagaaggtggcggcgataggggttcgggacggtttggggagaggagggtgggggcgcggttgttgtggggtgttttcgggcggggtttacggg

SEQ ID NO: 4229 - DNA, 201 bp, Artificial Sequence
  Description of Artificial Sequence: Synthetic polynucleotide
tgtttagtttttcggaggagtattatgttttgatattttcgttttatcgttttaaagttggtttggggtttcgtagggagtggtttgtatggggagggttcgcgtgttgtgtttttgggaggggtaagagagtgggggcgtagggggcgggttaggtttttgggcgcggcgcgggttcgggggattcgcgcggttgacgtt

SEQ ID NO: 4230 - DNA, 221 bp, Artificial Sequence
  Description of Artificial Sequence: Synthetic polynucleotide
ggtagttggcgcgttcgttttggtcgtagttcggtttggggattcgttgcgtgttttggtattagtgcgtggtgaggaaagcggtggtggcgaatagtagcgttagtaggtttagggttacggttaggagcgttcggtcgcggcggttagtttttatgtcgttcgcgtcgtcgggacgggattgtatcgtcggggagtttcgcgcgcgaagttggtagttg

SEQ ID NO: 4231 - DNA, 201 bp, Artificial Sequence
  Description of Artificial Sequence: Synthetic polynucleotide
tagttttacgtcggttcgtttttcgtttacggttcggtttttttttcgtttggttcggcgttttttcgtttcgagttttttattttttggatttcgggttcgcgggggcgcggagaagaggatttaggaaaggtttgggaatttgatgggtttgtggttggggggaggggtagttttttcgttattttatttttttttcgt

SEQ ID NO: 4232 - DNA, 246 bp, Artificial Sequence
  Description of Artificial Sequence: Synthetic polynucleotide
tgggtttttttaggatttattttatgtagtttttatatggtttttagagttttgatttcgtggttggagtgtttgtttttttttaagtattggtagtatacgggtattttgtattgtacgtagtatatgttgtggttttttagttcgtggtttgtgtaggtggagattttgcgtgggtttagttttcggtttatacgattttgggtcgggggtattaggcggtgtttggttaggggttttcggggc

SEQ ID NO: 4233 - DNA, 223 bp, Artificial Sequence
  Description of Artificial Sequence: Synthetic polynucleotide
tgatattgggggtaggtgatataggagttgcggggtatcggggttagggtcggtgataagtgggtggtcggtggcggtatagtcgggggaaatacgcggacgtcgttgggggatttttggtacggggtagtgggggcgttggcgaatttttcgtaggagttatagtcgttgttcgtttcgttgtataggtttattttgtttaggtttagatagttatagtcgg

SEQ ID NO: 4234 - DNA, 201 bp, Artificial Sequence
  Description of Artificial Sequence: Synthetic polynucleotide
gggtttttcgttagcgtttgcgtttggtttttagttttgagtttcgcgtttatttatcgcgggcgagtgttgcgtagtacggaggacgttttttttttttcgttgttggtagttttcgtaggcgttttattcgggtttaggtttttgtacggtagtggggttttttttttttttcgtgaattcgttgacgtcgtgttttgg

SEQ ID NO: 4235 - DNA, 244 bp, Artificial Sequence
  Description of Artificial Sequence: Synthetic polynucleotide
tgcgtttattcgttgtataacgcgtttcgtttcggtttttagtttatttttcgcgtcgcgttagtttcgaatttggattttcgcgggcgtttgggcggggcgggattttaggtttatttagtaagttaattggttgaggttttcggttggggattaattatcggttttgagaaagttcggtagtggttattatatttggttttcgttaatttttttaaggtagcggtcgttggagtagcggggt

SEQ ID NO: 4236 - DNA, 201 bp, Artificial Sequence
  Description of Artificial Sequence: Synthetic polynucleotide
tttttatttttggttgtttggcggggtttgaaagggtaggtggttttggcggcgcgtttcgcgagggatgtggtagaagggcgtgcgtttggcgtcgaggcggagggattttcgatgtcgtgtggtagcggggtttgttatcgtagtttttcgcgggtattgtttttaggtttagagttagtttttagcgagtcgggtaaa

SEQ ID NO: 4237 - DNA, 457 bp, Artificial Sequence
  Description of Artificial Sequence: Synthetic polynucleotide
tttttttaaatatacgtttttttgttcgcggttcgttattttcgttcgggtttcgggttgtgtagtttttttttaggtttgttcgggtttatgtttttttcgaagcggcgggagtcggtgtagttttaatttttattgcgtgttttaggtcgttaattagttttgttcgcgtgtcgttggttcggaggttgtcgcgttagtttttgcgtgcgtttgagcgcgttggagtatttgcgaggttagggttgtcgacggcgagaggatattttgaggaatacggtgttttagtttcgttttcgtttttcgttcgagttggaggttggggcgcgttgagtcgtagcgtttggataagtgcgcgggtcggagtcgtttaggtttgtattcgggggttcgcggtcgacgtatgcgtacgcgcggtggcgggtttgtaggttcgaaggttcggttttttttttaa

SEQ ID NO: 4238 - DNA, 244 bp, Artificial Sequence
  Description of Artificial Sequence: Synthetic polynucleotide
gagcggtgattggaatttacgttcgggagaggttcggagtttcggtcgcgggcggcgggggatttttgtaggaaggggtaggaaggtaagtagttcggcgcgttttggcggtttcgagggatttgggttcgggtttgcggtcgcgtcgtttgggttttttttgggttgggagcgcgtcgggttttcgttttgtacgttgttatcgcgggagacgtttcggtttcgtcgcgcgtagaggggacgc

SEQ ID NO: 4239 - DNA, 206 bp, Artificial Sequence
  Description of Artificial Sequence: Synthetic polynucleotide
gtttcgacgttgcgggcgatagggtttggttttagtagtcgtcgtcgtcgtcgtcgtcgttattcggaggatttagtaaaagtttggatttgggggagggcgcggcgttgagcgggattattattagggttggaaggagatttcgagaatttttgtaggtaacgcgcgtttttaattttttttttttatgtttcgtcgttgcgttt

SEQ ID NO: 4240 - DNA, 203 bp, Artificial Sequence
  Description of Artificial Sequence: Synthetic polynucleotide
ggaagtagtggggggcgttcgaagagtagggtagttacggttatcgtggtcgtcggatcggttatgtgttaaagtttttggggttcggcgtttcgttgggcgcgtagcgcggggagtagacgcgtcgtgggtggggtagcgcggtgttgttggcgttcggttttcgcggggtgtagttttgcgcgtttttatgttgttttttt

SEQ ID NO: 4241 - DNA, 266 bp, Artificial Sequence
  Description of Artificial Sequence: Synthetic polynucleotide
ttaggttatttcgattttggtttttaggttcgggataacgtgttagttttaagagagcgttgtttatagtttcgggtgggttgggtttaattgtacggggcggggcgttaatagtttaggatttgggttgtaggttggtttttgtattaattagcggggcggtttcgggttttagtttttttatttcgtttacgaagggaggcgattgcgagcgtttggggtttttgacggatttcgtttcgggggtggggcggggagtggttacg

SEQ ID NO: 4242 - DNA, 242 bp, Artificial Sequence
  Description of Artificial Sequence: Synthetic polynucleotide
gtttagtagagatttggagttagaagtttagagatagtcgagtgcgtcgtgcggttttcggacgttcgttgtttagttcgattttcgttaattgtgtaggcggttgattcgtagcggtagcggtagtagcgaggattcgagcgttggttgtagcgatattatggattttttttttatggtcgcgtaggtaacggggcgttttttttacgcgtttcgggtcgttaagtttggggaggttcggg

SEQ ID NO: 4243 - DNA, 201 bp, Artificial Sequence
  Description of Artificial Sequence: Synthetic polynucleotide
agtttagattcgcgcgaacgtggatgggtatatagtttcgtttttttttattttgttttttcgaggcgttagtaatttgttttttgtcggtgatttcgggcgttttttttgtcgtcgtttgaggaaggttttgagattcgttttgtgatcgtgattcgttaagcgtcgacgcgtcgcggtcgtttgttttgttttgttttg

SEQ ID NO: 4244 - DNA, 201 bp, Artificial Sequence
  Description of Artificial Sequence: Synthetic polynucleotide
ttttgtttcggtttttgcggggatggatgttttacgtagtaagcgagtaagcgagttttggagatcggggttttgggtgtgcggtcggtttagtgttacgcggtgagataggtatggttattaatttacgttaaggcggttgtgtatttggtatagaaaatattgttgttgaatgttgtttttatagttattcgttagcgt

SEQ ID NO: 4245 - DNA, 312 bp, Artificial Sequence
  Description of Artificial Sequence: Synthetic polynucleotide
ttttttaatattcggtttgtacgtttggcgggggcgtaatagtgttttacggttcgggagttcgtttttggtttttgagtaaggtattttttttatttgtcgtgtgtttagttgaatttagtatatttttttcgtatttttcgtttttttttttttttttttgaatttgtttttttgttttgcgggtttttaatttttttcgaatttcgggcgttcggttcggtttaggcgagcgttcgcggttggggacgcgggtggggacgcggcggtttgggcgttgtaggatgcgtttggtcgcggaggagacgatta

SEQ ID NO: 4246 - DNA, 203 bp, Artificial Sequence
  Description of Artificial Sequence: Synthetic polynucleotide
cgttggttttggttgtttgtggggtttttttaggtttcggggggtttgcggcggtttgggaggtagattttcgcgggtaggtgtggtcgtgtttcgatcgcgcgaggatcgaagttggcggaagtttttgtgcggtgttttttagttcggaggaggttggtttgaagtttttaggcgttgtcgaagtttttttttgttagcgt

SEQ ID NO: 4247 - DNA, 201 bp, Artificial Sequence
  Description of Artificial Sequence: Synthetic polynucleotide
cgtatgcgcgcgcgtaattagattttcgtcgtcgtttttagcgttttttttcggggtagggatttatttaataggttggggtttttggagtgcgcggggtcgcgtggggaagcggggattttattttttttacgcgtcgtttagtattgggtaagggcggggtattttttgggttttcgtttttcgtcgttcgtttcggga

SEQ ID NO: 4248 - DNA, 283 bp, Artificial Sequence
  Description of Artificial Sequence: Synthetic polynucleotide
agcggcggcggcgggttttaggagtcgtagattttggttagtggtattgcgggttattttgagttttcgaggttttagggggatagcgttcgggcgttttcgttgcgcgtcgttttcgcggagtcgagcggcggtggttgcggaagcgattggggttgcgcggatattagcgttttagagttcgcgaggagtttggggttttcgggttggagtaagagtcgagtatcggcgtagtttgcgggattggtatttatcgggttttttaatttttagattttgttat

SEQ ID NO: 4249 - DNA, 201 bp, Artificial Sequence
  Description of Artificial Sequence: Synthetic polynucleotide
gttttcggggcgttttgttttgcgttatcgcgcgttcgttcgttcgttcgtttaatttatttgttgaagattaggtagtttaggtggttgattttgtggtcggagcggtggcggttgtagtttttttataggtttttgaaggtcgtgatggttaggatgaagagtatcggcgttagtgttaggtcgggttggaaggcgttt

SEQ ID NO: 4250 - DNA, 247 bp, Artificial Sequence
  Description of Artificial Sequence: Synthetic polynucleotide
ttgagcgcgtgatatggtttgtcgtttttgattaagacgggtacggttattcggcgcggcgagggtaggggcgttatttttatatttttttcggttcgggcgcgttttattttgtagcggtggttttggaattagattttgatttgcgtgggcgtgaggcggatgaggttggttaggtgttcgcgttcgggcgtcgataggtatcgttgttgtcgaaagcgtcgttttagttcgtaggtttgcgttt

SEQ ID NO: 4251 - DNA, 427 bp, Artificial Sequence
  Description of Artificial Sequence: Synthetic polynucleotide
ggggcgtttttttaggggattgggggtggggaggagggcgtacgggtcggggagggggttatcggatttggatttcgggatatttcgggggtttggggggcgggtcgcgcgtttatttgcgttttcgtcgtcgaaggagtttatgtacgggaagtagatggcgagcgtttcgaaggaggcggatagattgaggcggttttgcgagcgttttatgttcgcgtcggcgtcgggcgtttcggtcgcggcggcggcggcggcggcgggcggtttgggtagtttggtcgttttatttttgacgcggagtacggcgcgcggcgtggtggcggcggttcggggtcgggtcgaggtttcgttgcggggttggcgggcgcggcggggtcggcgggcgggttaggagttggcggcgcgcggagttcgaggcgcgttg

SEQ ID NO: 4252 - DNA, 246 bp, Artificial Sequence
  Description of Artificial Sequence: Synthetic polynucleotide
cggtttatagtcgggatgcgttttcgtcggggttatcgcggcggcgaacgtttcggatttcgtatttcggtgattttttgggatgaatcgaagtcggattcgtattttggtcgtaataagcgcgttttacgtcgttacgtattagcggtgattttcgagttttttgtcgttttggttttttcgtaggcgggtttcgaggttttcgtagggagtttagggttacggttacgtgtagtcgttttcgag

SEQ ID NO: 4253 - DNA, 384 bp, Artificial Sequence
  Description of Artificial Sequence: Synthetic polynucleotide
tgcgcgtcggtttggtttgtttgcgggttttagagtttcggcgttcgttgtttttttcgtttttttttttttttttatttttttttttttttagtcgcgacgcgtagggggcgggttttatttttttttcgttttcgtttcggttttaagtcgcggaggcgttcggtgggatttcgttgttgtttaattaggggggatcgggtgagtttttttttttggagtcgggttttattagcgtcgtaggtttataggtcgggggtgggggttttggatcgaggggcggcgcggggcggcgcggggcggcgcgcgcggttttggagcgttagtatttgtttttcgatttttcggtcgtcgttttcggtcgtttcggggatttcgttatta

SEQ ID NO: 4254 - DNA, 415 bp, Artificial Sequence
  Description of Artificial Sequence: Synthetic polynucleotide
tgggtagttttaggtcgtcgaattcggcgtttagcgggggtagttcgcggaaggcgcgagtcgagttagacgtcgcggggaaaggttcgggcggtggttgcgggggcgttaatttcgggagtaggaggtcgggttttagtcgtcgggttttgcgcgtttgttttttgcggcgcggtcggtatttgtagttggggtggtcgcgtaagtgttgtacgcgtagtcgttcggttttttttacgaagggtcgttttttcgtcgcgtttagttttttttacgttttgtttgcgggtcgtgggcgttagtgagtggaacgtcgtcgggcgggtgggcgtcgagtttttcgtgcgttcgggacgtttcgcgagggtttggcgtagttttcgtatttcgcggttcgggatttttgtttttttcg

SEQ ID NO: 4255 - DNA, 543 bp, Artificial Sequence
  Description of Artificial Sequence: Synthetic polynucleotide
tgcgttttacgttttggagcgtgaagtcgggcgttaaaaagttgttgtcgggtcgtagttttagatttagttgttggttaaaggcgtgtaggcggaggcgcgtggtttcgtgtttcggggcgcgttttagtttcggtattattagtttttcgtttttttcggaggggcgttcgagtgcgttcgatacggttagtagcgtcgcggcgagtagtagtagcgtgggtattggtttaaagtttcgagatttcggagttcgtttcgcgttttttatgtcgttgtttagtttgcgtttttcgaatttttcgggtatagttcgttgtattggagttttaggagatatcgttcgtagtagcgtacggagcgagggatttttagttcgggtcgggagagtaaagtttcgttggtttgttttggattgttaaaattaataatttttattattcgttggaagggcgcgtagagtcggttatagtcgaagttttcggagttattaaaaggaggcgttgtagttttgtcggcgcgcgggaagttttttttttagcg

SEQ ID NO: 4256 - DNA, 227 bp, Artificial Sequence
  Description of Artificial Sequence: Synthetic polynucleotide
ttaggagcgatggttgtaatgtttttttttttgttttgtttttcggtgtcgggagttttgtttttcgtcgttatttttggttagttttgcgtaagaacgtcgttttgtttggtagttaggtcgagacgtagtttgaatgtgagtaggaattcggagaagggaagggagagaattagaaagaaggttcgggagggattcgggaagtagtgggaggtttgcgttttgga

SEQ ID NO: 4257 - DNA, 323 bp, Artificial Sequence
  Description of Artificial Sequence: Synthetic polynucleotide
tcgtcggaagagttttgtagagtgagtttttagggttatttcgttgttttttttttcgttttcgtagtcgttgtagttagcgtgggagtcgggtaggtcgcgtggggcgttggatttatcgagaggttagcgtcgtcgtcgggggagggcgtgtttcgtacgtgtgtgttcgcgcgtgttcgcgttcgcgtgtgttagcgcgcgtgttttggtcgtgcgcgtcgagtcgggtcgtattaattttttcggcgtcgacgggtttagtttatggtgtgggcgtcgggtttagggaggtttcggttttcgttaatcgcggagtaggg

SEQ ID NO: 4258 - DNA, 279 bp, Artificial Sequence
  Description of Artificial Sequence: Synthetic polynucleotide
ggtacgagcgttagtagttcgtaaaataggtagagtacgtttttcgtgagggttatacgcgttttggtcgggttcggggttacgtaggtggtgtattgcgcgttcgttagggttacgaagagcgtaacgaacgttagtagtacggcgtttacggtgagcgttcgcgtcgtttgtatttcggtgtttagagttagtatcgagtcgtatattttgtattgtatgtgttcggtgttttgtattacgtacgatatttatagttttttttaggtggtttgcgtc

SEQ ID NO: 4259 - DNA, 261 bp, Artificial Sequence
  Description of Artificial Sequence: Synthetic polynucleotide
ttcggcgcgcgtttttcggcgtatacgttttttattttcgcgtcgcgcgggtcgcggatttgtaggttgcgcgttttttgcggagtttgtttcggttttacggataggtttcgtagtgagtaggtaagggtcgtttcgtcgcggttgtttttttacgtttcggtcgttttttttttttttagaattttcgtttagtcgggatttcggatttttttttttggtttggcggttttcgttagtcgcgatttttatcgacggaga

SEQ ID NO: 4260 - DNA, 364 bp, Artificial Sequence
  Description of Artificial Sequence: Synthetic polynucleotide
gttcgggttttgggcggcgagggcgtagcgagggttgtcgttttttcgggtagtttcggggggcgcggcgttgggtcgcgggttcgggggttgtcgtgttcgatcgtatgcgtcgatttgtcgttgggcgttcgtttttttttgttggggttgggcgcggtttcggagtttggcggcggtggtgagggcgtacggttagttgtagcggcgttgtgtttgtcgtggatttaggatattttaggtttggtggcggggttaggtggcggcggttttttgcgttcgggcgatggcgatagcgataggtttttaatttcgtttcgggttcgggtcggtcgggtttcgcgtcgggttacgcgcgcgtata

SEQ ID NO: 4261 - DNA, 242 bp, Artificial Sequence
  Description of Artificial Sequence: Synthetic polynucleotide
ggcgttttttgagtttagagaagtgggttaagataagggaagaaaattttttatagaagaggagattttcgtttttagtgttggggattttcggtattcgcgtttttgtgtttttggtggtttcggcgttttttcggagcgcgcggtatgtttgtttttatacgtttagtatttttgtttttagagtaaatttattttttagggtatacgtagaggggtagttaggtatcgtttttattttg

SEQ ID NO: 4262 - DNA, 285 bp, Artificial Sequence
  Description of Artificial Sequence: Synthetic polynucleotide
acggtcgttcggggtcgtattttcgttcggtggcggcgttcgaagacgttagtcgcgttacgtattgtttgcgtttcgcgttttagtcgtcgcgtattaacgtcgtcgttttcgtcgggagttaagttcgtcgggtcggttcggttttaggtgggtagttcggtttgtagttggttggaggtggcggtcgttgtagttttggtagcgggtatatttttaagtatacgtatttaacgttttttttttgagttacgaggatggagtagttatttcggttcgggattg

SEQ ID NO: 4263 - DNA, 222 bp, Artificial Sequence
  Description of Artificial Sequence: Synthetic polynucleotide
ggtattgattttttagttttttgtttgttttttcgttttttttttttatttcggatatttttaggataattagggttgaagttttcgggagaagtagtttcgagttcgtgggataagggggcggttcggtttcgtttaggatttttttcggatttttttttcggttgtttcggttggttgtagggcgcgttatttcgcggggaggcggcggtagcggtggcg

SEQ ID NO: 4264 - DNA, 201 bp, Artificial Sequence
  Description of Artificial Sequence: Synthetic polynucleotide
gcggcggcggcggcggcggcgggggttggggcgcgggggtcggattatgagtcgttgagtcgggtaaattttaggttatcgagttagcggattttcggagcgtagttttgcgtcgcggagtaggttttaattaggcggcgaggcggttatacgtatcgagttagcgattttcgggcgacgcgcggggttagggagcgttac

SEQ ID NO: 4265 - DNA, 298 bp, Artificial Sequence
  Description of Artificial Sequence: Synthetic polynucleotide
gggattattttttacggtgttatcgtatttatttcgcgtttttttttcgttttttggagtttatcgggattaggtggcggcgggtgtttttttgggggtgcgcggttatgtaattggtggatttttttaaatcgttttggaggggggagcgcggcgttgggggcgggagagcgtttttggttgtgagttgtttttgtcgtttcgtttcgcgtttttttgtcgtttcgtttcgggtttttcgcgttttttttttcggttcggtcgagcgcgttgtttcgacgtcgttatttagagtcgg

SEQ ID NO: 4266 - DNA, 272 bp, Artificial Sequence
  Description of Artificial Sequence: Synthetic polynucleotide
tgatagggatcgggtttagatttgttaaatgttgcggaggtagaatttgatagtgcgggagggtaggcgtttgggaggtaggagttggtggagatgatagcgtggaattcgtgagttttacgtaacgtttttttgtcgtttagggtgggtttttagaagtatagaaatggtcgggttgcgggatattatagcgaggaattagcggagtataggggttttaggagcgtcgggatatgttaggtcgggtagatagtttcgggtcggagtgagtg

SEQ ID NO: 4267 - DNA, 201 bp, Artificial Sequence
  Description of Artificial Sequence: Synthetic polynucleotide
gagtatgagggagagtgttattttttagttgaaggttattgtgttttgtatttttggtttgggtaagtgaggagtttgttagtttttggtaggaagtgtacgtgatcggcggttggttaggggtatagagacgtattttatatagaaatttaggttggcggggtgggcggtcggggagttagttttgtagatgttattaag

SEQ ID NO: 4268 - DNA, 251 bp, Artificial Sequence
  Description of Artificial Sequence: Synthetic polynucleotide
gtaggttgaaggcggagttggagatattcggggagtaggttcggagcgttttcgaggtcggggtcggcgagggagaggtagggagttcgaggaagggaggcggggcgggtagggatcgagttaggagagagcgggcgggggttttgggagcggttttcgagagtggggtttgtggggagtagggcggtttcggggatagaggaagtcgcggtggaggtttagggtagacgcgggcggacgcgaggagcgta

SEQ ID NO: 4269 - DNA, 249 bp, Artificial Sequence
  Description of Artificial Sequence: Synthetic polynucleotide
attcgttttcggagtttcgttcggcggtatttgttttggttacgcgttttagtttcgttaggtttttcggcgggttcgaattcgtagtcgggaaggtatacgcgagtaggagggcgtattttatggttaggtgcggacgcggcggttgcgggtggttagacgcggtaggcggagcgtacgggcggcgcgtatttttttcgcggtttcggagttcggcgttttaggtgcggttttaggtgagagtcgtcg

SEQ ID NO: 4270 - DNA, 249 bp, Artificial Sequence
  Description of Artificial Sequence: Synthetic polynucleotide
gttttcggtagacgtagggggacgttcgggcggcgcggggcgcgggtttcggagtggttgcgggaaggacgcgcggtattgtttgtgcggggattcgggacgggtcggggtattataggcgcgggaatttacgtgtggattttgcgttcgcgggcgcggtgattttcgcggggatttgttggtgtttcgagatttattgagttgcgggggttttggagatttttaggtttgaaaagttagttttagaga

SEQ ID NO: 4271 - DNA, 201 bp, Artificial Sequence
  Description of Artificial Sequence: Synthetic polynucleotide
ttgttcgcggcgtcgggcgcgtcggtcgtcgggtggtggtggtggtcggcggcgtggtggtggtggtggtggtagtgcgggttcgcgtcgttttgcgcggcggtcgcggcgattacggcggatattacggcggcggcggggtttattttttcgtcgttgtcgtttaaggaggcgtcggtatcggtttcggtcgtcgcggtt

SEQ ID NO: 4272 - DNA, 201 bp, Artificial Sequence
  Description of Artificial Sequence: Synthetic polynucleotide
acggtatttacggtcggggggttcgggggattcggcgggcggcggacggcgtatattcgcgattcggttcgggagtcgttgttttttttagtttggttttcgtttttacgatttaggggcggttgcgcgttgttttttggcgtcgtatcgggtttaggcgcgcggcggggttggggcgcgcggggcggtcgtttgggttat

SEQ ID NO: 4273 - DNA, 251 bp, Artificial Sequence
  Description of Artificial Sequence: Synthetic polynucleotide
cggcgtcgggtagcgcgtagagttagtcgcgtgtgtagggtcgggtgtcgttgcgtgcgggcgcggggcgcgggttcggggcgggtgtagggcgcgggatcggggtagcgtaggagtaggtaggggttcgcggttcgcgtgggttttaggcgcgggatggcggcgtttagtagcgcgggttcgcgtagggcgcgtagcgttgggggtaatagcgtggggttcggtcggtagtggggcgcgggttgcgcggt

SEQ ID NO: 4274 - DNA, 201 bp, Artificial Sequence
  Description of Artificial Sequence: Synthetic polynucleotide
tacggtggattttgtgggtcgttgagttttttgattttcggtttgttttattttgttttgttagtgggttttgcgttcgcgttaataattcgaatgggtacgtttttgcgttttagaacgttgttcgtttttttatatttagattgaggtggaatttacgttatataaatcgggtcgtaaggtttagtttagcggggtttt

SEQ ID NO: 4275 - DNA, 201 bp, Artificial Sequence
  Description of Artificial Sequence: Synthetic polynucleotide
tggcgcggggcgtaggtgtacgtaggttggtcgcgggcgcgcggggttcggcgggagtttcggggtggttttcgcgtggggtcgggggcgttcgcgcgggcggggcgaggtcggggagggtagttgttcgtttttttcggtattgggagttttcggttggtattgcgggaggagttttcgggtgattcgcgggttttgaaa

SEQ ID NO: 4276 - DNA, 201 bp, Artificial Sequence
  Description of Artificial Sequence: Synthetic polynucleotide
tgaggaattggatattaggcgttggtcgttttttatttttagtcgttgggtgtttagagtttatttttagcgattagagtagaattgtagagaagacgttcgcgttcgggtttcgtttggggagttagggcgcgcggggagcgttcgggtcgcgcggttattgatcgttggttgtacgggggcgtcgtgcggattcggttt

SEQ ID NO: 4277 - DNA, 337 bp, Artificial Sequence
  Description of Artificial Sequence: Synthetic polynucleotide
tttagggttttcgggatcggtgttcgttagtgggtataggacgtcgggtgttcgaagggttgtttggagatgtaattgattttggcgggtattagaatgacgagtggtagtagtaggagcggggtgacgaataagattacgaaggatttgaatttggagatatagtttagcgtcgaggttatcgcgcgggagggagattggcgggcgagacgagtgaggggtagttagaggcgtcgcgggtttaagaaggggttatagttttcggggattggggagggggcggtgataatttcgtttcgtacgggggcgttttttcgcggttttggggcggggttat

SEQ ID NO: 4278 - DNA, 201 bp, Artificial Sequence
  Description of Artificial Sequence: Synthetic polynucleotide
ggttcgtgtagagtcgtttattttttttcgtagcgtcgggttgttttaaattgtttttggattttatttgtgagtcgcgtggttgggttgggttgggttgcgcgggatttgttagcggttttcgttattttgttcgtaggcgtttatcggttgttttttgggtcgtcgttggtcgtcgttatacgtgggacgtcgagggta

SEQ ID NO: 4279 - DNA, 201 bp, Artificial Sequence
  Description of Artificial Sequence: Synthetic polynucleotide
atatggcgtatgatagggaattggtagggttatagtttcggattattcggggtagggtagggaaattacggtagattgcgtagcgtattttgttcgggtgcggtgagggttgcgtttcgtttggttttcgttataatttatagaaagttttcgcggagtattggtgtttttgaatttattaggcgatttcgtcgtaaagaa

SEQ ID NO: 4280 - DNA, 201 bp, Artificial Sequence
  Description of Artificial Sequence: Synthetic polynucleotide
tcgattttgtttcgggtaatcgatgggaaatttttcgagagcgcggtttttttggggattcggcgtttttgacgtttttaggcgttttttcgggtcgttgcggttttttttcgtcgttcgttagcgtttaaggtcgcgttttttttattttcgtttttttttttttttcggcggttttcggatttggatagagttgtagga

SEQ ID NO: 4281 - DNA, 1216 bp, Artificial Sequence
  Description of Artificial Sequence: Synthetic polynucleotide
gaagygaagaggggttttttgatttgtaatatagaggaaagygtygttttygtttagtttggtatttaygygtttataygtattyggygtyggtygggtygtttatttgagttttaaaagttgttgaatttatatggttaygtttyggggagyggggttttagatttggttygtttaggttatttgygyggygttygygttygttygttttygtttygyggygtyggttttyggttttyggttygtygtttttygtygttygtyggtygyggggygtatagygagttagagygyggtygygyggggttttatgtyggtyggygygtygtygtygttggggygtatggtttaggttgggyggttygygggggygtatatttttyggtyggggygyggggttygyggtttttttygtyggyggtatagygaaggyggtagygaggyggggygtgtttyggygttgtygyggygtagtaaagggttggggagtygyggtttygtttttyggggyggygaggagggaggtyggyggygttgtygtttayggtgygtgtttttyggygygyggtttttgtttttagtyggagtttygygtygatggggyggygttgtttagggtttggggtgaygygaygyggayggaygygagtttttttygygttgtygggtyggggggttttgttagaggtttygtygtygatyggygttatttaagttgttygggggtttygtttgagygttygttttgtagayggtygyggttyggagattggtaggaggygggtaygagaggygygyggggygagggygtygtggagygyggggygtggggaygygyggyggyggygtygygyggaggaggygygyggggatttyggggtttygtygttygygtttatygygttygtygtagagtygttygygttgtttagtygttttttttttygygtttgttttttygygygttygttttygtttttyggagtyggttttaatttygttygttyggttyggtttaygttattygtttttttygtttttygaaygggagttygagtttttggtttggtttyggtttttgttygtygttttattttgygggggtyggggtygtygygggtggtggggggygttgtgtttagtaggggygatagygtaggyggggttttttgtagtttttttttttattttyggtygygtttyggtttttattttg

SEQ ID NO: 4282 - DNA, 365 bp, Artificial Sequence
  Description of Artificial Sequence: Synthetic polynucleotide
ggtyggtggygtttatttygtatygygttgtttygttyggggtattatggtttggggttggattatgttttttttattttagtyggygttttttatttaygygygttgagggtgyggtgagttgagtgyggggttaagtatgttttggygtygatttygtttaggggtttaggatttggygtttaaggggttttttggygayggagattttygaygtagtagygattygyggttgtttaagttgatttygttygygtttygagyggttttgggygygyggggtttyggggattggaggatttyggggggyggygtygygtggtggtyggaaggggaygttaagttyggggtgggygtyggaygtt

SEQ ID NO: 4283 - DNA, 201 bp, Artificial Sequence
  Description of Artificial Sequence: Synthetic polynucleotide
gyggaaagtaaggygygtttatagtygtttttttttttggaagttygygtttatttttgygyggyggtygtttyggaggygtygggttgggygtgaggaygtygtatttattattgggttygygagygtygttagtttagtygttttttttygtaggttygggggtagygtatttygtaggttttataagtygttaygtta

SEQ ID NO: 4284 - DNA, 201 bp, Artificial Sequence
  Description of Artificial Sequence: Synthetic polynucleotide
gygttggttgggtagtttttgggagatgaagygaygtaggygttttaggtattggttgtagagttygatgtygttgtgttyggygttttttatttatagyggttttatygttttggggtagygttygtagagygttagttygtgygagaagtygattatttygtttttygtgtygtggatgatgagtaygggygaygtgat

SEQ ID NO: 4285 - DNA, 201 bp, Artificial Sequence
  Description of Artificial Sequence: Synthetic polynucleotide
tygttttggtygaagygtagttygagygtygygaygygttttaygygtaggaagtygtyggggtygyggtygtatatttygaatatttygygtaggyggygtayggagygtagtagagtygygggggygttygattagttygygtygttygttattygggtyggttygtagtttagttyggatttttygttygtygygttc

SEQ ID NO: 4286 - DNA, 201 bp, Artificial Sequence
  Description of Artificial Sequence: Synthetic polynucleotide
ygtttygygttatgtatatttattgtggtgatgagagttygygtttygtgttygttayggttattgtgygtttaataaaaataaatattgtygaggagtygtygygatgyggggyggaygygyggttyggaaaggggagggggttttaggaagagttatattygygagtygggtttgggttaggggygaggggagagygtt

SEQ ID NO: 4287 - DNA, 201 bp, Artificial Sequence
  Description of Artificial Sequence: Synthetic polynucleotide
gtggttttttggtttttttaggtagttaatattataattttttttgggagggggttygtagaagggygygygttgtttttttygttttttaagttgtagyggggygggtygggagttagggttagggtttggagatttgggaggggatyggtgttagaagygaagagttagggttagaaagttaggttaattaaggggggg

SEQ ID NO: 4288 - DNA, 201 bp, Artificial Sequence
  Description of Artificial Sequence: Synthetic polynucleotide
ggagaagggggttygtgtaaattttaggttgaygatygygtaygygtttttygggttattagttttgtygtttttggtggggtatatygaggagatygtygtggggaatyggggatyggattgtttgatagtygagygttgaagattattttttttgagtttagggaggtttggttgttttgagttttttatttttgggtt

SEQ ID NO: 4289 - DNA, 213 bp, Artificial Sequence
  Description of Artificial Sequence: Synthetic polynucleotide
ttttgyggttggttaggaggagtttttygtygtttttattttagtygygtygggygttgggttygatttttagtatttttggtattgatgtgtttggtgygygttgagaygygaaygttttgtaagatgagtttttatttattygtttttttttttttttatttgtttattttataaattgagtgtttggttattttggtttaggtaagaggt

SEQ ID NO: 4290 - DNA, 201 bp, Artificial Sequence
  Description of Artificial Sequence: Synthetic polynucleotide
gtttagyggtttgtatygagagttaggagaggtttagatyggatttygatttttygaggygygggagtttayggagygyggtgggygyggygttygggtygygtagttaggtggggagyggygygtagttttagattygtaggtaggtagyggyggattgtatttgtttygtttygtagygttttttgtttgtygtttttc

SEQ ID NO: 4291 - DNA, 201 bp, Artificial Sequence
  Description of Artificial Sequence: Synthetic polynucleotide
gygttygaggtyggygyggtggggatygygggtttattattagttaagtttagttatttaattatttgtagagttgttgtaggtataggtttaggttttygttttttattttttygygggtgatgygttttgatagyggtygygggagygggggtaaaggyggtagttggggyggyggyggyggtayggtygagtgtttyg

SEQ ID NO: 4292 - DNA, 201 bp, Artificial Sequence
  Description of Artificial Sequence: Synthetic polynucleotide
tygtaaggggtattyggttttgtgygygggggyggygggggttttgygyggggtygggttgggtygggttgagttggttygtttyggygtyggggattaygygygattggttagattttgtygtgatttttggaaaattgtgattattttatatgttttgtttagttyggattttttgygttaaygagttaggtttttttt

SEQ ID NO: 4293 - DNA, 324 bp, Artificial Sequence
  Description of Artificial Sequence: Synthetic polynucleotide
yggggttygggttgggatygyggggtgggyggtttygagagygtttygtagtggttggagttttgggygttgtaaagygtgtttygtygggttttygagygtttygygttttygtttygttatgtttttgttgttggggttgtgtttggggttgtttttgtgtgtggggtygtaggaagaggygtagagttggggttatttttyggagtaggtaagtggagtygaggggagtygggtttygggygyggtygttttttttttttygtyggttyggtygyggagtttttgttygggtttttttygatygttttttaggtttttatt

SEQ ID NO: 4294 - DNA, 201 bp, Artificial Sequence
  Description of Artificial Sequence: Synthetic polynucleotide
gagggggyggttggaggattyggatttttaagaatttggttttgggttttgattygggyggtyggagagaaggygaagaagaggtygagtagataggygygyggyggaygygagagaaggaygygggygaagygtttaagaygttygtttttagggtygtygagttttttttttttttygtttggygyggtagtatygygg

SEQ ID NO: 4295 - DNA, 330 bp, Artificial Sequence
  Description of Artificial Sequence: Synthetic polynucleotide
agtttagtttagttaagtagtagagagaataggayggaggtttttattttttagggattgtagygtttttaaatygtttatttgygayggtttygygagygtgygtagtttagtttttttyggaygttttygttttygttygggtatatygtgtttygtatygaggtagagaggggtaygyggattttagtttttgygagtttttttgttygtygttattttatatttygtattgttttagttgtygttttagaagatgtatygtttggygygtaaagyggtgtayggtttttagttygygygtagtagtttggaggggygttagagttt

SEQ ID NO: 4296 - DNA, 293 bp, Artificial Sequence
  Description of Artificial Sequence: Synthetic polynucleotide
gygttttagttygtggygttgtyggygtagatttygygtggggatyggygaggttaattttttttgyggttyggggtyggtagagtaygtaaggggtygygggtygygtgggtttgggygygtygtggtgggtaagyggggttagyggagygggaattygtatatttttygagyggagtygaggataggttygtgygggtygyggggtttttttggygttaggaagyggyggtygaaggagataaygagaaygtagtttyggtttagggaggtttaaaagttgagatgttgaa

SEQ ID NO: 4297 - DNA, 201 bp, Artificial Sequence
  Description of Artificial Sequence: Synthetic polynucleotide
atygtyggygtyggtagttagagygggatttagtttttatygygttttttattggagtttttttyggtttttyggygagtgyggttygtggggagtgggygtyggygygaggaagtttttyggttygggygatttyggtttttgagyggtttttttttaygtygtygttygttaggtygayggaggatyggggyggggayg

SEQ ID NO: 4298 - DNA, 201 bp, Artificial Sequence
  Description of Artificial Sequence: Synthetic polynucleotide
yggygttttaygttttttttttggagtaaattygtttygttttttttttggagtaaattygtygtattttygtttgtatygaaattttgagygtygtttygygttatttttagttygygttygygttgttttttttttygggtygtaggttgagaggttgggtygtattttggttaygttttgttyggttttagygggata

SEQ ID NO: 4299 - DNA, 226 bp, Artificial Sequence
  Description of Artificial Sequence: Synthetic polynucleotide
tyggggttgttagggygtygggttygtgygyggatattgggggygtattyggttttygggttaggygyggttggagatttygaggttggggttttgaagygygtaagtatttttttttttatygygtttttgtaagtagtttgaagttttaagtygttgtttayggattttygtttttaattttttaattgaaaaaatttgtygaggagagtggaggtatygttat

SEQ ID NO: 4300 - DNA, 363 bp, Artificial Sequence
  Description of Artificial Sequence: Synthetic polynucleotide
tattygggygygggagtaygggygggtygggggygtttgggtyggtttgtygtggttygggggttyggggyggygygatttatttggygttttyggggtygygatttttttygggaggtgtttgygaaggyggttttgtygyggtgggggtggggaggttagggtttyggatygttggagttggggtygtagttagtttttggygagtgttttttggttgttgtygtaggggtttgttttttyggattttttttttaatttygtyggatttttttttttttttttttaygttygttaagtttatggtttttgtaatgyggtgggtgtggttatttagtaaattgtaattgtggttttttgtaa

SEQ ID NO: 4301 - DNA, 201 bp, Artificial Sequence
  Description of Artificial Sequence: Synthetic polynucleotide
tttttyggagtgggggattgygagggggtttyggttttaygaggtgyggaggaagagttygaggtttggggygaggygygygggatagtggggttgaygygtggtttyggygtygygyggtttttygaatttygagtttygygttyggygyggtyggggtttttaatygttttttygttygtygggatttttatygggtyg

SEQ ID NO: 4302 - DNA, 201 bp, Artificial Sequence
  Description of Artificial Sequence: Synthetic polynucleotide
ttygttyggygttgtattttttygtggttyggttgtaaggatttgyggtggaggtttggyggaggygggttygygttttagagagagygttaygttattygagaaggygaygttgggggttgttgagttttttaattttttttggygygttttgtttagaagtyggggagtttttggtyggyggttggyggggaagygygg

SEQ ID NO: 4303 - DNA, 267 bp, Artificial Sequence
  Description of Artificial Sequence: Synthetic polynucleotide
ggtgagttattgggatttygttgttagggagtaagttggtaggtaggaagtagttaagatttgggggaattttttttagggaaygaatatagagaaggaygtatttgaaaatttygtygtagttattttttttttatgggaaagtttygatttyggygggtttagygttattyggtttttyggggtgtggaatattgagygaggtaggtgyggygggagtatgygygyggggygggtagggggyggttttygygtttttatttygyg

SEQ ID NO: 4304 - DNA, 707 bp, Artificial Sequence
  Description of Artificial Sequence: Synthetic polynucleotide
agggaatggggagggttaygtatattttgtgyggttygagtggttyggatggtatagtttaggtgttygggttaaagttggtatttttaaagtttagaaygtaatttgggygygttagtataaattyggttttyggtttttttgaagttagttaagttygtatagggtttttagygtttggaaatttgagaggygtggaagggtggggagtttygygaagtttttagtttttgggtgtttttyggtttygygggggagygggtttggagttaaatyggtyggtygtaggttggagtagygggygtyggagygygyggtggggatgttygaaaaggagttagaggtttagtyggagagttygagaataygagggatgtttattttgtaatatggttttaagtttttttttgtttaygyggaagygtttttygttttatttygggttgtgtagggtygtttyggygattaagtygttttyggagtygggtattggggagtyggtgttgygttygttgttggagtyggggttygattgygtygttaggtagtygggttttttttgggyggttatggtgggygygtagygttygggttttygttgtygtygtygttttgtttgygttgtygttttygttygtyggtygggtttaattggtttttagygtygyggygttagttygtttttttgtagtygtygaygttatygt

SEQ ID NO: 4305 - DNA, 201 bp, Artificial Sequence
  Description of Artificial Sequence: Synthetic polynucleotide
tggtgttgagtgygggtygggtygtttttyggyggyggtgggtgggygygygagggyggagggggtygggagttttggtttygaggtagygaggagagaygggtaaatagtagagygttaagttaagtttttaaagtgttaatagttgtagaagttygaattttagyggttttaggggygygggtatagggttttgggttt

SEQ ID NO: 4306 - DNA, 201 bp, Artificial Sequence
  Description of Artificial Sequence: Synthetic polynucleotide
gttgttyggggttgttgtataagtyggtgatattgttttgygggtttayggtttgtgagygttgygtggagttggggttygygyggttaygggygygggygygggygygggygygtgaaygtagtgttgagtygtttgttggagaggtttttttyggtygagtgttygttgygtaggttggagggttaggygyggagtttg

SEQ ID NO: 4307 - DNA, 201 bp, Artificial Sequence
  Description of Artificial Sequence: Synthetic polynucleotide
agttagygyggttttygggtttttgygtttatggygagggtygygggggaatagtttttggtaggtaatttgtygggtatttatttgagtttttygtatygyggttygaaaatttgggagygttttaggataaagggttagttttttggaattagtygtgtgtgattagtgtgtgttagttygtatgtgggggttttagtg

SEQ ID NO: 4308 - DNA, 201 bp, Artificial Sequence
  Description of Artificial Sequence: Synthetic polynucleotide
gttgygtaggtatygggtttygttygggygtyggggtagggttgtyggggttagtaggtttttygygttttttttggyggggttttaggggttggattgygggttttttttgtttttttttyggggtygagtaagttygyggggggtgtttttaggtagtaggagggtgaggtaggataatttttaggttttgtagttttt

SEQ ID NO: 4309 - DNA, 203 bp, Artificial Sequence
  Description of Artificial Sequence: Synthetic polynucleotide
atttttaaagaatgataaaataaagaagygtaygttaggtttttaaggagatatygtttttttttttttattattttttatttttattagattttttatygyggattaaagatgaatttgttattaattaagtttttgtttaagttattttatttttygtagtttttttatttgtyggggyggtgttyggygtattttaggtt

SEQ ID NO: 4310 - DNA, 201 bp, Artificial Sequence
  Description of Artificial Sequence: Synthetic polynucleotide
tgatygggygtygaaaygtygggagtygggggttaagggttygagttaggaggtttyggagtagtagtygttygttttttaygtygtygtygtygttttygyggttgtttggataygggataatygatttggggtttygatygtagtagagtyggaggggtgggtaggygygggttygggagaygygyggggaaaygygyg

SEQ ID NO: 4311 - DNA, 201 bp, Artificial Sequence
  Description of Artificial Sequence: Synthetic polynucleotide
ttattttaaagyggtagygtatttttagagttggttttttttttygtttygggttttyggatyggttgtaggagttttttttttygggtygggyggyggygtttggygttttygggttgggttattgttttatgtttttttttgggygtttggygygtgttttatygtygttatygygtttaaaggttaggttggaagttc

SEQ ID NO: 4312 - DNA, 208 bp, Artificial Sequence
  Description of Artificial Sequence: Synthetic polynucleotide
gggggygttttattgattttttttggygtttgtttttttttttaggttgygttttttttatttattgygagygtgagttagygttgaaggtttagagygygttgtaygagtagaagattttgttyggggtaagtggygttygtygtggygtaagyggtygaygygtygatagggggygatttygggaggtygggyggyggygyggygc

SEQ ID NO: 4313 - DNA, 201 bp, Artificial Sequence
  Description of Artificial Sequence: Synthetic polynucleotide
tattgatgaatgygygttyggattttygggyggattttttttaagtyggttygtttttttagtttaaataaataaataaagttagatggaagaaaaaagygtttattttattttygtygtygtttygttygttatttttgtttttgtttygttygtttggygttttaatagagtatagtttggtggataaagtttttttat

SEQ ID NO: 4314 - DNA, 201 bp, Artificial Sequence
  Description of Artificial Sequence: Synthetic polynucleotide
gaaaggaaaaagygatatttttgtttygtatagagttaaatattggaagtaygagatagtygaygtggattaggattattttggtttttygtgyggyggyggyggyggyggttgygygygggttttttgtggygyggttttggggygygggygygggyggyggyggggttgygggagtygtyggggygggaggyggagygc

SEQ ID NO: 4315 - DNA, 595 bp, Artificial Sequence
  Description of Artificial Sequence: Synthetic polynucleotide
tttggttttyggygttyggggttagygtagttyggggygagyggggygygggtyggggagggggagttgttygygtattttatttttttttttttygggygggyggyggyggttygttgtatatatttyggygtatttygttaggtygygtatagygtttygagtttaggygttttttygtttttttttygygttttgyggyggyggyggyggyggtagtagtagtagtaatatggttgttgatgggtgtttggggtggygttggyggygggaggagttttttygagtttttgygtyggttgttygttgttagttatggtaaatggtggyggyggyggyggyggtagtagyggyggyggyggyggyggyggaggtagtagttttagaatgagtagtaatatttaygygaattattttagtttagaygygttttttttttttttttttttttttttttttttttttttttttttttttttttttttttygtttttggtttaygagtttaagatggatgygtttattatttyggtgattatggaggtgtygtgygatagtyggggttaaygtatgtggtgggtttttttggtttttt

SEQ ID NO: 4316 - DNA, 201 bp, Artificial Sequence
  Description of Artificial Sequence: Synthetic polynucleotide
tttttttttttygtttttttttttttttggagaagagagttggtgttaagagttagggattttggttgtgtgtttgyggatttgtagtggyggyggyggyggyggyggyggggaggtagtaggygygggagygggygtaggagtaggyggyggyggtggyggyggyggttagatatgaaygtygtttyggygtyggyggtg

SEQ ID NO: 4317 - DNA, 269 bp, Artificial Sequence
  Description of Artificial Sequence: Synthetic polynucleotide
tttatygatygtattatttgatygygggaaaygaaatttgagtttaggaatttgaattgttttaygtaygttygttttyggataaattttttagaggatygtgatttttttatttagagattatttagggagatgttttggatgggataagtagataaatggyggttygaggaaaatgtaggaaattttatattgtagaygtttaagtattaattgtttgggtttyggggtagggaaygggagatattatttatyggaaatattatatt

SEQ ID NO: 4318 - DNA, 201 bp, Artificial Sequence
  Description of Artificial Sequence: Synthetic polynucleotide
ygyggtygygaggyggggttggagggygttgygggttgygyggaggttgygggaagygyggggagtaygyggagttygattagtagggagatygygtygygtygggtataggtaygggattygygttttaggagggygtagygagaggygtattgygtatttaggggttgyggtttyggtygtygtgyggtgataagttga

SEQ ID NO: 4319 - DNA, 267 bp, Artificial Sequence
  Description of Artificial Sequence: Synthetic polynucleotide
tgaaatttagaggaaaataaaaatgtagyggtttttayggaggtttttggtttgtaggatatttgagggtggagataaggatgtygyggagggaggattygggagttyggtygygttttttagtttyggtattygygtttagygygtygygtttygygtttttygygygtggtygtttttygygggtygggtyggggttgygttgttatttagyggtygygygtttagygtygygttatygtttttgtaggtygtyggggtttttgt

SEQ ID NO: 4320 - DNA, 287 bp, Artificial Sequence
  Description of Artificial Sequence: Synthetic polynucleotide
ggtttagatttygygagtttygggtttygtttattyggtyggyggttttttyggggyggagygyggygtttttggagtyggtatttyggatttyggygtygtttygygtatygttttygttttagtttttagtggygyggygttttttygygatattygygggtttttaggagygagtygattttyggttgggtttggagtyggggttaagtttattyggagggagtayggagtttatttagttgtttttgggggtaggaggtttaggttttattttgtatatygtt

SEQ ID NO: 4321 - DNA, 201 bp, Artificial Sequence
  Description of Artificial Sequence: Synthetic polynucleotide
ygatttggtattagygyggaggttattttgygtagtygggtaggtayggyggtttttaggtattttygtagtagttttagtttttggttygyggygtygygagggygagaattygtgggygtyggttttttttttygtygtyggtgttttgtaaagtggaggtyggygttttyggygttttygtygygttyggggtaggtc

SEQ ID NO: 4322 - DNA, 201 bp, Artificial Sequence
  Description of Artificial Sequence: Synthetic polynucleotide
yggaggtttaygttgagttygygtagygygtayggttygtyggyggyggtggttttygygttgygttgtgttygattyggttygygyggatttygttygygttattttaygygtaggttttgtagygtttttaggagtagtagygttygtaggggatygtygaggtygtyggggttatttgggtagagygygagtaggygc

SEQ ID NO: 4323 - DNA, 286 bp, Artificial Sequence
  Description of Artificial Sequence: Synthetic polynucleotide
gygygggaggygtygggggtygyggaggyggggyggggaggggtyggyggyggyggyggygygyggaggagatygtagtgyggtyggygttaggattygygggggttttttaggtygyggygtttttygtttttttttatttttygattttttttygtttttaaaatgaggaaayggagtaattygttttaagttgtgtagtygggatygtttyggggtgtgtagtyggttygyggaggtttttttgggggygggygyggggygyggttygggggygttttttgag

SEQ ID NO: 4324 - DNA, 244 bp, Artificial Sequence
  Description of Artificial Sequence: Synthetic polynucleotide
aatgtttagtattatttaaaaagaaaattatatatattagttaatgatatattttaatttttaataaagttggtatttttttttgattatagattttgtygtggtaaattygggtttygaygatagaggtagygtagaagttygtttttaaatgagataattttattaaaattataattttttgtatttttatagygtttttttagtggyggagattttaggtgttttaygttagggtttatta

SEQ ID NO: 4325 - DNA, 201 bp, Artificial Sequence
  Description of Artificial Sequence: Synthetic polynucleotide
gttttaattttttttygagatttygggyggyggggattttttttygggtggttgygtgygygtttagtaattyggtgggtggaggtttggagtttygttygyggtygttttygttgattttttagtgtttttgtttgttttttagagtttaggtagttagtttttygttaggaaggtagagtagygagattttyggtttac

SEQ ID NO: 4326 - DNA, 372 bp, Artificial Sequence
  Description of Artificial Sequence: Synthetic polynucleotide
ggattygtygtttaggttygygtggggatygtagggaattygygttaygtygggggttattgtttatygygaggtgttgaagtggtttygtgatygtygygggtygtggttgatatygyggagaagttaggatttttatagtttttgttagatttgaaagtaagttggaaatygatagttgttttagttgttttagattttaatttggtttgggttttttttttttttatttgaaaatagatttagggtaatgtttaagagaattttaatygayggaagtggtygggaaattttgttttyggtattgagggatgttatyggagatttttttgttttaggtttgtyggagtttattatattygttaatgttat

SEQ ID NO: 4327 - DNA, 201 bp, Artificial Sequence
  Description of Artificial Sequence: Synthetic polynucleotide
aattttttygtgttttttgtataatttgggagagaygtagygttgtgggtgtagagttgtttagagagggttttaggttagggtagggaagagataggaygtygyggggttyggttgtyggygttgttgttattttatggttgaaggggattgaggtygaattgggtaaggagaagtyggtygtagattgtggagttgatt

SEQ ID NO: 4328 - DNA, 247 bp, Artificial Sequence
  Description of Artificial Sequence: Synthetic polynucleotide
ggggtaggattttagaagttatttaattagggaygttgggttggaaatygtttaattaggtayggggtaggagaggatagggyggttttygggatgtggyggggtttttgtttttggttgtagttggagttttgygtttygttttygtttttttgtgttttttgttgttagaggtttagtttttgtggttttgtgatttgygggtattgggggatttatagttaagaygttaggatttttyggaagt

SEQ ID NO: 4329 - DNA, 201 bp, Artificial Sequence
  Description of Artificial Sequence: Synthetic polynucleotide
tygttttttttttygggatgtyggatyggtatttttattatttttaggtttttagggggttttggygttttagttgtggattttttaatattygtaggtygtagggttatataggttgggtttttaygtgtagaggatataaagtagatagaygaaaattggagtttyggyggtagygagaaataaaggtygygttaaatt

SEQ ID NO: 4330 - DNA, 201 bp, Artificial Sequence
  Description of Artificial Sequence: Synthetic polynucleotide
ggattttgagttggggatygtttaattaggtaygtaattggagyggatagggyggttttygggatttggyggggtttttgtttttygttgtagttggagygtttggtttygttttttttgttttgtgttttttgtttttagaggtttagtttttgtggttttttgatttgtaagtattgggagatttatagttaagaygtt

SEQ ID NO: 4331 - DNA, 235 bp, Artificial Sequence
  Description of Artificial Sequence: Synthetic polynucleotide
atttygttttttgtaagtttgtaatatttygtatttagattygtaatttaggyggaggataaagggttgtagyggagggygtagagtagatgtttagggyggggtagagggggygggaagttggygttayggtygyggygagggygagtagtygygygttttyggtgttaggaggaatgttygtagagyggaggttggtaggygygagaggttttaagygygtagttygattaag

SEQ ID NO: 4332 - DNA, 201 bp, Artificial Sequence
  Description of Artificial Sequence: Synthetic polynucleotide
gyggtatttygttttyggttttgygygtttatttyggggygygtygaggttatygtagggtatttatttggtatttgtttttgagtgtgtagatygtygyggtttttatttgggtttttaaataagttttagggagaaagaaggaggtaaaaaaaaaaaatttaattatgtaaatggatttyggattgggaggygygggat

SEQ ID NO: 4333 - DNA, 201 bp, Artificial Sequence
  Description of Artificial Sequence: Synthetic polynucleotide
gtygygttaaygaaygtaggyggygggaggttyggyggyggggttygygtttttgtatygygatygygttagaaaatatttyggggttgggyggygtttyggagaygtatttttttgttatttttatygtttttggtaaygattattaatgttattatgttttatttttttttattttttttygtttttagagtygygttc

SEQ ID NO: 4334 - DNA, 201 bp, Artificial Sequence
  Description of Artificial Sequence: Synthetic polynucleotide
aaagagggagaaagagattaaaaaaagaaaaagataaggggagggggaaggaaggaaggagagaaggaggaagaagtttggggtttgttgttttaggagygtttaggtagtyggtgttggagygyggggygttygttttygtygggattgtyggtttyggggtttgygagagygttagagttttagtyggygygttygggc

SEQ ID NO: 4335 - DNA, 201 bp, Artificial Sequence
  Description of Artificial Sequence: Synthetic polynucleotide
gtttttgygygyggaaaggygttggaggyggttttatagtyggggaggttagyggyggygtatttgtattttgggagaygtttggatttagtttaagttygtaggttgggygagyggagatttttgattttatygtgtgggtgagattattgtttttyggtttaaaagaaaagaaagtatgttgtgaatttttgaaataaa

SEQ ID NO: 4336 - DNA, 201 bp, Artificial Sequence
  Description of Artificial Sequence: Synthetic polynucleotide
tggaatttayggygtttygttygtttygygtttaggaatattgtgygtttagygtagatgygtttttaygattttttgtttggttyggggttatgtggtygygtatyggtttttgaagtttttatttgattgttggggaaggygtttagaattaggagygggttggttggggattggttttygygttgggtygtttygttt

SEQ ID NO: 4337 - DNA, 296 bp, Artificial Sequence
  Description of Artificial Sequence: Synthetic polynucleotide
tygggggtgggggtaagygttaygtgygygttaggtttttggtgtgttyggtaggyggygttgygtggttgyggttggtttygagggtgyggggggyggygattygggagggaaaatttttgttttttttyggggtttgttttgttygttttttaaattygttttatatttttttygattttygtttttgtaagygttatttgtagttttatyggttttygtaayggtggtggtggttggtggggggtttygaagtttgtttttggttagtyggatttyggtgggagatggaggta

SEQ ID NO: 4338 - DNA, 201 bp, Artificial Sequence
  Description of Artificial Sequence: Synthetic polynucleotide
gtyggtygagtttygggagtygaggttggaaaygttggagygggygttgtttatygaaggyggttygggatygggaygygggttygagygatyggagygygggttgtygtggygttggtygtagtttaggttgatgtygttggatygggygttgtygttatygtygtygtygtyggatttygttaggttggttygtgggtt

SEQ ID NO: 4339 - DNA, 201 bp, Artificial Sequence
  Description of Artificial Sequence: Synthetic polynucleotide
attygttattgtgtatttggaygttatttgtagatttagygtttgyggggatttyggaaaygggagagygggttttyggaaayggtgattaatgggaaaygtgattagatgttattaggygaatagttygtttttaggtaatatagaaggaagagaygtttttagttattttaaaatagayggagtttttagttaatggat

SEQ ID NO: 4340 - DNA, 266 bp, Artificial Sequence
  Description of Artificial Sequence: Synthetic polynucleotide
ggaaatygttagttttgagygtyggattttttgtgttgggtgggagtgggggttygyggttttggtgttttaatttttggaggaggaygtygggyggggygatgtttgtgtttgtggttttttgaggtagtgggagtggygtgtgaaggattgtgagagtttggygtgaagtgattgttatttgttagatattygtttggttgagtgtggtttygggatygtgttygtaagyggatttygtggaggygtttttttttttatttttt

SEQ ID NO: 4341 - DNA, 201 bp, Artificial Sequence
  Description of Artificial Sequence: Synthetic polynucleotide
taaagaagtygygggtatyggtttaataaggtgtagygaatagtygttygttttygttttaatttatagttttatattttayggtgttattgattttttygtatttagttatataggaygtggataggtatayggggtgatagtttygtattgaayggtattaatttttattygtatyggagttatatagatggtttgyga

SEQ ID NO: 4342 - DNA, 228 bp, Artificial Sequence
  Description of Artificial Sequence: Synthetic polynucleotide
aggataygttggatagtttygaaaagatatagtgggtggtttygggygtgggtaatygggtgyggaattatagygtattyggagttgygaatttagaygygggtgattgttgattttttgttttgtygtttttatttgtgtatgtaggtggyggttagttggggttagggaagygtggagggtgggttttaatygagttaagaaaagtttggggtgttttgaattttg

SEQ ID NO: 4343 - DNA, 248 bp, Artificial Sequence
  Description of Artificial Sequence: Synthetic polynucleotide
tygggattgagtttttgtagttttgaggtttggaggttygggyggtagtaattgtgtyggattaggttygtgggtgyggtttgtggtgtagttggagatygaggtttygygtattttygttygygttttagttatttaggttyggtygtagygaaaaggtttaagagggaagttagaggtgaaygttttaggatgaaggttttttgtaaaaygttgggatttagatttggggtgggtgtttggggttt

SEQ ID NO: 4344 - DNA, 387 bp, Artificial Sequence
  Description of Artificial Sequence: Synthetic polynucleotide
aagtygaggtgttggaggaygtgttgygggagtagttygggtygttgttttagttggtygttgtttgtyggtttaagyggttgttttygggyggttattygtttattgaaaatttttagttggtgttggagyggyggygtgtggttaaygttaaggagygtgagygggtgagggatttttagggtygaygttygttttttttttttttgttttattattaaatatttggttaatattygggggttygtttatygtttattttygttygaggygatttygagttttygaggttttttaygtttttagtttgttaggagaatggtagtggttttttttttttgtattttygtgtagttgttygttggyggtygttgyggtggtygtttc

SEQ ID NO: 4345 - DNA, 203 bp, Artificial Sequence
  Description of Artificial Sequence: Synthetic polynucleotide
ygatttaggttttttagttttygtttagtttttygygtgygggygtygggatygtagtatttgtgaygtygaagtttagtaggtygtagaygggagttaygygyggttttggtatagggtaaaaatttaygtttaggtaggygggtagttaygatgtygggtaagtttagggtagattttyggtggygtatagggaagtagyg

SEQ ID NO: 4346 - DNA, 203 bp, Artificial Sequence
  Description of Artificial Sequence: Synthetic polynucleotide
tgygaataagattaaggygaggtgaggtttaggttttygggattgatagygtygyggtagggggttygaggygggagttggggattttagygttttttaygygygttttaygggggttgtygttaataaaggyggagggtaagggtgygtttatttaagtaagggggayggtgggtygttygggttgagtagyggagygtagc

SEQ ID NO: 4347 - DNA, 312 bp, Artificial Sequence
  Description of Artificial Sequence: Synthetic polynucleotide
ggtttaggaggagtygygtygggttyggttataagaggtyggttagtaggygtttygttagtattygttygatttyggttyggagtatygggygtttagygygggtgaaggyggagtygtagggttggtttttaaagggatgttttygttygagyggygagattagtttygttygtttttygtygyggtygygtygtagtygtttayggtygtygatatggttttttattgyggygataatttyggagtgtattygtagttyggtttgttttygttygtygttatygtygtygtttygggygttttttyggt

SEQ ID NO: 4348 - DNA, 407 bp, Artificial Sequence
  Description of Artificial Sequence: Synthetic polynucleotide
tttyggttygygggaggtagttgtattaagaaggtgaggaygttgagygggggttygtgtttttygtygtygtagtttttattgtyggygygygtttttygygttygttatagtagygygttaggyggaygtygygggaatttgaygttygaggttygyggtttttaatgagagttttagaatatttttygtttttgayggttagyggtagygtygtygtttttygtagagygttygttttttygtttttagagttttagttttttttygagygatttygtagtttttttttygtttttattygtygtyggttttgtagttyggttttttttttagtttaggygygygggttgtagtgggygatygttttttttygatttttygtygtgtttttgggtttttygaag

SEQ ID NO: 4349 - DNA, 295 bp, Artificial Sequence
  Description of Artificial Sequence: Synthetic polynucleotide
attttgggtygygggagaagtgygtgtagttygggtaaggtygggyggggtygggygygggygggyggtygagggatgygatagggtygggtayggtttygtattttttygtattyggygtygtygtttygtygttttttttygtttgtagggtygtttygggtattttagggttgttgaggggygggygggtygtaaaagttaygagagaggggyggtagggyggygyggtttgygagygtygygggatttygaggagyggygyggggagtataggggygygyggggygggygc

SEQ ID NO: 4350 - DNA, 435 bp, Artificial Sequence
  Description of Artificial Sequence: Synthetic polynucleotide
ataattttggttttatatattttatatgtttygtataaagaaatagaaagygggygataygttttgggagggygggttggyggtttttttagttyggagygygtggaggttgygygtaggggttygggaygygggatagggatttygygtagtttaggygtyggggaatyggggttggagtyggggatttgagtttagyggaygtttttttygtttggaggttyggtayggatygggatattagggygttygtggtygtggttyggtttttggttgttgygggtygyggtttttagtgggtttttaggatttttttttayggygggtatttatygaggttgagaggttaygtygtgttgttggggtttttygtygattatatttttgggygttagttygggtagagatygyggggattggttaggtygggttagg

SEQ ID NO: 4351 - DNA, 410 bp, Artificial Sequence
  Description of Artificial Sequence: Synthetic polynucleotide
tggttgtgttagtygatatgagtttttttttttttaggaaggygtaggattyggggaagttttygyggttaggtygtttgtttattygtagatttygggygtygttygygttttttgttttttattttttaatttttgygtggttttagggtttatatttttggagtttttttttttagtaaatagtgttgttttttatttaatagtagaggygtttaggagtttaggygatgtgtttaaggtygaatagagggatagtagtgagttgtttaatttttttagttgygtagttaggatayggttgggggygggtggagatgtggygtagggttagggttygggtttygggaagtaatgatygagggyggtgattattgtttttagtttttyggygggtttttttttaaggg

SEQ ID NO: 4352 - DNA, 392 bp, Artificial Sequence
  Description of Artificial Sequence: Synthetic polynucleotide
tggaagtattygttttatygyggggtttggtatttaggttttgggatttttgttattgttaaggattttttyggggattygagttttygggttgaggatygygggggattttaggtygggayggagttttttttggttygttgtgygygtaygtttggaaaggygggatttaaggtagygatgttgygggaggttttgtagtgttaaygagttttygaayggtttygttttattttttttttgtgtgtttygtaagtttttgtttagtaaatygttatagtttyggygygygagagtggygttggtaygtttaaatttyggggtttttggttaggttaggggggygggygtgyggyggggtygggtygggtygggtgygtttagygggtttc

SEQ ID NO: 4353 - DNA, 203 bp, Artificial Sequence
  Description of Artificial Sequence: Synthetic polynucleotide
ttygattttagttygtygtygttttttaggyggattttttagaggtaggttttagttttyggygyggggaggyggygygttttagaggggygtagggtgygygggggtygttggtttttygggtattttttttttgyggttttttygttttttttyggagttggtgtttgaggtygttgggattttagtttggygtttttttt

SEQ ID NO: 4354 - DNA, 398 bp, Artificial Sequence
  Description of Artificial Sequence: Synthetic polynucleotide
gggttyggggataaagggtgaygtgtggttttggggaaggttygggatgagggagttgaatttagttgtttygygyggtgtttagagtgttttatygygygtaataaattttygtagatatygtatttttaatgyggtgtttttttgtgttagtgtttyggyggtttttgtagggtgttaatgttayggttgtatatygttttttttttttattatttttatttgaatagatttggaggaggyggaaatggaaattagggtatgtttataagttggattygttagatttttttgttyggyggtatgtttgtgtatgtttgtatgtyggtaaggagttayggatagggaaggtttaagagttggttatttgagygtagtagatgggttttygtagtttt

SEQ ID NO: 4355 - DNA, 286 bp, Artificial Sequence
  Description of Artificial Sequence: Synthetic polynucleotide
gtyggtttttttatatttaygtgtttttygtgtgygygttttyggtttgtagatgttataaggttggygtygtttggattttygggyggttttatttttygyggtygttaygtttygttttttgtatttagtttttttggygttttygttgtagtatttaagattaggygtygtttttgttagtygtgttgtttagtaygtttgagggtygttgtyggtaggttttatttttygttygggttttttatttatttttttttttggayggtggggtttaagttttgta

SEQ ID NO: 4356 - DNA, 267 bp, Artificial Sequence
  Description of Artificial Sequence: Synthetic polynucleotide
ttttattttttttttttttttttagtttggttgaagaaygtttttaaggaaattygggttgtttttttttatttggaagtggttttttttatatyggttygtaaattgattatgaaatataygatgttaattyggagttgtattttttagttgggtattttygygygttggttttyggggtttygttttttattttttgtttttttttttygygttttgtttttattttttatttttygygttggttatttygtttttttggtagtt

SEQ ID NO: 4357 - DNA, 260 bp, Artificial Sequence
  Description of Artificial Sequence: Synthetic polynucleotide
gaaattaygataggtttgtattatygtttttttttttaygttttygtttaggtttgtaaagtyggttgtttttggttaataggygttttttttgttttayggtgaaaattagtttgtggtgtattgagatttgtaaattattttttgaatgttaggggygttgtaaaatagtygtygggtgtagtgggtygggygttyggttattttggttgygattatygtagttttttaaaggatgygggtagatgtagayggttttg

SEQ ID NO: 4358 - DNA, 239 bp, Artificial Sequence
  Description of Artificial Sequence: Synthetic polynucleotide
gtgagyggggtaygagagtgtagggtttygttggtgtttttttttyggygttygtyggatttatygtttttatygttgyggtgttygaattygyggattyggatyggyggtagtagaagyggtagyggtaaagtattygtagaatggggtatygygaaatagttttttttttttttttttttgttggtggtgtagtygygatagttygttttttaggtaggggtttggagtttgttttt

SEQ ID NO: 4359 - DNA, 846 bp, Artificial Sequence
  Description of Artificial Sequence: Synthetic polynucleotide
ggtggtttttggggtagatagagtaggatttgtttttgttttttgtttttttygtttttttttttttagyggyggygatygtagtaatagyggtagtggyggttgttgttattgttttgtygttgtygagtyggttatttgggtattygyggagtygygtygttgttatygtttyggyggtttttyggagtgygyggagggggyggyggaggagygagatatttatagtaatygaggatgygaggggygtttagtagtagygagtgtttgggagttaggaggaggttttygygygtyggtaatttttagtgttaggygttttgtagttttygygygtygygtttgggttygtatygttttygtagtgagggttygttygagyggtaagtttttttyggyggttaagtygatatttttttttygtttygtygtttatttygggtagtagtygyggaataatggagagygtagttagtagttttggagayggygttygggggaggaygygtygtygtygtygtygttgtygttagggtaggygygygtygygtggagtygggygggtgygagggygygyggyggggggtggggggtaygygtygygyggggggygggggtagtggggggygygygygygggttyggggagttygyggggagagttyggygttyggygtagygyggygyggttaagtttygygtttttttygttttttttyggygygttygttttygtttygtygttygtattygttgggggygtttagaaagatgtatagaggtaayggttaggggagyggaggtttaagttatatgtttgygttttygggggttagagttygttagt

SEQ ID NO: 4360 - DNA, 526 bp, Artificial Sequence
  Description of Artificial Sequence: Synthetic polynucleotide
agttgtgaagaggygtgggggtygygggaatttttttttggtyggtgygatgaaagtygggyggaygaggtggtttaayggggttgagagtggttyggtygaggygygggttgagtttttagtatttggtttgagyggygtgggtagtagtttgtatygyggatatttttaattttgtygygtttgygtygtattttggtygtggtagygatttttygggtatttttgaggtygtttttagttttataagtatttagtygtttattttagagtagyggygtygatygttttaagaggagttagttttygatatygttttttatttatttttttatatttttatygttggagggggtgagtgtygtggataggygttttygttyggggatagtttagyggyggtagttagttygattttttttygygygggtygtttaaatttgattagtagagygagyggtttagygtagtagtygttttygyggtttttagttgtagaaaagtaaagygtygggaggaagtagta

SEQ ID NO: 4361 - DNA, 201 bp, Artificial Sequence
  Description of Artificial Sequence: Synthetic polynucleotide
gtttttygtagataagtaaataatttggaygtgaaatggaaatggtaattaatgtagtaatgttgttatatttygagtgtgtaaattttattgattygtygygttayggggggtgtygggygtayggggatyggtggygtgygtttaggttgtttattttttttttttttttttttttttttttaggttttygggyggggc

SEQ ID NO: 4362 - DNA, 523 bp, Artificial Sequence
  Description of Artificial Sequence: Synthetic polynucleotide
ttttaygagaagaataagaagggttggtaaaatagtattygttataattttagttttaaygagtgttttattaaggtgtygygygagggyggyggygagygtaagggtaattattggaygttggattyggtttgygaagatatgttygagaagggtaattatyggygtygtygtygtatgaagaggttttttyggtygtygttygygtatttttagttyggtaaggggtttttyggggtyggaggygtygtaggygggtgyggygtggygggygtyggggtygayggttayggttatttggygttttttaagtatttgtagtttggtttttttaataattygtggtygttatygtagttttttttatttatgttttatgttttttgttagatggyggtagtygtagyggttgtagtagttgyggttgtagtygygggtttyggtagttttggygyggtygttgtggttaaggggttggygggttyggtygtttygtaygggtygtatataygygtgtagagta

SEQ ID NO: 4363 - DNA, 276 bp, Artificial Sequence
  Description of Artificial Sequence: Synthetic polynucleotide
tygtttaggtagtattttygtagtagtygttaaygagttgtagtygtygtttattgttygygtyggttttygtttttyggtgtttgtygtatygtgggtygtttygtygtgttygatgggtgygtttttagygttgtygtygyggygttyggtttygggttttygtygttgygtygttagttygtyggtagtagtygygtttattggygyggattyggagyggtttaggygtttatttygggayggttygtgaygttayggagggagggaggtggt

SEQ ID NO: 4364 - DNA, 357 bp, Artificial Sequence
  Description of Artificial Sequence: Synthetic polynucleotide
attttttttttaggtaggagtagatatttgtttgtttttayggygygttagygttttgttttagtygtttttgggttagagttygaaatttatttattgygtttttatttyggtatagatagtttttaaagttgttygtattttttagatttygttttttgtttagttttyggatttygtttaggggttgagttgaygttygygggtggatttttttggttygttgygtagggaattgatttygggaatttagggygtatagaggttaaagaagttgyggtaagggagggtgggtaaatttagtttgagtttaggtttttgtygtttttatttttaagtttgttttgtttttttttt

SEQ ID NO: 4365 - DNA, 278 bp, Artificial Sequence
  Description of Artificial Sequence: Synthetic polynucleotide
tgtygygttgtygtygtagttagtygygtygtygtygttgtygtagygygggyggtygygygtyggtagtaggggtttggygaggaagtygttgagtttygygygtttygygtttttggyggtygtagygttgtttattaattgatttttttattgatttatttaatttttaggagyggttgttyggaggtaygggtttttttttaaatttgtagygaygttttyggygtgggtataaaggtttygayggyggtyggygggggttgtttagygttygg

SEQ ID NO: 4366 - DNA, 336 bp, Artificial Sequence
  Description of Artificial Sequence: Synthetic polynucleotide
ggtgatgaagtttgggtagaaattttttgtyggtygttygttttaygtttttttyggggtygatattgttaattttttygggtattgaggatatttttgygttttggagyggtgggaggaygyggagygtygttttttggttttygatattttgttygttttttttagtgggtttgtggttgygttttttygaaggaagtaataaatttttttgattttgggggttagaggagaygttttagtttttyggaggggtgtgygggygggatygttttttygttttattggatttttggtyggggttgtttttgttttattgtgttttatatgyggagt

SEQ ID NO: 4367 - DNA, 311 bp, Artificial Sequence
  Description of Artificial Sequence: Synthetic polynucleotide
gggagggyggtaaggagtgyggaggtttaaaygggtatgagtayggggyggttyggtyggaggyggttttgggygtttttagttgttttyggttgttttygttgyggtatttagyggtttatyggggttgtattgttgtagyggttttttgtgttatttgtagtttaggaggttgagtatagtgagtattagtagtagtgtatagttygygtataatattagygtttttttayggaatatttttatttygagaggggaygygggttagyggygttttgggygtyggggttattgygggagtagggtaygyg

SEQ ID NO: 4368 - DNA, 201 bp, Artificial Sequence
  Description of Artificial Sequence: Synthetic polynucleotide
aaygtyggtatyggttgggaagtttyggtgtttygggttttttttggygagggyggagaagtyggyggtttttgtttagaattttgtgattgtagggatygagatattaagggygggggtgtagaggattataagttttttagygygttttatttgtatataaatgtgttttgttttttaattttgtttttgttatttgtg

SEQ ID NO: 4369 - DNA, 201 bp, Artificial Sequence
  Description of Artificial Sequence: Synthetic polynucleotide
tttttatttygygtttttyggaattttagaattygggtggtyggtttttggaaagtygtagtyggygygatgtattttgtagattttattttgttgggayggattttttaatttttagaatygygggtygtagggagttaaattgttgtttttttttttttttttygtgyggttggtggtttgttttttaaaggaaygttt

SEQ ID NO: 4370 - DNA, 481 bp, Artificial Sequence
  Description of Artificial Sequence: Synthetic polynucleotide
tyggggtygtatygttatggygatttgtttatttgattygtttygggtggattygtygygatttttgggygtttaggtttttgagggtttaaygggygayggttttttagttttagttgtgygttttygttygggygaggtggggttgatygyggtygtttgtataygttttttttggttygygttttyggtttgggagggyggattygtttattttaygatggtttyggttttggaagggattgttttygtgattygtttttttaatagtygttaataattttttttaaygttttttgygyggttygtttttgagaattttggttygggagagygaygyggggttttyggggttgygtaggttgyggygttttgtttaygttggttygagggygyggttygtttygggtyggtttatatatttaygttttttgtygggaggyggttgggaygyggyggggttgttttaagtgtagtygyg

SEQ ID NO: 4371 - DNA, 280 bp, Artificial Sequence
  Description of Artificial Sequence: Synthetic polynucleotide
gagttagtyggaggggyggyggyggtttygygygtttagagttttagtttatgaatgggattttattttgagygttttttttygggtttggggaggyggyggygyggyggyggggggygtttygtaagttygyggttttgagyggttattygygtagtaagttgggygagttggtagtygtttgtatttgttttttggtttyggtttttgatttygttttyggttttaagygttygggttgygttttyggttgtttygygaggtagttttaggaggttta

SEQ ID NO: 4372 - DNA, 252 bp, Artificial Sequence
  Description of Artificial Sequence: Synthetic polynucleotide
gygtggggagtttggtattttatttaattagagygttggattgagaattgtttaattaggygygtagtyggagaggagggggyggtattygggatttggygyggtttttgttttttgygttagygtgagttyggttagggtttttayggtygtgtttttattttttagggaggygtyggtgattyggttatagttttagttttygtygttttgtgatttgygggtattggatgattygtagttgagatttyg

SEQ ID NO: 4373 - DNA, 239 bp, Artificial Sequence
  Description of Artificial Sequence: Synthetic polynucleotide
ataggygatggatttttygggttttygggggygttttaygtgggtgttggtygggggttttttggtagtggttttggygttggggggtygaggttgtttyggygttagtttaygttttygttggygttttttyggygygtagttatttygggatttttaggtggtttttaggtttgggttyggtttgaggattttttyggggyggagyggggyggggttygagagtagtaygtaggtaa

SEQ ID NO: 4374 - DNA, 405 bp, Artificial Sequence
  Description of Artificial Sequence: Synthetic polynucleotide
agtttttaattaggtttaaggagtygtagagtyggggtttygggttygtaggatttagaagttaygygtttygygtttttygtttygtygttgtttgttyggtygatttatttggtgtygygtgygttggyggttygygyggtagttaagttaaaggtygaggtygaggtygagygyggygtttagtagtayggygggggttagtagggygggygtyggtygtagygygtttygttttagtagtagtygygygtygtttttgtaggtygtttygtygygggttattyggggygtttaggttgtygtttygtygtatttygtygtttgttgtatygttttygttagggyggygaygygggatttggagttygggygggttaggggygyggttygtttygtagattt

SEQ ID NO: 4375 - DNA, 237 bp, Artificial Sequence
  Description of Artificial Sequence: Synthetic polynucleotide
ttaagttgttgtygtttaaggttattaagtagaatttttttaaygaygagggttgttagagygatttggaggataaygtttygtagggtagtagygaygygttgttgttgygyggggyggyggtygtygtgttttygggttygggagygtayggtggtggyggyggyggyggygygtaggataagygttygggtttttttaygttgggttatyggggtttttatattatygtgygyg

SEQ ID NO: 4376 - DNA, 204 bp, Artificial Sequence
  Description of Artificial Sequence: Synthetic polynucleotide
agtygagtagtagttttagagtttttygtaagttttttttatattttttygttttygttttaaaggagtagtagtttttttttgtttttttattgtygtygtygtatyggyggagtttttttttygygygtttttttttygatggagttygggygtygtygaygtygtygttgtttygaattttgagyggggtygtttyggtyg

SEQ ID NO: 4377 - DNA, 224 bp, Artificial Sequence
  Description of Artificial Sequence: Synthetic polynucleotide
ggtyggggtgygygygtgtgtatgttgtgaatgygttgygygatgtgygtttttattttatatttagtyggttttttgtttgtgttgttygagtgtggaygtgtgtaygygttgtattygttyggtgtggtagygtttygtgagtttttggaggtagggaaaggttatttgtgtttagaggttttgttgagggygggaggggtttagttttagtggggagtttt

SEQ ID NO: 4378 - DNA, 278 bp, Artificial Sequence
  Description of Artificial Sequence: Synthetic polynucleotide
agygggtttgttttttatttttttagtttygygtygtyggtttatagyggttttttttggggatagtttttttygggtgtygttttygttttttttgtgygttttttttttttttttttttttattaaatattatttgggaattgtttaaattttttttttaaaaaaagagagaggyggggaggagtyggagttgtggagaagtagagggatttaggtaagtatttgtggatttaaaygggygtttttggaaattttggagaaygtyggatgggagac

SEQ ID NO: 4379 - DNA, 232 bp, Artificial Sequence
  Description of Artificial Sequence: Synthetic polynucleotide
gggaaataggtyggygtgtygaaagatatygagtaggtagaaataaggtaaatttatagaggygtaataggttyggtttttygtggttagggygagtygyggtttygygtggygtttyggtygttgttttyggattttgagyggttattgttggggttttygaaagaggtgtyggttttttgggagtyggaagagttgtttgggtgggtttygttttgttttttattttatc

SEQ ID NO: 4380 - DNA, 331 bp, Artificial Sequence
  Description of Artificial Sequence: Synthetic polynucleotide
tgttttgtttggattttatygtggtygagaaggaggaatggtatatygttttygtgaatattatttaygtygagttygygtyggatttyggggtyggggyggygggyggyggyggygyggagttgtatayggagaagayggagtgygggygttayggagagtattygtttaagtaggaygttygyggggaggtggttatggttagttyggtttaygatygtttggtttgygattttaatattaagttygtygtttygattygyggtaagaattggatagtttttatttttaagggtaattgtaygtatagggataagattyggaaygygtt

SEQ ID NO: 4381 - DNA, 231 bp, Artificial Sequence
  Description of Artificial Sequence: Synthetic polynucleotide
gttgygttttgggygtatttgygygtttggtttygygtttygyggagagggygatgggtttyggttaggattgagtttttttttttttttttttagtttygtttggtatttttttttttgtttygagggygagttayggtttgygtygtygttttttttttyggtgttttyggttygtygttttttygygtttttttttttyggattygttttyggggttattatggtygc

SEQ ID NO: 4382 - DNA, 201 bp, Artificial Sequence
  Description of Artificial Sequence: Synthetic polynucleotide
tgttyggttttgggtttagttygtyggygttgttgggggyggtaagtttygtattagtttttattygttttatttttttyggttgaatgagtgttagttygygtattggggttatttagaggagaygggtaaagtygyggttttaygggttgtattattggtygyggagtttaggggagttgtaggagaaattattgygag

SEQ ID NO: 4383 - DNA, 201 bp, Artificial Sequence
  Description of Artificial Sequence: Synthetic polynucleotide
agttygatgattaggagttttyggttttygaagttgygttttatygtgtaaattttgttgatggyggtgtattgtagttatayggataygagygtttygygtagttyggggtagyggtggtattygaaggagatgtygtttttttgttgtagtygtyggygtygttttatgttygtygygggygtttygggtttttgggtt

SEQ ID NO: 4384 - DNA, 219 bp, Artificial Sequence
  Description of Artificial Sequence: Synthetic polynucleotide
tygttgtagttatgaggagaatttttatttttatggttggtttatyggttatttygagatgtygtttttygattatagtatggttttgttttatagtttygagtatgttagyggygtygtyggtttggattatttttattaygggggggtgtygtygggygtygggttttygggtttgggggggtygygttyggtgaagygtygaggtatygttaatyg

SEQ ID NO: 4385 - DNA, 284 bp, Artificial Sequence
  Description of Artificial Sequence: Synthetic polynucleotide
gtygggggaggtggggtygtyggggaggaggygagggaaayggggagttttagggagayggttttygagggagagtgagaggggagggtagttygggttyggtaygttttttttttyggtygtttttttttatataagygtaggtagagggygygttagttatgttttgtttttgygttygtygtygtygtygtygtygtttagttyggygygttttggaggattttgygtygyggygttttygggtttygtygtygttagtygtttygtygtttttttttygt

SEQ ID NO: 4386 - DNA, 429 bp, Artificial Sequence
  Description of Artificial Sequence: Synthetic polynucleotide
aaagtattttttttttaatttatgaayggatttygatttttgttttgttattatttatgygtttygtattygaggtgtygtttttatttataygttttayggtttygygaaattyggttttttagttygygggaygygttgtttgttaggygggttyggyggtatttygggggygggaggggtyggtygtagggtttttagtttggygttygyggggygttygtagygaaggggtgggtgtygttygtgaaygtagtagggattagtttagttygygttygtttttgggtttyggttatygttttttygttattttttyggtttttgygtggatyggttygtggygggggttgttttgygttttygttttygtagtagtygyggatttttattaaygttgaygagttagtgtygygattyggggagaga

SEQ ID NO: 4387 - DNA, 283 bp, Artificial Sequence
  Description of Artificial Sequence: Synthetic polynucleotide
aaaagatygyggtggagaagatggggygtttttygygatattyggttgtttagaggtgtaaagtyggtgggygtaygttyggggyggttttatagttttygggtygttagttttagggtgtygggttttaattaaggtttygaagtttttaygtatttgagggtattttgattagtttttgygggttgttttgyggtygtagtgggttttgaaagtttatttyggygtagggtggaaatyggygggaggygttgttgattttygattaaataatagtgaygag

SEQ ID NO: 4388 - DNA, 241 bp, Artificial Sequence
  Description of Artificial Sequence: Synthetic polynucleotide
ygygggtggyggyggttgtggggtygtttgggatttttygtagtattgattttgtaattttttgtgtttgygtttygtggtgaggggyggygggatgygygygatttttttttgatttagttaaayggaaaagttygygygtttyggttggaaggtggaggttaggtaggattyggtaaaggtatattttaaaygaagtagattttattttttatttgtagagggaaggyggtgtggaygg

SEQ ID NO: 4389 - DNA, 244 bp, Artificial Sequence
  Description of Artificial Sequence: Synthetic polynucleotide
gtagtagttttaygttgttggygtaggyggygygtaggagggtygtygttttygggaygtttttygggaygtttttygggaygtttttygygttttygaygtygtgttttttttygttttygaaagggtagaaagagtygttygaggygatgttgygggtgtttggtagattygagaagtttttaaatttttygtagttagyggggtttttttygatttgygygtttyggggtggggayggygg

SEQ ID NO: 4390 - DNA, 225 bp, Artificial Sequence
  Description of Artificial Sequence: Synthetic polynucleotide
gtagggggygttgygttygtygagttyggaggggtygtygggtygggygttgygtattygygtygggagtygtttttygttygyggygttygtttttgtygttygttagtattttttgtttygyggtygygtttagataataaaagyggaagatgttgtagttgggtaaggttaggattttgttttgaagtygggyggygtygygtaygttttttttyggattga

SEQ ID NO: 4391 - DNA, 249 bp, Artificial Sequence
  Description of Artificial Sequence: Synthetic polynucleotide
ygtygttttygyggyggtattgggtatgtttygtattyggggtyggtttyggyggyggggyggaygtttttttattagtygggygttygggtyggtygtygaggtttaggtggaggttgaggttgtygygygtygygggaggagtttygttttyggyggttgaggyggyggyggtataggtggygygggtygygygyggggygtagttygggagygttyggygtygggygtygyggyggttttaggttc

SEQ ID NO: 4392 - DNA, 255 bp, Artificial Sequence
  Description of Artificial Sequence: Synthetic polynucleotide
ttygatygggagtttagagttttgttagygtygtattgtgygtygygtaagtygttygatttttttagyggtatyggttttaagtagtaaatatttgtgygtttttgagttagggaygygygtggggggtgggygtgtaygygggtgggttagygtagagtgggagtttgtgggtgtttttygtygggatttttaatttagttgttttygagagtttaagttgagygtygtaygtgttygtgttatttgttgtat

SEQ ID NO: 4393 - DNA, 243 bp, Artificial Sequence
  Description of Artificial Sequence: Synthetic polynucleotide
aygtttgtttgagtygtgttgtyggggattagygattttttatttttttttttttataggagygtttyggttttygttttygttttaatygtyggygygygtttttatygygtaygygtttttttygygygygtataygttygygtatataygttttttygttttygttygyggagtttttttttattttttagtygtttygtyggttgaagtatyggygttgggaggyggyggygttgttga

SEQ ID NO: 4394 - DNA, 201 bp, Artificial Sequence
  Description of Artificial Sequence: Synthetic polynucleotide
yggtttgttttgggttygtgaggygaggtygtagygtttygaygtygggtgggygtgtgggtggagtggagatttgggtttttyggygtatgggagtttygtygtttgyggtagggaatygttttttatttttggttyggttygggtygggagtygtgtttygygttgattyggtgtaattttttagtttattttttttta

SEQ ID NO: 4395 - DNA, 208 bp, Artificial Sequence
  Description of Artificial Sequence: Synthetic polynucleotide
gagaattgaaaaggaaggygaggagtaggggttgygggtygggtttttgttgttygyggttttygggggtygygtygygtygggttaygtgggggttttygtttttygagygggygtyggtgggaaatttgygyggygagagatagggggatggggygtttttgaygygattgtggggtgygggtagttttggaggaggatgttyggt

SEQ ID NO: 4396 - DNA, 257 bp, Artificial Sequence
  Description of Artificial Sequence: Synthetic polynucleotide
tagygttttygttttggttatggagyggtyggygttyggygaggtggttatgagttaagttatttagtyggygtaygttattgygygyggygagttgagygyggggtagttgtttaagtggatygatattatygtttgtttggygggtaggygggygtyggggttgyggggaggygygggatyggggttgygggagyggyggyggttgggggttggggggggtaggaaggygaggaaggtatttgyggagagttgaa

SEQ ID NO: 4397 - DNA, 350 bp, Artificial Sequence
  Description of Artificial Sequence: Synthetic polynucleotide
aaagtgtttgtaaagtttgagtagagtgygyggggtygagyggggagaagggtgyggggtatyggggtgagatataggaaagaggaggayggtggggagyggtagaagatagygtttttaggattagygattttgtggtttattyggttattgggtttyggygtaaattttttttaggtagtgygggygatgttgattgtagaygtygggtagggttttygtgygggygggagygggggaagttagtgygttygggygttagttagttgatgygggaagaggttggggagttgtagggtygttygttttygggtgyggtgttttggygtagggtttgggttgagtygttc

SEQ ID NO: 4398 - DNA, 216 bp, Artificial Sequence
  Description of Artificial Sequence: Synthetic polynucleotide
ttattttgttygttagtatattttagagtttttaatttttttttgtatgtaagtttaggtagagttttgttaggttttatattagagtatatttttgtayggattttttaggatygyggygtyggttggttgtttyggtttttygyggtygygtgagtttttttttggtggtggagggygtattttaatttggaaatttttagtttttaatttggt

SEQ ID NO: 4399 - DNA, 269 bp, Artificial Sequence
  Description of Artificial Sequence: Synthetic polynucleotide
tygygaagggtataatttgagaagttygtggtagtttttygtagygtygggtgatatagggtttttttatttttaggagaagtgggtaggagagagggtygttygttgtttttygttgygtttagggatggagggttttattatttatggaattgttggtttttttgygtggttygggattttagtygtggtttygygttaagagggtattttttttaaaygaaatygtttygttygttygttygttygttygttygggtagtaatgtc

SEQ ID NO: 4400 - DNA, 258 bp, Artificial Sequence
  Description of Artificial Sequence: Synthetic polynucleotide
agtaaaatttttattattttttyggtgtttattagttygtttttttaggtttttgggattattttatttaaaagtagttttttttagyggggtttagatygtttttgagatttygttgagaaatttttagygggttagygtttgggygttgggygtygagttygatatggttttttggatgtygttgatttgttygtyggttgtttagtttttgttttatttyggggygtagaaaggggaygggtaggggttygattt

SEQ ID NO: 4401 - DNA, 224 bp, Artificial Sequence
  Description of Artificial Sequence: Synthetic polynucleotide
agtttttagggatatttgaggtattatttttgttattgtygggtattygyggygttgttaayggtttggttatatgtttttyggagagttaygggagggygttgggtaatttttattygagtygyggtygygaggaggagggaaaaggygagtaaaaaggaagagtgggaggaggaggggaagyggygaaggaggaagaggaggaggaggaagaggggagtata

SEQ ID NO: 4402 - DNA, 256 bp, Artificial Sequence
  Description of Artificial Sequence: Synthetic polynucleotide
ggtygtgtagttygtttygttttttttttygaagagagatttggtgttggtatgggtatttygyggttatyggagtggtttttyggatgagtttggtttyggygttgaygttttggttttgggggttgtttggttggtgttaggtagyggaagaygtttggagagttattygtttttttttttattygtttttatygttgttygtgttaggaygygtagtttgtagttgtagtttaggtattggygygggatggyg

SEQ ID NO: 4403 - DNA, 310 bp, Artificial Sequence
  Description of Artificial Sequence: Synthetic polynucleotide
tttygtygtttyggaggttggyggtgagggtattygggyggtaggggttygtygaggggtygtggtataygggtaagggggttaattyggaatggttttygagtagttttaygttttgttaaggayggtaggtgtaagggtygggggattttttgayggggtygttttttygggtayggggaggtttttatygagttttaattttgaayggggtagggggtagagtttttggtaggtaaggttttyggaggagggaayggttggggagtggyggagtttyggagtggtggttttgttaaygttttttttc

SEQ ID NO: 4404 - DNA, 410 bp, Artificial Sequence
  Description of Artificial Sequence: Synthetic polynucleotide
aaggatttatttagaygtaygttygygyggagaygtaygttggtataygygtttatataygygagtatatataygygtatattattyggttygtgygygygggtygttgtttttgttgtattatgtaaaggtggttgggaaagygygttgatttatatttatatagtttattttttttttatagtatgtgattaataygtatttyggggaggagggagygyggttgggggtgttaatyggaagggaatagatagtgagtgttattttgttgggaggttttagaagtaaagygttaaygaygatagtagyggtggttttagttttattagtaattgtygttggtaggagtattataygttttaggagtttttygggtattaagtatgggtttagttygttttagttatttt

SEQ ID NO: 4405 - DNA, 274 bp, Artificial Sequence
  Description of Artificial Sequence: Synthetic polynucleotide
agatygagggaaygttgtttatgyggtgagagttagygygggaggyggygagggygyggggagatyggggagggggtgggtttygyggygttygtygttygtttttaygygygttgtyggtatttgttygttttgttgtaatttgttgtagtgtttgaaagagtagtaggagygtatggaggtggggtyggggaaagattaggyggagtggttgtggggtgagygyggagtgggtggggaggyggyggyggtggggaggggggattggttttag

SEQ ID NO: 4406 - DNA, 201 bp, Artificial Sequence
  Description of Artificial Sequence: Synthetic polynucleotide
gtygtygtygtygttgygtygttttttatttagagttyggyggygtygttttttttttttttygygtggtggyggggtatggtattattaygggtatygygagggggtygttagygtttgyggygggggtagyggttttatgtgygtyggygggttttaaggaggaagtyggyggtygayggggygttygttagttagaga

SEQ ID NO: 4407 - DNA, 265 bp, Artificial Sequence
  Description of Artificial Sequence: Synthetic polynucleotide
ggtygggaggygyggagttagtygtttayggagtttaattgtttgtatyggggatyggygggyggggygygttygagtggtttygtygggaaagggyggygggygttggagaaggygtttggygygaagttgggyggygtttygagggyggaggataggtggtygygygatygtagttaggtagygaayggttygggggttgygtagygyggttttaaagtttagttyggtttygggtttagttygttgtygtttgttaygggag

SEQ ID NO: 4408 - DNA, 201 bp, Artificial Sequence
  Description of Artificial Sequence: Synthetic polynucleotide
gygtagggggtagttgygtataaygygtttttggtagygyggyggttgygggyggggygygttttaygtgtttgaaggyggaygtttttttyggggggayggagagtagagggaagtygygtagggttttagagtagggtaggttaggyggyggyggyggyggygggtttttagygagtaggtatttgggatggtggtggt

SEQ ID NO: 4409 - DNA, 362 bp, Artificial Sequence
  Description of Artificial Sequence: Synthetic polynucleotide
ttttaaatygagttttygggtgtgtagattygtagyggagtygygggagygaggtgggaaattttggtygyggygtygggtttygttygtyggggggygyggggyggygggygtatgygygtgygyggtgyggttttagttttggttgtygtygtttgtygtygtygtygygatgtttattttagttaaagyggttgygggtttggggattyggttygggtagyggagttttyggattygtygattygtygaggagygygygtygggttttygtygagtagttgagttygtgtgtttygygtttygygtttygaagttgtygtttygaattttggtyggygttgtttaggtttttygttagg

SEQ ID NO: 4410 - DNA, 298 bp, Artificial Sequence
  Description of Artificial Sequence: Synthetic polynucleotide
tagyggagayggttaagtgtttttttattaatttttttttttyggagtttaggggtgttgtatgggyggygtttggattygygttttggagttattaggyggagtaaagttagygygtttygyggttyggaatttagttggttygttatttttttatttttgygattttattttygatygygttttagggtagaagygtttgagttttygttagtgggtatttaaagtttatgttyggygggygtgttgaygttattygggggttgyggagygggagggggyggtggggggyggggat

SEQ ID NO: 4411 - DNA, 295 bp, Artificial Sequence
  Description of Artificial Sequence: Synthetic polynucleotide
gaaggataygtaaatttgtygagggttygggggtttygggttgttgttgttgttagygttttgggaagtgataggtattaggatttgttggtgyggyggyggyggyggyggtagttttagtygygttygttatatatatttttattygttyggtgtataygtygygtygygggtagtgtygtttgyggaggygygttyggggttygtaggggtagtagyggtagtttggtagygtygtygygttttygggtatttggttygygaagtttygtttttgtygtttttygygtygttc

SEQ ID NO: 4412 - DNA, 203 bp, Artificial Sequence
  Description of Artificial Sequence: Synthetic polynucleotide
ggatgyggtygygtaggygttygttttttggttttttggtygggtagygggygttyggttatyggagtttagtttaagggtttagtygaggttttttygygygaggyggttgygttaggtgagygggtatygyggtygygttttttttgttatttatttagyggttagaggtattttgygtttgggagttttaagtgttttyg

SEQ ID NO: 4413 - DNA, 215 bp, Artificial Sequence
  Description of Artificial Sequence: Synthetic polynucleotide
agttttaaattttaygttataaagtttygaagaggygggttgggggygggggtyggggyggatttttaggggygtggttgygygtttgygatttyggatygtgttaatttygtygtygttttaaaatttgtgggaaattttagttttgttatttattttttttggaggaygtagataggatttgttttgtaggagtttaggtyggtygattygyg

SEQ ID NO: 4414 - DNA, 201 bp, Artificial Sequence
  Description of Artificial Sequence: Synthetic polynucleotide
gggyggyggygygygggggatttatttygtttttatttgatttygggtgattgtttattgttatggtttgygatttygygtggggatygtttagggtttyggggttttggatgtttygggtggygtygtygtaattttygtgtttttygygtygtttttatttygtttttattygggtygattygagyggttgtagttttt

SEQ ID NO: 4415 - DNA, 340 bp, Artificial Sequence
  Description of Artificial Sequence: Synthetic polynucleotide
tttttygagtattygtttygggttttttttaagtagttgtttyggtttyggatttttatttgatttttttaatygatttggtagggtaygtatatttgaygtttattttgtagtygagtatataaggttygtygaagttatygagtaggttttgtagttgtaggtagttttygtygtygygttttattaygtygtggaaggtaggtaygtagtygygtagygygttagttattagtygygttaggtagtagygtttyggtttygagtagygttttaggattagttygttggtgttygtygttttaaaattttttgaggatyggtattygttagygtygtt

SEQ ID NO: 4416 - DNA, 201 bp, Artificial Sequence
  Description of Artificial Sequence: Synthetic polynucleotide
ggyggagggatagagttggattyggaagtygygggtgggagttgtttttygygagttygaggttgttggtattttgtygygggtagttygygttagtttygggagtttttgggtttygggagagygagtyggggtygtttggttataaagatgttygygygttygttttgygtaygggattygttttgygttttgagtttt

SEQ ID NO: 4417 - DNA, 236 bp, Artificial Sequence
  Description of Artificial Sequence: Synthetic polynucleotide
aaygttyggttaggttttagagttttygyggagagyggggygtttgttgggggyggtygggagggtygggttaggggygygggagatttygyggggaygygaggtgttgygggttttgtgyggttggttgggaaygaggagaatgtgttattaatagtgtttaatygattgattattttgggtgttgtgtttttttttttatttttttttatttttgggaaaatgtattgtttagg

SEQ ID NO: 4418 - DNA, 251 bp, Artificial Sequence
  Description of Artificial Sequence: Synthetic polynucleotide
gtgtttgaatttttygggatatttagayggttggagtttttygattttaaggygggygayggtaaagttaaaygttagygygttgyggttttygggtatygaggygttttygttttygttatttatatagggygttaagtgtttygattygygagtgaygaggaygtataggttagtgataygattygtagttagtattgagygggaygayggggttygagygtaggagggtgygyggggagttgaggagc

SEQ ID NO: 4419 - DNA, 201 bp, Artificial Sequence
  Description of Artificial Sequence: Synthetic polynucleotide
tgagtagtttaggtagtygyggtggtygtgaayggggygggagtggggggtgtttaggttattagaggyggtttygyggtttgtatyggttggagtgggygatttagagtttgagtggagggggyggggggyggygatagyggggggttttggtagygatggtttgaatttgygttggtgggggatggggygggggygggg

SEQ ID NO: 4420 - DNA, 206 bp, Artificial Sequence
  Description of Artificial Sequence: Synthetic polynucleotide
gygttggggaagggatttttyggaggtayggggtagygtgygggttgyggtagygatttygattygggttttygggttttgtygggttgagtttgygttygtttygtygtygttaagtttttttaattttgttygttgygttyggatygygygttaggtttgggggygtagtaggggttgggggygtaygttgygtattyggggac

SEQ ID NO: 4421 - DNA, 201 bp, Artificial Sequence
  Description of Artificial Sequence: Synthetic polynucleotide
gtttyggtttygggygtygattaggtttttttggttttygtygygygttttttaatttgttgttgtygtygtygygttttttaggttttgttagttattygygttttgagttyggggttagatttttatggaagygtygygatgttygtttttyggttgttggatttttagaagaygaaataygygaggtgagyggyggtc

SEQ ID NO: 4422 - DNA, 203 bp, Artificial Sequence
  Description of Artificial Sequence: Synthetic polynucleotide
tgggattttttttttaaaaaygtaggygttttttygggtygtagtygtagtygggagattgagggttagggygyggtygyggggttttttgggtyggggygyggtttaygttttaggtttttgyggttttgattagaagtygttgygtttttggtygttttttattygtttygttttygtaattttaggtttagggttatagc

SEQ ID NO: 4423 - DNA, 216 bp, Artificial Sequence
  Description of Artificial Sequence: Synthetic polynucleotide
taggggagaygaatygattggttgttyggtygtyggaayggtaggtttygtygtttttttygtttttygtattttyggttyggtttttttttattatygygtttygttttaattygtagttagtattttttttttatttttttttygttttygttgttatttttttttttggatgttggaagygtagttggtattttygtttttttaattttttaa

SEQ ID NO: 4424 - DNA, 335 bp, Artificial Sequence
  Description of Artificial Sequence: Synthetic polynucleotide
gtttattygttttttaggtgattyggygttttygtygygttygttggaagtttgtaaatttttttygggggtttygtygttaygttgggaagttggggaygyggggggaggtttttggttygtygttttygttgtygtttgatygtatttttggagggtttygtattttgttaggtttttggaggtaaatatatattttygatttataattggttttygygttaggggattygygygtttttatataygtaygtaygtygggyggattyggygtyggttttaygttagtatttttttaggygygyggygyggyggttatygagygtttyggtatt

SEQ ID NO: 4425 - DNA, 230 bp, Artificial Sequence
  Description of Artificial Sequence: Synthetic polynucleotide
tygggygttgatagaygattttttttatttgttagttttttygtttgttagtagagttgttggtaagtgagagaaaatagaggggygygaaggtaggygyggttagggagtgagyggggygttgggygyggggyggagtygggtgygyggygttygggttaggttttatygttygygtyggttttygttttgtttagtygtygtttttttttttttttttattttttttt

SEQ ID NO: 4426 - DNA, 224 bp, Artificial Sequence
  Description of Artificial Sequence: Synthetic polynucleotide
agygtagttatttgaaggtttttatggttttyggygtttgygtttgaagttygtttttaggttttggggggtatttgtagaaaatttttagtagyggttygttaattagattttagggtgtayggggggtggygtyggtaattatggtaatttttaaaataaaataatataaaataaagtaattaaygtttattaattattattttattttattttttgtattg

SEQ ID NO: 4427 - DNA, 211 bp, Artificial Sequence
  Description of Artificial Sequence: Synthetic polynucleotide
gggataygtagggggataygtagggattgttygygygaatggtttygaaygtatgygttttattttatattttatagtygttatgaygatygggaggttygttygttaayggttagttaayggttgyggggataagttygttgaggttgttaggygagttaggtttttttggatttygtttgattyggatgggttgtgtttgaaattgatt

SEQ ID NO: 4428 - DNA, 205 bp, Artificial Sequence
  Description of Artificial Sequence: Synthetic polynucleotide
ggyggtgttaggtyggggyggggggtttttttatttagtayggggtattaggtygggatgggatttttttttagaaagtygattggatgttaggagaggygtayggttgggggttttttttttttttttttttttttttttygyggttgaattaaattagaattgttatttagggtttgtgagttagaagggatyggattatayg

SEQ ID NO: 4429 - DNA, 398 bp, Artificial Sequence
  Description of Artificial Sequence: Synthetic polynucleotide
ggygygggtttyggygygtttagtagttyggttagygttagygygttygttagtaggttgagaayggttagygtttttagygtggtygtttgttttagtygtagygtgtagtygyggaatagygtttttagttttgggtaagygaatttttygtygtaygttyggagttygygtyggyggtttgtttyggtygttygttyggygttttygggttygttygygtygttttygtygtygttttygtygygyggygttttygttattttagygttatgtagyggtygyggtygygggygygtttttygtyggttyggggygtyggggygygggyggyggygtyggggygggygggyggygggyggygaggygtyggggygyggggygyggggygggyggag

SEQ ID NO: 4430 - DNA, 290 bp, Artificial Sequence
  Description of Artificial Sequence: Synthetic polynucleotide
tatygygtygyggtttygtaygggatgyggyggtyggygttgtgttygygggtygggtagttyggttyggtygyggygttgygggattygygygtaattygtgggggygyggygygggygataygtgygggtygttaggagggggagggggaygygygtygtygggttygttattttgtattyggggtygttggtyggtyggggtatttttaygttygtttygttggygagattggagggattygggatatygtaaagtattttttttagtgtttgggagygttygttgt

SEQ ID NO: 4431 - DNA, 307 bp, Artificial Sequence
  Description of Artificial Sequence: Synthetic polynucleotide
ttatygtagtyggtttyggtyggatttaaatagttttttttttattttygggatatttattttaygtatttattattttttagtttttagatgtttygtygttttttttatggattttttagtatttgtaggttataggataatagaagttatagtagagttatygaggaattttaggaayggaggagatggaatagtggagaygygaattaggattagagttyggaagttaggagataaaggtttygttatattgaagaggtygtttttttttttgtagttgygtatttgattggatagttttayg

SEQ ID NO: 4432 - DNA, 212 bp, Artificial Sequence
  Description of Artificial Sequence: Synthetic polynucleotide
gggggtggttgtgggttygaagtggaggaygagtatggtttgggagataaggaatygttttgagatagagaaggttttygggagyggatagagagtgggygaaatyggtgygtagtaatygyggygttagttttagygyggtttttggggygtagttttatttygttttagtagttgyggagttttttgaygagttttygtttggtagtatt

SEQ ID NO: 4433 - DNA, 375 bp, Artificial Sequence
  Description of Artificial Sequence: Synthetic polynucleotide
tagggygttttygtttggattataggagaaagtttgggaggtaggtttaattttttaatttggyggggaattttttttttttttatatagtttgtagygygggggyggyggggtgatagttttygtgtatgaattagttattttttaggtttygtttyggygggggtyggtyggaygttygtttygtataaagygggtattygggtygtttggagtagaaagtygygtattttttttygttaggygttttttyggaygttttgtttagygggtygttygattttttgtattatggatttygttygttttttggggttgtygattttgttgttttttttgayggaggttgtattgggygatgttgtttaggagtta

SEQ ID NO: 4434 - DNA, 201 bp, Artificial Sequence
  Description of Artificial Sequence: Synthetic polynucleotide
ggyggtatggagygtagtggttgggttyggtagattttttttttagygttgttgttgggggygaygttgagggygygygyggyggttggttattattttygtttttygttttttttttttttgtgtatttattayggggagttggaaggggatggggagtagggygaggtgtttatttttttgtatattgygggtaatttt

SEQ ID NO: 4435 - DNA, 356 bp, Artificial Sequence
  Description of Artificial Sequence: Synthetic polynucleotide
gggyggggyggygygygggggygggggagyggtygggataygtgtggyggyggygggggggaygyggygttyggggttttaagaaggtgtggagyggggygggygtttttttaggtttggtygaggggygtygygtagaggyggyggyggygtayggaggyggtagaygaygygttttyggygttygtagtttyggtttygygttttygyggtttaaagtaattttgggagtygtygtttttygyggaatttttyggygggggttygtttttaggttygttttygagttygtttygttttygttygtttttttttygtttttttttygygtggttttttygtttyggygtttttaa

SEQ ID NO: 4436 - DNA, 265 bp, Artificial Sequence
  Description of Artificial Sequence: Synthetic polynucleotide
atttttaggtattattygagtttgttaattttattttygtttaattttattttaaaattttttatagatgaggttttgtygttgtygygaggggtygggyggtygyggygggagggatagggggtttgggtgggaagggagygygagggtttttagyggttygyggtttygggyggatttttagaaygagtgygggtygttyggattggtagattgygagtttygaggggygygggaygtagtyggtttagataaagaaatyggc

SEQ ID NO: 4437 - DNA, 697 bp, Artificial Sequence
  Description of Artificial Sequence: Synthetic polynucleotide
gyggggaggyggygggggygggagygggygaggggtygyggtyggtyggygttygggtttygattttygggtyggttaggggygygtygagtagtaggtygtgygttaggyggaaatgttttagtaggttttygygtatygggtygttyggggggtagtaggggtaggyggyggygggtaggtygagygygtygggyggtggygtagyggggtaygagtattttttgtgygttaggtaggtttygaggttgtggaagtttaygyggtaggtygtgtattygtggtagtyggttagygtyggtgtyggggtttyggggagygggygtygyggttttttgtttaggtygatggggtygtyggtygyggggtygggygagygygtaggggygaggtyggggtygttttygttttygttttygggtygyggygattygggygygggggygtggtygggyggyggggggggyggggygtyggtygygtgtagttygtagagtttgyggygtttgygygtgygtataggygyggygggagagggggtygggggygyggtyggtttagggggtttygggggygyggtyggtyggygyggyggygggtygtggygygaggygtagtagtatygtttgtgtayggtgtaggtttygtggyggttgaagyggatgttgtaggtttygtatagygtgyggttggggtc

SEQ ID NO: 4438 - DNA, 226 bp, Artificial Sequence
  Description of Artificial Sequence: Synthetic polynucleotide
gtagaggygygtagaaaaygygygggtggygygygyggttatttagtgggtttygttygygtygtyggygtygtygtygtygtygtaygtgygtygtygtgagygygaagggygttyggattygygttttgttygttygtttgttygtyggggttattgtggatttttaggtaatagttaagtgagaagttttttttattatygaaaggtgtttgygtttttttta

SEQ ID NO: 4439 - DNA, 201 bp, Artificial Sequence
  Description of Artificial Sequence: Synthetic polynucleotide
tttagggaggatgggggtygygggggaagtygggygtttyggggttttygatatttatattttygtayggygtaygttttgtttygagtttgygtttttygagttagtayggygagtttgggattttygtgttttttttttgtggttttygagaaaygtyggagtttygtgttttgttgggggttggggggatggagaaaa

SEQ ID NO: 4440 - DNA, 201 bp, Artificial Sequence
  Description of Artificial Sequence: Synthetic polynucleotide
tttggagatgtgattttttaaaagtttagtyggygaatgggagattgaagggtgaygggaagggggtaggygygttyggygttttgattgggygtgyggyggtaggattttaaagygttttgtttyggatygtttgttttgggtgatttttyggatttgttttggtggaattyggatttgtttygtygagatgaygaggta

SEQ ID NO: 4441 - DNA, 215 bp, Artificial Sequence
  Description of Artificial Sequence: Synthetic polynucleotide
agaggaggaaggaaggaggaaagaggaagaygggyggtyggaggygyggggttgygyggygtyggtyggygyggygttggaaggygtyggygttaatttygygaggtaggygayggagggggagyggygttaatatataagagtattgtattaygttaatttttttttagaatagtatgygttagtagtatatttaygttttgattgaaggataa

SEQ ID NO: 4442 - DNA, 252 bp, Artificial Sequence
  Description of Artificial Sequence: Synthetic polynucleotide
tygtygttgttygggtttyggggttgggtggaggaaaggggtgttyggaatygatttttatttttygatttttttgttggatattaygtttattttggaygtygtaagagaagttgttaagtttygtaggttttgattyggygtttttygygtttttyggttgttttyggtttttttgtgtttyggtggagtatttgygttyggggttggggttggaggaggtagttataygygygtataygtataygttta

SEQ ID NO: 4443 - DNA, 203 bp, Artificial Sequence
  Description of Artificial Sequence: Synthetic polynucleotide
ggygggggagtgagyggagttttttataatgtttyggtgyggtgtagtygyggatggatgttgygggaaggggttgttatttgttgtttttgttagyggygygyggatttgttygygtttttgtagtygtygtygtygtygtygttagttygttyggtttttgtagyggygtygtttgygtttttttygyggtygtyggagyg

SEQ ID NO: 4444 - DNA, 201 bp, Artificial Sequence
  Description of Artificial Sequence: Synthetic polynucleotide
ggtyggttttatgyggggygtttygtygygtygygttygygtttttgtatyggggtgyggggtttagttygaygygtattyggygtttygygygttttgygggttttttaggtyggtttygggtgggttaggatygyggygttggtaggtyggggttgagttyggtttttygygttggagtttttgygtygggtgtygtyg

SEQ ID NO: 4445 - DNA, 201 bp, Artificial Sequence
  Description of Artificial Sequence: Synthetic polynucleotide
tgaattttagagggttgggttttgatttgagtgtygattygttaatgaggaygggaggataaggttgtygaygtagyggaaggtaggggggaagygattygaggatttgaygattatttttaggtaggggttttttaagtaggtayggaaattaattttattaaatygyggagtggggattgggttygggyggtgtttagt

SEQ ID NO: 4446 - DNA, 201 bp, Artificial Sequence
  Description of Artificial Sequence: Synthetic polynucleotide
ataattttyggaaggagggggttaaatgyggtagyggygggtttgaaaagggttaggagygtygtaggaattggggtgtataggttttygygtgtttagygtttygttttttttygttttaggtttgttaggggygygygtggygygggtagagtttggtgggtgggttggygyggatagaagttttgtyggggagygggg

SEQ ID NO: 4447 - DNA, 213 bp, Artificial Sequence
  Description of Artificial Sequence: Synthetic polynucleotide
tygatygygttttttgygttygttygygttttttttgtygtttygyggtttaggggtgtgagttattyggygatagtttygttaggttatttyggggygygtaggtggataygtataggaagatygttatttttaagatttttatattgtttatygtggggygaaattttataattttttgtataaaatgtataaataatattaaatgagttg

SEQ ID NO: 4448 - DNA, 385 bp, Artificial Sequence
  Description of Artificial Sequence: Synthetic polynucleotide
tttgtaygtatgagtaggtatttaatattttttggtttagttatatgtgatatgaggttatttaygttttttttaattaatttttatgataattatgtgygttatggagaaaattaatggaggaaaaattatagagttattygaaatagttgygttgtttattattyggtgtttgagtttgttttttttgtaattagattatatgtgaggtagttttagttaattgtttgtgttatttatyggggaattttagttttatttgtgaatatttaggttttttygtygtaggatagatgttgggtgaggtttgttttttaygtaaatatttgttttgttgtttygagttagttaygagagttagtyggtttagataagtaggggatga

SEQ ID NO: 4449 - DNA, 278 bp, Artificial Sequence
  Description of Artificial Sequence: Synthetic polynucleotide
agggtattaagaaaagaggggtatgygagtttggaagttggagagagttyggggttttttagagygggtgggaygtygygtttttaggatttygygttaygygtattttttttatttygatatttattgttatttttatagyggagygaggggtttygtygagggygagygtatttygtgyggttgagatgttyggaaygttttttygygtttyggtttttttagaaggggttatagtyggttygygagttttygggygggggttgagtygtagtgtt

SEQ ID NO: 4450 - DNA, 248 bp, Artificial Sequence
  Description of Artificial Sequence: Synthetic polynucleotide
tyggygtaggygagtttggtttaagggttyggatygggtttgggaaaagtttgtttttygagggggagagygagyggtygygttgaggygttygygttgygygggggygtttttygttgtttgtagggagygyggygyggaygyggygggyggttyggttatttggaaygggygttygttttggttttyggggttgtttttgtygtttygggaagtygtygatgggttttatygttggyggttygygt

SEQ ID NO: 4451 - DNA, 216 bp, Artificial Sequence
  Description of Artificial Sequence: Synthetic polynucleotide
tygtygtygttggtgggtggyggyggttygggtgttttttggattgygtagtaaagaggtattttgggagatggggttaaggttttagggggtgttattygygaayggtttattygttagattaggggggttttttggttgtgygtttggttagaattggttttgaygatggaagtttttggaattaaagygttgtttttttttttttgtgttata

SEQ ID NO: 4452 - DNA, 201 bp, Artificial Sequence
  Description of Artificial Sequence: Synthetic polynucleotide
gtatttattagggygtttygtaaaaaatttygttttygtttgtttttgggaattataggtaagttttgggttttygaggtgtagttttaggtagagtttygtgttgggaggtgggaagggggtttgattttggggatttaggtagtttggggatagttttattaggggtyggtgtttagaattggtgagggaggtatttta

SEQ ID NO: 4453 - DNA, 208 bp, Artificial Sequence
  Description of Artificial Sequence: Synthetic polynucleotide
ygagayggataggaatygaggagatttttttgtagygttttttatttttyggatagaaattttgtagattaygtttatttttttatttygtgtatygttygtggttygtgggtagtagttgtttttttgggatttttttygtttgttygygagttttygtayggtygygtttttgttgttggggtygttygttggttttggttgttyg

SEQ ID NO: 4454 - DNA, 201 bp, Artificial Sequence
  Description of Artificial Sequence: Synthetic polynucleotide
atttggtttaatygtygttagttttaagttayggtttyggttttttttttttaattgtgtgggatttygtygtttggtttyggtygggyggaggggtgaygttagtygtttatatagtgttttttggtygttggagttygggaaatttgtgygttygaatttggtttygttaagaagttgggtaaggattygggtttttga

SEQ ID NO: 4455 - DNA, 364 bp, Artificial Sequence
  Description of Artificial Sequence: Synthetic polynucleotide
ggyggttagtagggttttygttttyggggagaagtgtttaygatttaagggttgtttgttttaggaattttttaaagaattatagatattgagagtattyggggtttggtaggaagtgtagtgtattttttagttttagggtaattaggatagtatgaattttttattttgtggtagaataaayggttagygtttygatgtggygygttygatttttttttatagagtttaaaagttaygtttaattaaattgtagygttttygttttagttgggtatyggtttggaagyggtttggaattagattggattygaggaggtaagatttyggtagygygaggttaattataggttttattygyggt

SEQ ID NO: 4456 - DNA, 213 bp, Artificial Sequence
  Description of Artificial Sequence: Synthetic polynucleotide
ttttttaggtttttggygttttyggygyggttgttttygyggttgttttygtttatggtyggyggyggtgygtagygyggygttgttygtygtgttgagygttgattygygygttygttgttgttyggttttyggyggygagaatggaaagttgtygttttygttaatttygaggagagatagaagattttatatgttggggagaggttgggc

SEQ ID NO: 4457 - DNA, 201 bp, Artificial Sequence
  Description of Artificial Sequence: Synthetic polynucleotide
ggtttgtttttggaagaatyggttttttagtttttygtygtygtagttgtgatataagtaagtgtagtygygttgttyggggttygttagggtttttygygttygttttttatygtggttygyggyggtygygttttygtttygtttygttyggtygtttygtyggtttttgtttttagttgggttgtygtgaygaggaga

SEQ ID NO: 4458 - DNA, 201 bp, Artificial Sequence
  Description of Artificial Sequence: Synthetic polynucleotide
tttatttatygygtttaattattttgtatagttggtttttttttttttttaagtatagtttaagaaggtaaagggagataggaaagggtggtagtttgaygatttagygatgtattttagaatygtttttatttttttagtgtgaagttttttgggagaggtgagttaaatyggayggtyggtttttgtagtygtttagag

SEQ ID NO: 4459 - DNA, 296 bp, Artificial Sequence
  Description of Artificial Sequence: Synthetic polynucleotide
tattagtygggttggttgggyggttygggagttygagyggtggyggagyggygagtagygagtagygtttgygggagyggtyggtyggtygggttttygygtttygtaygttygtaygtttagyggggttygtattgagtatgggygyggyggtygtgygttggtatttgtgygtgttgttggttttgggtataygygggyggttggtygggggtagygggtttttaggtaagttttygatygaggtggggggyggygggygyggggggttygggyggtygaggygyggtttygga

SEQ ID NO: 4460 - DNA, 201 bp, Artificial Sequence
  Description of Artificial Sequence: Synthetic polynucleotide
gtttttagtaggtttttattttatttttttygtygttygtygagttgggttttattaagggtatgygaagtygtaaggaaggtaagatgtagygggygtygygygatagtgaygygggtygggagggttaggaattatagtygyggttttaggaygaatttygggtttagtagtttygggygtaggagtygttaggtaggg

SEQ ID NO: 4461 - DNA, 297 bp, Artificial Sequence
  Description of Artificial Sequence: Synthetic polynucleotide
tgtattttygatayggagttggtgtttygggaaggttgttttttgaagttttttttgttttgttgtggttttgttttttygyggatttttttttygtgtygaggtttagtttttggttttaaggaataaattygttggtttgaaagggagttayggtagaagtttaggggtagagyggygggagygygygattygygyggttggagtttygggggtatttggagagtagygygtttaagyggggttattggtttygyggttgygtttttttttttttygygtygygttttttttttc

SEQ ID NO: 4462 - DNA, 268 bp, Artificial Sequence
  Description of Artificial Sequence: Synthetic polynucleotide
gtgtagyggggtttggygtyggtttttttttattaygygttyggtttagggtygtttagtygtygttatygtygtygttttttgggtygatggagtyggygyggaaggttygygygttttgygtygtygtygtttagtgtygtygttagtatttttttygttttttygtttttygggtttatttygygggggyggygttattttttygttgtttaggttygggtatygygggygtttygygggyggtagtygtttttttygagygyga

SEQ ID NO: 4463 - DNA, 201 bp, Artificial Sequence
  Description of Artificial Sequence: Synthetic polynucleotide
aaggagygggattgttttttyggttggaygatagygtyggggattygtagygtgygygggtyggaattaaaaaagtagttygggagygygagggttgagyggggtaagtatgggttgtttttygtagttttttttttgttygaggttygggttggtygtttgtttgtttatgattgtttagttgttttttygattgtttag

SEQ ID NO: 4464 - DNA, 201 bp, Artificial Sequence
  Description of Artificial Sequence: Synthetic polynucleotide
ttaattygttygtagttgttygttttggattaagtygtttygyggttygtgttaggtagtgggttygtttttttttttttttttttttttaaattgggaygtgygaaggygtagttgttttttyggggttttttttattttttatatattttgttttygttttttgttttttaggttygtggyggagagatgttgatygyg

SEQ ID NO: 4465 - DNA, 201 bp, Artificial Sequence
  Description of Artificial Sequence: Synthetic polynucleotide
gttttggagtttagtagagttggagygtatattttygttttttttttttygttttygagtattaggyggatatattygtatttygaatgttttagtgggygtagagtttattagaaatggatagtyggatttttyggygtttgttgggggtatygttgttaggtgtttggggttygttttttyggttttgttygtataggg

SEQ ID NO: 4466 - DNA, 201 bp, Artificial Sequence
  Description of Artificial Sequence: Synthetic polynucleotide
ggtygtygggygttgtagtgggaygygygyggttgtgagtttgygggatatgtttttygygtyggttttttgttggyggttatgaagaggtagaaygtgyggattttgttttttatygtttgtatttttatttatttgttggtgggygtygtygtgttygaygttttygagtyggattaygagatgygygaggaggagaaa

SEQ ID NO: 4467 - DNA, 302 bp, Artificial Sequence
  Description of Artificial Sequence: Synthetic polynucleotide
ygttyggaygtyggagggtttygattttygygyggtttatgygttygygttygtttygttgtttygygaggttygygggatttttttygtygtygtygtygygttygtygttttyggaggagygggttggtygatygttatygygtygtttttyggtygttttygaagtygttttatygyggtttttgtygttttggggtygygtttygttttygygttttgggggttgagtygagtaaatttygygtatyggtygaygttyggyggggatttygttgygtattygygygttygggtgggyg

SEQ ID NO: 4468 - DNA, 201 bp, Artificial Sequence
  Description of Artificial Sequence: Synthetic polynucleotide
tttttttggggttttttatgttaggtttygyggttgtgttygtaagygtagatggtttygggattygggttattttgaygtygtagatttagtaygttgyggatygggtaygttggatttygggataagtgyggagggtygggggttggaagggattygagagtagagttygygtttttattttayggaygyggttatyga

SEQ ID NO: 4469 - DNA, 220 bp, Artificial Sequence
  Description of Artificial Sequence: Synthetic polynucleotide
yggttygtygtttygtatttgygttygtagtygygygttygttygttygtygtygttaggtttygyggttygggygtttatgtygygttttgygttygtygtygtygtygttgagagtygyggagygtagttygagggagygtygggygggggagtygagygatygggggyggggyggggggygagagttggttyggggttyggtagtygttygtttygc

SEQ ID NO: 4470 - DNA, 347 bp, Artificial Sequence
  Description of Artificial Sequence: Synthetic polynucleotide
ggyggtatatyggtagggyggtyggttttgttgggttttttgggygtyggtttygggggttygggyggtttttttyggttttyggtttggattygygaaygygygggygygaggggttgggaygygggagttttttgagtgyggagygyggagttttggtgtttyggygtattgtagttatattttygggtygygygttttygtygttttttattygygtygtagggtttttttttttgaggygtygttygygtatygtygggggggagggggtagygttaataaattggggagttyggttygtygygtttaggttttygtttggagtygtygtattygggayggtg

SEQ ID NO: 4471 - DNA, 201 bp, Artificial Sequence
  Description of Artificial Sequence: Synthetic polynucleotide
ygtgtaygtttygtttttattggtttygtttygtgattaygttttygtaattttgatagattttattttygaggattttttttaggagtatagtgatttygtttttatagggttygtttygttatattgattttttygtgtygttygygggattttatttttgttygtttgtttyggtgtttatggggaagtttggtgtta

SEQ ID NO: 4472 - DNA, 201 bp, Artificial Sequence
  Description of Artificial Sequence: Synthetic polynucleotide
tagattygggggaattaggaaaygygttyggygattttygggtagtagtatygggttaggtttgttttyggaatygttgaygttattygtygtttttttygtttgggtttttygygggtygtaggggtggaagttygatttgggttagggttyggatttttttttttyggtttttgygtygtygttttyggtgttaggayg

SEQ ID NO: 4473 - DNA, 225 bp, Artificial Sequence
  Description of Artificial Sequence: Synthetic polynucleotide
ttgtagtttgggtaatygagygagattttatttaaaaaaaaaaaaaaaaaaaaaaattaaggttgaattygggttttygtaygttygtatttatttgygyggttattaygygttgtttttyggygattaggttgtattttttgtattggtagtygygttatatgtagaagygtttgtggtttttgagyggygaggygtagtygtggtttttgtagygtgygtatt

SEQ ID NO: 4474 - DNA, 318 bp, Artificial Sequence
  Description of Artificial Sequence: Synthetic polynucleotide
ggttttggtagagygygtagygagtyggggatgaggttttttaagttttygttggtttgttgtyggygtagygttatttgygtagttatgattygttgtygttygatgatgaggatgtatttttygtaggtgtagtttttgaagyggtagtaaygtttgtggtttttgagttaggataggaygttatggttgyggtagygygygtatttgggygtgygttgtaggggygttygtggyggttgygatatygggtygtttatgtataggtagggggagtygtagtygtttatgtttygggttttygaatgagttggtagt

SEQ ID NO: 4475 - DNA, 265 bp, Artificial Sequence
  Description of Artificial Sequence: Synthetic polynucleotide
gtggagggaaggagggaggaagttagttaagtttttagygatttagtttagtatatttygaattttgtaaagttttgttyggttttttgtagtttygggygttttattttgttgaggtygttttyggttttttttgatttaggttgggygggaaaggtygggtygttttygtttggtttagatygttggtttattyggygggygygygtagttgtatttagygtagygttattggttttagtttgtagattgygttttttttttt

SEQ ID NO: 4476 - DNA, 259 bp, Artificial Sequence
  Description of Artificial Sequence: Synthetic polynucleotide
gggtygyggggtygggggyggtygtygtttggttgggggatyggggtygtgttgggygtygyggagtygggatagtagtagtggyggyggggatagygtygyggttggggtttygygttttttggagygttttttgtttagataygaygatttygttyggaggtatatyggttttggggataaagattagagagagatgttgtagattttggggttggyggtaaggatttttattyggtttttygyggtttttttttyg

SEQ ID NO: 4477 - DNA, 201 bp, Artificial Sequence
  Description of Artificial Sequence: Synthetic polynucleotide
gagygtagattaggtttttagggygygggagtttgttgtttttttttgtaggggtygttttyggaygttttattygtygttaygtggtttygggatgtgygggttgyggtagagagtgggtagtaatgtttttggttttgygttttygttttagtygyggggatttygaggygagtygttaattggtatyggtgtttygtt

SEQ ID NO: 4478 - DNA, 323 bp, Artificial Sequence
  Description of Artificial Sequence: Synthetic polynucleotide
aygygtttgtyggggaagggttygtyggygtygygttttygaggtttttgyggygaatygygttaygygygatttttggtygggggygggaggyggyggyggyggtaggagaagtttaaggttygagyggttygtagtttttaygtttgtatttttttattttygttagttygatggttygtttygyggygtgtattggagtaagtaggtttygtttygagygygygygttttgggaagtgttgtaagtttggagatttggagtgagtttygggygttgttggttygattgttygyggtgttttttyggtgaggtygyggggg

SEQ ID NO: 4479 - DNA, 201 bp, Artificial Sequence
  Description of Artificial Sequence: Synthetic polynucleotide
tagyggyggyggtygagtttagttygtagggtgggaattgagataggygttttaygttgtttatygyggttgtygyggtygtygtygtygtygtygttayggtygtygttttttgtattttgtyggggtgagayggttgttgaggttgygattgttggggyggttgttgygggggttgtgaygggaggtgyggaggyggtt

SEQ ID NO: 4480 - DNA, 355 bp, Artificial Sequence
  Description of Artificial Sequence: Synthetic polynucleotide
tagygtygtatagaagtygtagagtagyggygtgaagtygyggttyggygygtatygggtygtygygaagtatagtgttattattttgttttgtagygtygtttyggtttttatygtygygtttttataggttattaggtgtygttygtttagaatgttaattatggygtagataygtagttatttgagattygaggatatttgtaggaggatgattatttgyggggaggyggyggygagygtygyggtgtttygtttttgttygtattatygggygttggattttttaagatttgttttagatgygtttatattttggttaggtttygtttgtggttggagtaattgtgttygc

SEQ ID NO: 4481 - DNA, 201 bp, Artificial Sequence
  Description of Artificial Sequence: Synthetic polynucleotide
tgtatttgygtygtttttggtttttttaggaatgygttgaagtttgtaattagttttgtgaagttattgagtgtayggttgagtgaaatttttaaagttygaggaaaaygggtyggttgaatgggagttagtatggggtttttttttaagttttygygttgttaaattttagtagagttttttataatygtttygygyggg

SEQ ID NO: 4482 - DNA, 290 bp, Artificial Sequence
  Description of Artificial Sequence: Synthetic polynucleotide
ttgttatgygyggtagttygygtyggggtyggtattagtagygttygggyggatgtagygagtttayggaggggtatgtttttaygtattaagtataatygttttaggaatgattyggtgatatyggtygatgattttttttatagtttgtyggtgagyggyggyggaggtaaggtttyggyggygygygygatttyggyggyggttttttatttggtgttyggygaggygttgygtaaggygttygaygatgggttyggtagtttgggttatttgttttataaggtgtt

SEQ ID NO: 4483 - DNA, 201 bp, Artificial Sequence
  Description of Artificial Sequence: Synthetic polynucleotide
ttattyggyggaaattygygagtyggttttttygygtttaagaagtttattttttaagtttttttattatgattttgaatgyggataattggggttaaaygaggaaggatatagatttaaaagttagatttaggttttagygygtttttgggttttaatttgggagattygtatttagttyggyggaagttatagttttta

SEQ ID NO: 4484 - DNA, 201 bp, Artificial Sequence
  Description of Artificial Sequence: Synthetic polynucleotide
ttttagygtttaggtygattgygttttgatygggagttattgygtttagygtagttygagggygttgagttyggaggatgyggygyggggygggggtttygggagtaatagagattgggattygagggttyggttygygttgttgtttaygtagygtttttattttggaaagagtgtttttygygyggygggtyggttttt

SEQ ID NO: 4485 - DNA, 288 bp, Artificial Sequence
  Description of Artificial Sequence: Synthetic polynucleotide
gtttaggagaattygtaagttagyggygtttgygttygagttgtagtygttttttgtygtttaygygagttygagagyggttttyggagttygggttagygtygagttgtaggygygygtttaatygttttgttgggtttaygyggtttgagaggtyggagygtttaattgttggtaygygagtaayggtttagttaagtttattyggtttgagaggtyggaggttgygagtgtygttgttgaaggttgtggtggatygggttggatygyggattttgagttatatyg

SEQ ID NO: 4486 - DNA, 212 bp, Artificial Sequence
  Description of Artificial Sequence: Synthetic polynucleotide
ttttgygtggtagatatttagggataggttaattattatttttaattattygtttttgagaggtttaggatttgtttttatttgatggatagtggtgtayggattaaagaygaygtaggataggtaatttttttttttaatttttygggattagggtagttttgaagatttttagaggtagttaagtagttttttttygtagyggggagtga

SEQ ID NO: 4487 - DNA, 201 bp, Artificial Sequence
  Description of Artificial Sequence: Synthetic polynucleotide
gaggtagggaggygggggtgygggaggtttygyggttgygygggygygtgttggtggtttyggyggaggtttagtttyggttygygttygyggygttttygttgyggttygagyggtttggttgygggatttgtgygtayggatggygyggtygtttyggtagtattygggggtttgggygtygttgtttttgttgttatt

SEQ ID NO: 4488 - DNA, 246 bp, Artificial Sequence
  Description of Artificial Sequence: Synthetic polynucleotide
ygtttagtttygygtaygtttttttgygagttyggtygtttagygttttttttygttygagtygtygtttgygtttyggggtagtygttttgtttttagygygatgtggtttygtttggttttttgttgttggggtttggygttygtttygggttgggygattttttagtagatgttttygtygygtaattttagttttygtttttttttygagatygygttyggggttttygggagtattttygc

SEQ ID NO: 4489 - DNA, 201 bp, Artificial Sequence
  Description of Artificial Sequence: Synthetic polynucleotide
ttttttagggatggagtagttaygtttttygagtgtgtttattttatygatggagtaaagtgaggtttttagttygttyggatgtttttgygtygttygyggggtagttttygtatagataygttygtaagttttygattygttygttattygygtttagatattygygagtttttggggtygtagggayggtgtagygtt

SEQ ID NO: 4490 - DNA, 201 bp, Artificial Sequence
  Description of Artificial Sequence: Synthetic polynucleotide
attttagatatataggtagtygggattttygttyggtgygtttgtttatttatttttttgygttaggttgggaygygtttygtttgtaaaaggtttaaaygtatttttygtygyggggygggatttaggggtttaggtttyggggtttagaggygggtaattttgttaattttttttagyggyggggaaygtygygtaatc

SEQ ID NO: 4491 - DNA, 358 bp, Artificial Sequence
  Description of Artificial Sequence: Synthetic polynucleotide
ttaaygggttyggtgtatygttatygyggtttyggtttygttygagttyggttgagtttttaggtygggtttygggtttygggygttygyggggtaggaygtttttygtygaggygtaggggtagttatattgyggggygtttgggygayggygttaaagttagggttataagggtaygggataagyggggyggggggagtaggagattaggatagaggtyggygttygtygygggygtttttaygtygygggtatygttygttyggttttagygttyggggygtaaagtaagggygtaaattttgttygaggyggygayggttgyggtyggggtttattttgaagtygttaggtgtt

SEQ ID NO: 4492 - DNA, 201 bp, Artificial Sequence
  Description of Artificial Sequence: Synthetic polynucleotide
gttgygtgttygtygtttatagtygtagttaaagagaygtaggyggttttaygyggtttggtttatygtygtttgtagtgttygyggygyggggygtttygaggttgggtttatygtttttttygygtttttgaagatttttygggttttttygaaggagtattgtttttttttgtattttttttttagggagttyggtyg

SEQ ID NO: 4493 - DNA, 201 bp, Artificial Sequence
  Description of Artificial Sequence: Synthetic polynucleotide
ygttttttygttttyggttygagyggtygttatygygggygggyggygttgygttygggtgyggtttttygtyggyggyggyggygyggtygagaggtgygggtttygygygggygggaygyggggygttgttygtaggagygattaggtgggygtygggtygatygtagtygtygtygygttttttttygygtttygggt

SEQ ID NO: 4494 - DNA, 201 bp, Artificial Sequence
  Description of Artificial Sequence: Synthetic polynucleotide
gtygaggtttagagtyggtttttgttygtaggyggygaayggtattttgtttygttaggtttttgygggtgtgattygtgattygtagattttttygggygtttttggtttatgaygygggggttgttygttttaygtaggyggtttygggatgttttttygtttagattttagyggtagaaatagtttyggatttttttt

SEQ ID NO: 4495 - DNA, 277 bp, Artificial Sequence
  Description of Artificial Sequence: Synthetic polynucleotide
aggggagtaaaayggagttttygggggtaygtaggtttygtttttgggtgttggttttgtttttggtttttttagtyggtgtagtgattyggaatagygyggtygttttttygaygttygyggttttttattgygtygaggygagygttayggttaaagtttaagtttyggygttygttgygtttgtyggagttttgtttgttygagtaggtagyggggtttaggtayggyggygaygtygaagggttagtyggtagatagggttgggtttttgygg

SEQ ID NO: 4496 - DNA, 201 bp, Artificial Sequence
  Description of Artificial Sequence: Synthetic polynucleotide
tattttgtttttagttygattttttttgygttyggagtttgggttyggygygtaggagattgygtgtattttggygttttygatttttgttagggygtayggggattttagagyggattttttaygagttttaataggaggttagggagtygggatattagagataaattttttygaagttttttttyggttttattgatt

SEQ ID NO: 4497 - DNA, 247 bp, Artificial Sequence
  Description of Artificial Sequence: Synthetic polynucleotide
gtygttatagtygtttygagttygygygtagttttagttgttaygyggattttttgtttagattgygttgttgaagtyggygtttygttttataygggtygygttaattyggtygttgtgtayggtygggtgygaaattttttygygggtttayggggttgtygaggyggggtygtagyggtygtyggggttggggttggtttyggtttgagatagttttatggaaggttaggttttyggtttttgc

SEQ ID NO: 4498 - DNA, 201 bp, Artificial Sequence
  Description of Artificial Sequence: Synthetic polynucleotide
ygtygtttygygygtttyggttatygtygtgtttttttygggygttagggaaggtggttaggtggtttttgttygtygygttttgygtttygygtygttygttttgygttttgttttgttyggttgygttttttygggttttttygtygttatygggaagygtygttyggttttgagygttgygygggttgygygyggggg

SEQ ID NO: 4499 - DNA, 201 bp, Artificial Sequence
  Description of Artificial Sequence: Synthetic polynucleotide
tttgaagtyggyggtgtttaggagygygtygtttttygygtagggtygtttgygggtataygttagygttttttagttygygtygggygttttygyggaygygygtagttttyggttygttaggttyggttygygtagygtagttygyggttatygygatttatygggygggygggyggtygggygggggygggtttggyg

SEQ ID NO: 4500 - DNA, 201 bp, Artificial Sequence
  Description of Artificial Sequence: Synthetic polynucleotide
taggtttggttttagaatygtygggttaaggagaagaggttgaagaaggaygtyggtyggtagygttgggggtagtattttygtaatatgaagygttttygyggyggttttaagtyggataaggatagygtttaggaggggtaggatagygaygttgaggttttttttttyggtaggyggagggatygyggagttyggggg

SEQ ID NO: 4501 - DNA, 356 bp, Artificial Sequence
  Description of Artificial Sequence: Synthetic polynucleotide
ttgatygtgatgataagaaggttggggaggttaagagaaaagggaagagagagtgtagttgtaaattttttttygggttygagaagtatygtttttttgygtgtttaattggtatttgttattaatatgtttgtttttatttaaatggtttagagtaaggttttgattaaattagtatttttaygttaatatttagtagygtttttggtttttggtagattttttttttagttgttaaagtaaaattatagaagygttttggttttatttaaggtttgttggggttttttgttttttttyggagattygaatagttygtagatgtgyggtatttgtttatgttygtgtttygtgtt

SEQ ID NO: 4502 - DNA, 201 bp, Artificial Sequence
  Description of Artificial Sequence: Synthetic polynucleotide
agtygataygygygatgygygagaaagygyggtgtatygggtygttgtygyggtaaaattgtagtaygtggyggtataygttgtttaygyggtygtataygtagygygttttgtgggygttttagttttygyggyggtataggygygagtagtagtaggtgtagtagttgtggtaggatttgaagtagaggtaggygttga

SEQ ID NO: 4503 - DNA, 281 bp, Artificial Sequence
  Description of Artificial Sequence: Synthetic polynucleotide
gggttttatyggggygtagggttggggaatyggagtttygttygtygattyggagtatygtttaygtagattygtttygggygagggaggggtygggygygtattygyggggagggyggygagyggggattagtygaagtygggagaggggygtttttayggggygggaaattggygygygattttgggggaagtgtaggatggggggataggggygttttygygggggtggatgggggattatagyggggttggyggggtaggggtyggygtaygaggtt

SEQ ID NO: 4504 - DNA, 222 bp, Artificial Sequence
  Description of Artificial Sequence: Synthetic polynucleotide
tatygatttttygtgtagyggtttygtttygtyggattttaattattgttttaaggattgggattataatggtttttttgtgtttattattaaygttatyggttaggtgaggyggttaggygggtygygggtttgggggygggtagagagyggygagggyggggttttaygttygttgtattttttttatatttttagtgggatttggtgtgtgatttgggt

SEQ ID NO: 4505 - DNA, 237 bp, Artificial Sequence
  Description of Artificial Sequence: Synthetic polynucleotide
gyggttyggaggyggttatgattatgtatatgaaggggyggtyggtgygtyggttygtggggtagatggtggtgggygtgaagygtttgttggtttygaygaattygtaaagttgttygtagaygygygggaattygtggygtaggaagaygtygygtagtygtagttygygttggatgtggatgaaggttatttygygygygygtyggttygtttygtygttttgatttaggttyg

SEQ ID NO: 4506 - DNA, 201 bp, Artificial Sequence
  Description of Artificial Sequence: Synthetic polynucleotide
ggtttggaatagagattttagttgatttataaggayggggtttgagatttggggttttttgttatagtggtataatttagtttgtattgattaatatagttttttgtgaatttyggttttaatatttaaattaaggtattyggttgttttattaagttgttataygtttatttaaaagtattgttagattgaggaattagg

SEQ ID NO: 4507 - DNA, 364 bp, Artificial Sequence
  Description of Artificial Sequence: Synthetic polynucleotide
gygttygggttttgtagttttttgttgttgttygygttygggtaygygtgtttygygggttgygtttgtatygattygtatatygtggattgtygygatygygggttgtttagygtgttagattttttttttttggaygtgygtaagttgttggtggtyggtaatygtatttagyggattttygaggatttttttattttttayggygatttggtttatttggattttaggaataattygttgygttygttggaggagggtaygtttagyggttyggttaagttygtgtttttygattttagttataataatttgatttagttgggygtyggygtttttygttyggtygggaggttggtgaagt

SEQ ID NO: 4508 - DNA, 201 bp, Artificial Sequence
  Description of Artificial Sequence: Synthetic polynucleotide
tygggataygttttagggaaatygtttttgggtttggtagttgaatttagaygtygagtgtagttygttyggtgygygyggygttttattgttagatttyggaaattagttgttagggtggggtygygttttggygayggttattyggttatttttgtygttttygttttttttaagagatttttttagygggttaatttt

SEQ ID NO: 4509 - DNA, 201 bp, Artificial Sequence
  Description of Artificial Sequence: Synthetic polynucleotide
gttttagaggggagtyggggtggatttttatggaagggagaygtttgygttagtttaggagtggagttygtgttttatyggttttttaaattgygagtaygaaatttttagaggggagttgagttggtgtttygygtgttttttattttttattttttattygtaggttagatttgygttgtttattttaggagggagygt

SEQ ID NO: 4510 - DNA, 201 bp, Artificial Sequence
  Description of Artificial Sequence: Synthetic polynucleotide
tygttttatygatgyggagygygagttgtttattgttttttattatgtttaggattttggtttgggggygagagaggtgataaagagttgtatgatgygyggggggygygyggtygggtattttyggttttatttgttgtgtttttygyggttyggtttygttygygtttygatttttaggtatyggtagygtyggttttt

SEQ ID NO: 4511 - DNA, 222 bp, Artificial Sequence
  Description of Artificial Sequence: Synthetic polynucleotide
agygtatatatatagatataggtttatatagatagattyggttttaaaaataygtattygtagaggtaaaggttagygtataagtaygtatagatatatygataggyggttttyggatatygygttttttgtygtatttayggtttaygtaagggtttatatayggttttayggaggatagttataaaatatttagatataygttatataygtaygygygta

SEQ ID NO: 4512 - DNA, 201 bp, Artificial Sequence
  Description of Artificial Sequence: Synthetic polynucleotide
gtttatatatattagtgaaayggttaaatggtagtattaggtgttaagtgatygtataggygtgtttttgttagttgtgagtaagataaggtagtttatygtttttagggagtttagtttttatgggggtgtattygtttgttagggttgttgtatttaagtattattaattyggtggygttaataatagattttattgtt

SEQ ID NO: 4513 - DNA, 265 bp, Artificial Sequence
  Description of Artificial Sequence: Synthetic polynucleotide
ggygggygtyggyggggyggttttttagtaagatgtgygyggygtygyggggygttttttatttgtagyggygttygggagtygggyggttgggttaggyggygttttyggggttgttgygygttygygtttagagttgtygttttagggagttygttayggtygygtttygggtaygttyggyggygtttaaygatgatygttttttggyggygttttyggagtttggtttgggaatattgggtygggtttttygtgtgygttt

SEQ ID NO: 4514 - DNA, 242 bp, Artificial Sequence
  Description of Artificial Sequence: Synthetic polynucleotide
gttttygtyggyggygttgtattattattattattatatattgttyggtttagtgtagtgatttygygggtygggttttygtyggygygttgtagggygygggygygtagttygttygygyggtttggattttttttgttyggttgttttggattttataaaaaaaaaaaaaagtttagaaattttygaataaaattaaatattyggaygatttttttyggtgagyggygaagatagttygg

SEQ ID NO: 4515 - DNA, 201 bp, Artificial Sequence
  Description of Artificial Sequence: Synthetic polynucleotide
ttttttttygttttttttttgtttttttttttgttttgtggtttttttttttttttttagagatatttgggagttgtttttaagttttggggygtttygyggggttttgttaagggtgygtgtgagagagggyggyggagtyggygtygggtgttaggggtygagggtgggagygggagttygtggttttgygttttggag

SEQ ID NO: 4516 - DNA, 261 bp, Artificial Sequence
  Description of Artificial Sequence: Synthetic polynucleotide
ygggttgtaygygtaggyggtttattyggggggyggyggyggyggtttggtygggatgttggyggygggyggtggyggygyggggtygggtttgtattaygygttgtaygaggatggttaygaggygtagttggagtygtygtygtygtygtatttgggygtttayggataygtatayggatatgtataygygggyggtttgtaygyggyggyggygtatttgtattygggygygggyggyggyggtttatyggtgggyga

SEQ ID NO: 4517 - DNA, 201 bp, Artificial Sequence
  Description of Artificial Sequence: Synthetic polynucleotide
ggggattygygtaggttagygtgtyggttttttttagtttatygttgtygtygtyggggttgttttaagggagttaagyggagtgggagygggtttgygygtttttgttttgygygtaggggygggggggtttaggayggggygtttttttttatttatatgttgatttaggatttttaagyggttyggtttaggatatyg

SEQ ID NO: 4518 - DNA, 337 bp, Artificial Sequence
  Description of Artificial Sequence: Synthetic polynucleotide
gtaagagyggtgtagtygagtyggygttttagaagtygagaggttatataagtttaygtagagaggygtatyggatayggtaattaggagtaatttataygttttygggygtayggaaattatttgttaggaaatttttaaygttttttttygtttatttttttttattttttttttggygygttttttttttttttagaggtaygtagtggagtttttggagtttygaatttttyggatattgtagaatgyggggtttttygggygygggttyggttaattagagygtygtttgttttttttggttaatggtaggygttatattgttgtttaattt

SEQ ID NO: 4519 - DNA, 201 bp, Artificial Sequence
  Description of Artificial Sequence: Synthetic polynucleotide
aagttttgggtggygygtaaaggygtaggygagggtygtygtatagagtygtttaagttgtggtyggagygttagggygatttttgggaattttttaagyggaatttttygagataagyggtttttgttttttgatattttagtygaggtygagttgaygygtagttatttaattttttttgtttyggggaaataatttta

SEQ ID NO: 4520 - DNA, 201 bp, Artificial Sequence
  Description of Artificial Sequence: Synthetic polynucleotide
atgagtygagagggttgagyggagagtgtggttttyggyggttggaggtaggagaatatgttgygttygttygtygyggygtgagaggttygaggtgggygygtyggggtaggggyggtygygggygtttgttygtttagtgggygttgttyggatttggygaggtggtggtttgtaatattgtgttygtattgtttattg

SEQ ID NO: 4521 - DNA, 201 bp, Artificial Sequence
  Description of Artificial Sequence: Synthetic polynucleotide
gtagygtygyggyggttagtagygtygggtagtggattygyggtggygyggygtygggtygyggtgtttagggygggagtagtagtaygaggtttagggygagygtttaggatagygttagtatgttygtygtgtggygtttttggtatagygtttggtaggtggygggygttygggtgatgagtaggtagyggtttaggg

SEQ ID NO: 4522 - DNA, 201 bp, Artificial Sequence
  Description of Artificial Sequence: Synthetic polynucleotide
gttttaggagggaaggaggygayggtgtttaaggaygtyggaagtyggggattttygtttttttygggtttyggttaggttattagtgttggttygyggygygggtgtttagttgygtttgggatattgygggtayggttgtggyggtaayggtagyggtygtygygtygtygaygttyggtaggattgagygtayggagc

SEQ ID NO: 4523 - DNA, 386 bp, Artificial Sequence
  Description of Artificial Sequence: Synthetic polynucleotide
ggtggtatgtaygttttatttaaaaagtagatttttttttgtaattgttagtaagtggaaggatagtaaattttatattatttygagatttgtgygtttygagyggttttaatttygtttygtttgttgttgttgttgttggtgttgtttyggttgtagttgttgtygttttaygatttyggggygttgaggtaatagggttttttttttttattttttatttttttyggtttttttatagaagygtygtttttagtaatttttygtgtattttttatttttgtygtygtttattttattttttttttttttgttttttttttaaatygtttttaagtatatttttygtygttggaagtgattataatgttgttttttaataagta

SEQ ID NO: 4524 - DNA, 201 bp, Artificial Sequence
  Description of Artificial Sequence: Synthetic polynucleotide
tttttygtttttygyggygygygtygttttygggggtttygygttttygygtttaggttttttttttttggygggygtttataggyggygygggtagygygagtttyggagtttyggaggtttgtgygttttgagtyggtatggatttygagtattgygygttttttygygtggggtttgtattyggtttttatgtggttt

SEQ ID NO: 4525 - DNA, 201 bp, Artificial Sequence
  Description of Artificial Sequence: Synthetic polynucleotide
ggggygattyggagttgygygtyggygtaygygatttygttygttttttattttttgttttattattagttttaatttggttttygttygtygygygttyggggtttaggggagyggygyggggatttaggttttayggyggagagagygygygggattgygaagattggggtygagtgtygttttttttgygttttggta

SEQ ID NO: 4526 - DNA, 309 bp, Artificial Sequence
  Description of Artificial Sequence: Synthetic polynucleotide
aggygtagaygttggagttggagyggygttttyggtagtagyggtatttgtttgygttygagygygagtagttggygagtttgtttygttttaygtttaygtaggttaagatttggttttagaattatygttataagttgaagygygttygygttttaggggyggyggagtygtttgatttggtagtattygtygagttgtaygtygygttyggtttgttgygtygygtggtggtgtyggtgtttgttygygaygggtagtygtgyggyggyggyggyggtggygaggtgggaatygtygyggtttagg

SEQ ID NO: 4527 - DNA, 203 bp, Artificial Sequence
  Description of Artificial Sequence: Synthetic polynucleotide
agygtatattgtygttagttagttagtygtygtygtattggtttagtttygaaaatttttaggyggygtagaggtgtttaattttggttattayggygtygygtygtyggtaygtygygtgggttttagatagygttagtygttygggtaygaagaatatttggtttggggattatagygggttatygatygagggtagggtg

SEQ ID NO: 4528 - DNA, 388 bp, Artificial Sequence
  Description of Artificial Sequence: Synthetic polynucleotide
ggttyggttygyggagttagygtttttttygygtygatttygggtttygggyggtygtyggggggygtygggygtatttttygttgttaatttttygttygtgttttygttygygtttgggtttygtygtattttagtagaagttattatagagaataaattatttttttgttttygagatgggttttyggggaggaaggtaaattgtttgtttygtgtataataagttaggygtggagagtagygyggaggaggtygyggtagttatygagygggtagagtttttygtttttattygtygttygygtttgtygagttttttgtygagygggyggygygtaggttyggagaattttaaaaggtttggaatatygggttgtttttyggt

SEQ ID NO: 4529 - DNA, 241 bp, Artificial Sequence
  Description of Artificial Sequence: Synthetic polynucleotide
agttttttatttagatygygttagtgygtttygggttttattagtttttattaggygttgtttttttygtttttatttagtttttttttttygttttttygygagtgtatttaagygttttygttttatttatttttagygtttttttaagtttggaggagygtttagagtagtagaaatagtaggtattttatatygttyggygtggggatttygyggagygtygttgygygtygttttt

SEQ ID NO: 4530 - DNA, 232 bp, Artificial Sequence
  Description of Artificial Sequence: Synthetic polynucleotide
ygtttttttttttagygtttaggttgggggyggygtyggtgttagtttagtttagggygaagtttttagggtyggttygggtygggttgygggattygtygtggagygtaaagtgtttgaagttttygygygtattyggttttgtttttaaaggttttttagaaatgtaagaggttaggygtagaaatatatayggayggtagttttatgagaaaatgtagataaagagttc

SEQ ID NO: 4531 - DNA, 214 bp, Artificial Sequence
  Description of Artificial Sequence: Synthetic polynucleotide
gtttttttgttttygygttttttggattagttttggtggggagttggaaggtatygagtgygtttyggttaagaagggyggatagttttgtgygagtagygttyggttggygyggygyggggtgttttttatgttaaaggaaaggatggattttttgtttgtttagggtttttattttttaaaatttttttaattgyggtattggaagggattt

SEQ ID NO: 4532 - DNA, 250 bp, Artificial Sequence
  Description of Artificial Sequence: Synthetic polynucleotide
ygtagyggggtygttttattgtygtatttttatttygygttttgygygtttatttgtttaygaagttttygagtatygagtttttgtyggygttttggtygtttattayggygatttgyggtagttttagtaggtagttttgttttagygtygaaaaygygttttgtagayggtttattagygggattagtttttttatttttyggttttttattttgttygaggggtyggygattagttggtttttgtt

SEQ ID NO: 4533 - DNA, 201 bp, Artificial Sequence
  Description of Artificial Sequence: Synthetic polynucleotide
tggtyggtgaagttttaggattygttygtttggggttaaggtaaggggtgyggtaygaggagygtagggagtttygagttttaggygtagatttagttgyggattygtygtatagttttggtgttgtaagygtggatygtgggygtaaggtttyggygggaggtattyggttyggtygyggtygggtttgtagggttttgg

SEQ ID NO: 4534 - DNA, 467 bp, Artificial Sequence
  Description of Artificial Sequence: Synthetic polynucleotide
tygggtatyggygggagaggggggagaagyggygtggagaggatttggtaagggtttgtttttaaatttagattatgatttaatattttggaygygaagygaagatgggaaayggtygtttgttgagagggggtatttgtagtttttttagaaaaggttggggtaggagagygtgyggttagaggggtgggggtatyggagggggggttttattttttgttttatagtygggtttttttygygaggygttgggaagtatgaggtatgtagtatttaaaatgttttttgaaaaagayggatttgaagtttttttttataaataygttattgtatttattttttatttagagaygggttgygygtttygagttgtaygggtaggtatttttttyggttttgttttataaggtggggagagyggggttggaygygggagggggygggggggggagygtgagaagaaayga

SEQ ID NO: 4535 - DNA, 201 bp, Artificial Sequence
  Description of Artificial Sequence: Synthetic polynucleotide
ygtatagttagygaagygattygagggttagygaataagygttggattttygtaggtttyggygattttagattyggtttttyggygaagataggaaaaygtgtgtygagagtygttggagggaatygttygtaaatygaagaagaaattaaattagtagygaatatttgtaaattagtgttaagttgtgagtttttygag

SEQ ID NO: 4536 - DNA, 232 bp, Artificial Sequence
  Description of Artificial Sequence: Synthetic polynucleotide
tygggygygggggaggygtgggtgttggggygggygagtttagatttttygtgggttggtttgtgggtgttttttyggaaataaatgaggttgtaggagyggtgatyggtttgattgtttttgggggtttygaattygtgggtggagagggtaaggyggaggtygtggttagtatttttttagtgataatgtygtyggggatttttttttttattttttgggagtattttag

SEQ ID NO: 4537 - DNA, 222 bp, Artificial Sequence
  Description of Artificial Sequence: Synthetic polynucleotide
taygattttaggttygttgatgatygttgtggtatgaatgaggttatygtattyggagaggtggatgtttagatgtggatttaggaaatggttttatttygaaagtttygggttagtgggygtgttttttggttagtgtttttaygttygygttagaagggtagtaggttttygtagggttyggygttttatttattygtgttttttttgttgtttttagtt

SEQ ID NO: 4538 - DNA, 239 bp, Artificial Sequence
  Description of Artificial Sequence: Synthetic polynucleotide
tagygtygygttttaygttygttatygtygtygtygttttagtatatygtaggygtgagtttygtygygatygggagagtttttttagttgtgygttttygaggtatttggtygggyggggaggygtygggtyggggygtataggggttaggygggggygttgttgtttatttttygtttttygggygtgygtttygtttyggagttygtatttygygttygygtttygtttggaagtt

SEQ ID NO: 4539 - DNA, 209 bp, Artificial Sequence
  Description of Artificial Sequence: Synthetic polynucleotide
gtttattygtygtagtagtttatttttgttygttagggagtttagggtagtttttgaagttgttagatttttttaygtaggyggyggygttttgtattgyggagtygygttttgggggagtagtatttttagtttyggygtttygtagttagatagttttttttagggtggtagtatttttyggttagggtgtagggattttyggggyg

SEQ ID NO: 4540 - DNA, 380 bp, Artificial Sequence
  Description of Artificial Sequence: Synthetic polynucleotide
gtttagatagataaaattattttattaaagtgtaatgggagagaggaagaggagtaatgagaaggtatgtgagyggggagaaagaaaaagttygggaggygaaaaygaaatttatttttttgygtttatttttgttagaggtttgtaggaygtgttttaatttggtatttygagtttagaataaaagttaygggggttgyggtatgggtagggggaaggygygyggtggttgaygyggggtaggggttttggygagygygggaggggyggttagtagtygttygyggggttggattgggagtttygtgygatttygggtttggygtttgggtygggggtggttttygggtttttttygggggtygtygaggttyggtttc

SEQ ID NO: 4541 - DNA, 394 bp, Artificial Sequence
  Description of Artificial Sequence: Synthetic polynucleotide
ggtttttttttatgagggtttygagtagatgaggtttaaaagtygttttaaggagttttttttaagtttgattygagtgggygygaatttttatagtagygttaagtagtaggattatagygttagygtttggtttyggaggaaagataagttggagtaygtaagggygattygttttygggggtttyggttaggtatttgtygtatgtatttttttygtggtggtggtatgagygygygyggggygyggggggtaggygaggggattttggtaggygtygaygttttaggtyggattygggggtttttttgtttgtagttttttgttttaatgatygggttgyggggaggggagggtaggtttttttttaggtttttggtttttgtygattyg

SEQ ID NO: 4542 - DNA, 201 bp, Artificial Sequence
  Description of Artificial Sequence: Synthetic polynucleotide
ttyggtttttttatttyggttttttatggggttttygggtttgttygttgtgagtagttttattttggggtgttggygggatggttgtttygtgtagggygttygggagtttagatttygtggaaatgtttggggtttttttttgtttagaggggatagtgagtagttaygttgygatatgtttgagggattyggaygaag

SEQ ID NO: 4543 - DNA, 557 bp, Artificial Sequence
  Description of Artificial Sequence: Synthetic polynucleotide
ygggggaaaggtyggygttttagggyggggaggatttgggagtggagttyggagataaaatyggggttaggtagaggagttagagggaaagttagtaaaygygagttygggtgagagttatyggaatgygggaaygtagtttagtygggaatagggttttygataggggtygttygtggttaggaygyggtygttgaatagaggtygygyggyggtttttgttygagggatttygtgggygggggttatayggaggtygygtayggttttyggggttggygggggtaggtgggaggatttttttygggttygygaatttgatttggtagyggttaggtgtttggaagygtttttaaatgatagggttataaagatatgttggttaggtttgtagttagygtagtaaygtggtttgtaggagygtagaaygaggttagatagggttattyggaygtygtgttgttagtgggtgggggtygggagtaagyggtattggtttggagatttygyggtaggtgattttttttatttgggtagygaggttgaaygatggygat

SEQ ID NO: 4544 - DNA, 212 bp, Artificial Sequence
  Description of Artificial Sequence: Synthetic polynucleotide
ttggagggagttgggggattttggagggtgggaagtggttgattttyggtggtyggatatttatttagagtttgattygtattygtgtttttttggaagygttataattgyggggaaggagtttttagaaatygtgttagttttaatatggygggttaaggtggtttttaaaaattgaaaataaaggttttgaggtgggaaaaaatttagtt

SEQ ID NO: 4545 - DNA, 201 bp, Artificial Sequence
  Description of Artificial Sequence: Synthetic polynucleotide
aatagtttttttyggtttttttagttttgtttaaggggtttggaaatgttygtagttttaagaaaggttttatttaagtataggatggggtggggygggyggggttaagattgttttggggattgaatttattttygtttttagygattttyggyggataaagygtaagtttgtgtatayggtygattgagttattggaaa

SEQ ID NO: 4546 - DNA, 201 bp, Artificial Sequence
  Description of Artificial Sequence: Synthetic polynucleotide
gggggagttaggggtttttygtttggggattttygtgttgggtatttygtaygttttggaygygygtagttttatygggagygaattttgtttygtttgygggtgttayggagaggggttgggaagtygagttagttttggyggygattgggggygtttttggttttttgggggggygggggygygtattgttgtttagga

SEQ ID NO: 4547 - DNA, 294 bp, Artificial Sequence
  Description of Artificial Sequence: Synthetic polynucleotide
tttgaaagtttttgaagyggttttttttttttttttttttttttygtaggtagagttgtggtgtggttgggtggtttgygtgggygttygggggattygygggtattygggaygaggygagggygtagaaaatttggagtttaattagtayggagttgagttttygygttttaatttttaggtgatttygtgyggyggyggyggtagtagtagtggtagyggygatyggagttygtagtagtttygagygttttygggaggataggyggygagttyggygaatygttatttgtt

SEQ ID NO: 4548 - DNA, 244 bp, Artificial Sequence
  Description of Artificial Sequence: Synthetic polynucleotide
ggygggygtgagyggyggaggagtygggygyggygataygyggttatggagygggagtyggyggggatygaggagttygggttttygggayggyggaggygtygagagggtaggaygygtayggtgygttttaatttgttgtygttttygggygtygaggattttgyggttggygyggttaagggygagyggygayggyggygygggtgtgtttagtatttggtygataatyggtttaagatta

SEQ ID NO: 4549 - DNA, 303 bp, Artificial Sequence
  Description of Artificial Sequence: Synthetic polynucleotide
yggggtagtyggggtygggagagygggygtagygyggyggggatyggagtygygggygtygggaaaggttttygttaggaggggagggaatttygggagygygagttagggggaggygygtyggaaagygagagtgataagtagtttataagtygaaaagtttttygygggaggygygygtygygtgggtttygatttagtygttgygygtygtygtggtatataggttgaaaagtttgygaagttatagaagttaggttyggygtttagggggttttgattttgtttttatggttttagatt

SEQ ID NO: 4550 - DNA, 286 bp, Artificial Sequence
  Description of Artificial Sequence: Synthetic polynucleotide
ygyggaggttggttttggtagtggttagggagtggagaaagtaaattagagtyggttyggttatygattttgygaagttttttygattttagtttagygygggagggtggyggaaggtggtgtatygtagygtggttttygtygttgtygtygyggttttgtaaagtgttagygggggygaaagygagagtttaaaggaataggaggtttattgaattttttatyggagtttttaggggttttggttttttagtttgtttttgtttttttagttyggggatttgtt

SEQ ID NO: 4551 - DNA, 261 bp, Artificial Sequence
  Description of Artificial Sequence: Synthetic polynucleotide
gggaatygagaagaggaagaagygaaygygagtaggagygtagygtttttyggatttttgaggttttttttgtaatttgttatattygtagtttttattygatattgaataataatygyggggaggagaggttatttgtagtygaggttygtaaattgtyggttttattygggtagygttaattyggtgttygyggayggtgattttygagttttagygatgygttttattgggtttaaaatagatttaattttatagtta

SEQ ID NO: 4552 - DNA, 201 bp, Artificial Sequence
  Description of Artificial Sequence: Synthetic polynucleotide
tattgaaaggtagaaatggggagtaggtatttagttygyggtgggtagggttttaggaggtagttttygttyggygatagttttyggggygtaatttttygtaggaygygtatttgttaggatagttattaagaggatgyggaggttgggggttttttyggggataaaattagggtattttaaggaattttttgygygttt

SEQ ID NO: 4553 - DNA, 201 bp, Artificial Sequence
  Description of Artificial Sequence: Synthetic polynucleotide
gttggattgggtgyggttgtatttgtggagtgggtggttyggtgattgttattygggttagtgttgttagtagatgtgtatattttgggygggggttggyggtygagtgttattagtaggggyggyggttaggtagttattygtygttttttaagttyggygttgygygtagggtttggagtattyggtgttgagaygyga

SEQ ID NO: 4554 - DNA, 201 bp, Artificial Sequence
  Description of Artificial Sequence: Synthetic polynucleotide
taagttgttttttgttttgggtttttgatatttttatagtttttgaaagggttttyggagattttagagagaggygggtgtygaggggttaygagttygyggttgatattygygttgyggaagagaatggtattgattgagggttttggggatttgggttttggygttttggattttaggattatgtatttttyggggygc

SEQ ID NO: 4555 - DNA, 201 bp, Artificial Sequence
  Description of Artificial Sequence: Synthetic polynucleotide
ygttyggttygygggttttaattttatygtygtyggtygaattttgttygttygyggygygtatagtyggygttygygtataygygygtataaattttaygtaattygyggtygtttygtttygtygtygtygtagttygtttgtygygygtttatagttyggttygagtygyggggttygagygatagygayggygtygg

SEQ ID NO: 4556 - DNA, 201 bp, Artificial Sequence
  Description of Artificial Sequence: Synthetic polynucleotide
ygttyggygtagagtygyggtttttttgtttgygttygtagtttgygtygttygatatagtgggggtggaggtagttygtttagttgggygttttggtgyggtgtygygtttaaagttttatttttgygtygagggtttgtgatttgtagagagygatygtttgattttaagttggttgtagagygaggttagtygggata

SEQ ID NO: 4557 - DNA, 201 bp, Artificial Sequence
  Description of Artificial Sequence: Synthetic polynucleotide
tttygaggtgagtygtygttgygtttatttgttttygtagttggattgtggagtygygttyggaggagygttggatayggatatttttaatttttttttygatttygttttttggttttttgtatatatattttygttaggaggggaggggaaggtttagtaattgtttggtttggttttgatttatyggttttttygtag

SEQ ID NO: 4558 - DNA, 201 bp, Artificial Sequence
  Description of Artificial Sequence: Synthetic polynucleotide
gygtygtttaygttattygttatttygggtygyggtttyggttygggtttagtggttgygtygtttttygttagtaaygttygygyggaatgagygygtygygttgttygygtttttattygtagggttyggygtttttttttygttygtygtttttatagtygygygtttattggttyggttagtttayggggagtygyg

SEQ ID NO: 4559 - DNA, 201 bp, Artificial Sequence
  Description of Artificial Sequence: Synthetic polynucleotide
gyggaatttygyggtygagagtyggtyggtttagttgggyggggatayggyggtttygggtttgtgttttagttttagtygggttttttygygtygttgyggttgttgygyggtgyggtygtgataagttatagtaaatttgtttttygygtygttttaagttattaggaagygtaatyggtgtttttggggatyggygaa

SEQ ID NO: 4560 - DNA, 344 bp, Artificial Sequence
  Description of Artificial Sequence: Synthetic polynucleotide
ttttgattagatgaayggagtggtyggaggtaagtygygtgttttygtaggttyggatttgygyggttyggaggtggtggatggggtgtagtgggtgtgygggaatygtaggagaggattggggttttaggtggayggtgttgattgtattggttttgaagattggaagtgggtgtaggaggaatttgygatagttgagattagggygygygggtagatgygttaggtygttagtaaatyggygtgygtgygtttyggygygtttagtttygggygagygtagggatgggggtggaagaggygttttttygggtttygaggtttgygtaggttttttggtyggt

SEQ ID NO: 4561 - DNA, 201 bp, Artificial Sequence
  Description of Artificial Sequence: Synthetic polynucleotide
ggygtttgttygaggygggagtygttgggttatgtttttgtttattaggtttttygaatttttggtagggtagygtttgttygtgttttygatttttttygtaggtaattygygygaatttggggttygtagagagygagygttygyggatatyggttgaatagtttggaggttgygygagggggygtygyggggagggat

SEQ ID NO: 4562 - DNA, 218 bp, Artificial Sequence
  Description of Artificial Sequence: Synthetic polynucleotide
ygggtgtygtggtgyggggtggggatagttaatttagyggggayggaggaagttgggggtagttgggtgygtgttttgtatygtttatttgtyggggttyggtttttggyggtgggygagagggagtatattygtttatattttaggaatttgttggggagatgagttygtggggttagaaagaagggaaaaattttttgggtaagggagagaataat

SEQ ID NO: 4563 - DNA, 234 bp, Artificial Sequence
  Description of Artificial Sequence: Synthetic polynucleotide
ygttgttgttygttatygtygtygtygttyggttatygtatygtatatattaattatttatygttygtttttagtttttygggygaagttaattataggyggaggtttygttaatggggtygtygtygtygtygtygaggaggtagttagtygygygttygggygtaagygatagttttttagggayggggatgggtygggggygygyggggggygggggygtayggggygygt

SEQ ID NO: 4564 - DNA, 201 bp, Artificial Sequence
  Description of Artificial Sequence: Synthetic polynucleotide
tgaggyggagagaggtygtttygygtttggggttttygaaagyggttagttgtttttttgttttttttgagyggggagygttgygttttttgygggttgygggagatttttttagattttygggtgggaaaattatattgagygtttygggaggttgttagatataatattgtatttggtatttttgttygggtgttttyg

SEQ ID NO: 4565 - DNA, 201 bp, Artificial Sequence
  Description of Artificial Sequence: Synthetic polynucleotide
agttagggtygggggygtaygtyggaatatttgggtygtygggtatygagygtyggggggttgygyggygygtatttggagagggygtagttatgygggyggyggyggygggggggggygtgyggayggtygygttggygttgttgttgggggygttgtattgggygtyggygygttgygaggagtaygattattatggtt

SEQ ID NO: 4566 - DNA, 235 bp, Artificial Sequence
  Description of Artificial Sequence: Synthetic polynucleotide
gtaggggtgttttgttygtaygtatttaygatagtgagtagtatgttgtttagtagtagygttaggaataygatgaataggatgagttttygygagyggyggtttttttgtagttagyggattagygttagttygtttagggttatggtttyggggtttygttgygggygyggtgygyggtgaggatttaaggyggtygtggattttttattttttygttttttaggtygyggaa

SEQ ID NO: 4567 - DNA, 201 bp, Artificial Sequence
  Description of Artificial Sequence: Synthetic polynucleotide
ttttttaatagggygygttggttygygagtyggaggaattttygtttaggttttgttaagygtttattyggagtaggtygggggtagtgaaggatgyggygggagyggygygttgtagtttygygaygtggtaygtattttggaagygatgatttagatatyggtagyggtggatgagttaggggtagaaggtggayggat

SEQ ID NO: 4568 - DNA, 241 bp, Artificial Sequence
  Description of Artificial Sequence: Synthetic polynucleotide
agttttyggttygaggttgygttaattyggygtyggatgttaatgatgaaattaaaatgttatttaagttaaatgyggggagtatayggygattgggygygtataatggtaaatgggattaggtaggygaaggtttagtygagtttyggtttygtagtygttttygttatygtttttttttygttttttttyggattttggygttttggtttygggttataagagttygttygttattggt

SEQ ID NO: 4569 - DNA, 201 bp, Artificial Sequence
  Description of Artificial Sequence: Synthetic polynucleotide
gaygatttgggtgatttgggtggaaggtggtgtagtaggtaggtagtggggaggggyggggaggaaatttagggggagggggygtygaggttggtgaggygtttttttygygttagggatatgtaggtatyggatggttgygtaggggtttttgttygtttggttttgggtgygttygtttagtttyggtgtaaatgtttt

SEQ ID NO: 4570 - DNA, 201 bp, Artificial Sequence
  Description of Artificial Sequence: Synthetic polynucleotide
tygtttygatttattaggygygtagggttygttttygaaattygygygggttttygtagtyggtygygyggtttttagtygygaagagagygtygygtayggtggygtygttatagtygtgggtygtygygtttaggtagygttttagttgttygtaaagtttttgtagygtygtttygtyggggtttaygygygtyggtt

SEQ ID NO: 4571 - DNA, 217 bp, Artificial Sequence
  Description of Artificial Sequence: Synthetic polynucleotide
ttaaggttggtttgtgttagaayggygygygygygygtaygtaygtatatatayggggggaaatttttttaaaaatgaaaggttagaagagtttagyggyggygygggygttgygygagggtttyggagttgattygtygaggtaggaaattttttyggtygygaygttyggtttyggttyggygttygygtgggatggtgtagygttygtygtygg

SEQ ID NO: 4572 - DNA, 201 bp, Artificial Sequence
  Description of Artificial Sequence: Synthetic polynucleotide
ttatattgygtaagagatygtaatgaagttygtagatttttaggttggagtygtagagygaggtggygaggtggagaaygyggggttgggtttggatagyggttttggggtygtttggagttttygtttttttaattyggaaggtagyggattgatatttgygtygaagtygygygtattttayggagggtygggattttg

SEQ ID NO: 4573 - DNA, 201 bp, Artificial Sequence
  Description of Artificial Sequence: Synthetic polynucleotide
gaggggtggttttgttttatttagggggtgtygtgggtaaaggttttggggttatttgtttggtgttttggagggygtagggtaggagtygtygaggttygygggttattgtggggygyggaattttagattaggtattygyggtttaattttygggttaggggattygygggggttttaygaatttgtttggtttatttg

SEQ ID NO: 4574 - DNA, 201 bp, Artificial Sequence
  Description of Artificial Sequence: Synthetic polynucleotide
attyggggtyggaggtaggygygtaattatggggatyggggygggygatggyggygggygggtttttgtygtagggtggggatggtttttttagtygggyggtygtygttatattgtagagygtatttaaagagatatttygtttygygttygttttttagtattagattttygttygaaaaygtygtygggyggattgta

SEQ ID NO: 4575 - DNA, 317 bp, Artificial Sequence
  Description of Artificial Sequence: Synthetic polynucleotide
tatygttygggttttygtttggttatagtattaggttatagtgygttggtttttgattatttttttggttyggtggtygtttttygtttttttttagttygygtygttgttttgttttaggtttyggtgyggttttaagttttagtttagggtttttaggtttttttaggyggyggtggyggtatttatttgggtygyggagtyggggtttggtayggtttygtaggtggtaaatgaaattttggtagttgtygtgttttagggttttaygggtatagagttyggttagtagttgtagygtttggtgatagagygyg

SEQ ID NO: 4576 - DNA, 221 bp, Artificial Sequence
  Description of Artificial Sequence: Synthetic polynucleotide
atttatagygaygggtaattaygygggaggagtaggttaattttygatagtggaggtgaagatgygtgygtttygygtattttgtttttygygygaygtygttygygtygttygyggttyggtygggagyggtagttygtgtttyggtttyggtttyggtttyggttggygtttgtatttgygattatygtgagtagttatggygtattttatagtgtaga

SEQ ID NO: 4577 - DNA, 201 bp, Artificial Sequence
  Description of Artificial Sequence: Synthetic polynucleotide
gtgggyggttattatttttttagagtatttggtatatygggttggggttygtattygtagggtattgyggggyggygttyggtgattgggtggggtygtygttgttttttttttygttgggggyggtagttttttgtttgygyggaggygatttagaaggtaygttygttagtaggagggygggygtygtagggttttygg

SEQ ID NO: 4578 - DNA, 201 bp, Artificial Sequence
  Description of Artificial Sequence: Synthetic polynucleotide
gttttttygaaayggagatttgttatttttttagagggyggggaagtttatattattttttgttttatagtgttygtttygtttygtttgttggtttttygtttattygagatattttaggtayggttygtattggagagggtygygttgttgttgygatygtayggygttyggggtaggaatatgttygtttttttttgc

SEQ ID NO: 4579 - DNA, 201 bp, Artificial Sequence
  Description of Artificial Sequence: Synthetic polynucleotide
atygaagttaggtggaagtaaatgagtttggattttgaggygygtttggtttggagtygttaaatttgttagygggyggygggggaggtggttyggtagygtygggtgttgygttygtatatgygttygggaaggtagtttyggtygtttygtttttagttygttttttatygttggygyggyggyggyggygtggggttc

SEQ ID NO: 4580 - DNA, 201 bp, Artificial Sequence
  Description of Artificial Sequence: Synthetic polynucleotide
tgygttttttttttgttatttygatgttgggagtggygttttggttttggygttttttgggtaagtattagtyggyggtatttgyggaggtggttggtaygttgttattttttgaaatgagtgaggagggaggtttagatttaggyggttttaygygttygttttggtattagtagattgggaattgtygtggttatgttc

SEQ ID NO: 4581 - DNA, 230 bp, Artificial Sequence
  Description of Artificial Sequence: Synthetic polynucleotide
tttttyggttgtagaaygtttttygttgtyggagaaggggtttagtaaaattgatttttttttatttgtttttatttataattgatggggagatgagaaygtaatatattttagtatygagtttttgtygtttggyggagattttgtttaagaygttttygtaaagtatttttagtyggggaataaagtayggaaagttgttgggtagagyggtygggaggagatatygg

SEQ ID NO: 4582 - DNA, 201 bp, Artificial Sequence
  Description of Artificial Sequence: Synthetic polynucleotide
gatagtggtagaggygatygtttttttttttattatttatattttagttttagatttttttttttttttttyggtgatattaagttttagatyggyggtygtatttggttttatagtgtaaaatgtgtttggygaggaagtygaggyggygttgtagtagttgagygtgggggtttgtaagggyggttagttyggggaagc

SEQ ID NO: 4583 - DNA, 201 bp, Artificial Sequence
  Description of Artificial Sequence: Synthetic polynucleotide
ygaaggttatyggttgygttttgaagygagattggygyggtygtygtagtyggtttyggtttttgggtagtttggygggtygtaygggttgygggaattygtyggttaggtataygaagtgyggtattatygtttggtaattggagtagatgtttattagttygtygggtttggyggttatggygttttyggygtttgygg

SEQ ID NO: 4584 - DNA, 201 bp, Artificial Sequence
  Description of Artificial Sequence: Synthetic polynucleotide
tgttgttgttgttgttgttggygttggyggygygygyggayggtttggagttyggyggyggtttygggtagtgggttygttaygygygttgggygggygyggygagtagyggygagtttagttttagtttgygtattaaygttaygygygygttgttgttttatttggaygayggyggygattgygattttttggagttgt

SEQ ID NO: 4585 - DNA, 201 bp, Artificial Sequence
  Description of Artificial Sequence: Synthetic polynucleotide
agtttygagtygttagtttttaggtttgggggtygtygttttyggagttgttggygtttattygtttygygttggagatgtttaatygyggtygggttgyggggaygygggtygtgttgggttttgtgygyggtygygttygtygggtgaggaygygtygggggygggggygttaggttygggtttaagggataggagttt

SEQ ID NO: 4586 - DNA, 201 bp, Artificial Sequence
  Description of Artificial Sequence: Synthetic polynucleotide
ttttgaygyggggttggggaygtagatatttttggtttyggtagtttagygtaatttttgaggtygggygtygtttttygtttttagaaattygggtttygagygtygaattttagygttttygttygtgggtatagggygygyggtgtagttatagggggttygagataygygtttyggtttggtttaggttggggaatc

SEQ ID NO: 4587 - DNA, 201 bp, Artificial Sequence
  Description of Artificial Sequence: Synthetic polynucleotide
yggygattatttgttgggtattaagyggttgyggyggttttattgtaaygtgggtatyggtttttatttttaggygtttttygayggtygtatyggyggygygtaygyggatattygygatagtgagtggygyggttaggygygaaggggygggggyggggggtaayggtygtygggttaattygtttagttatattttga

SEQ ID NO: 4588 - DNA, 201 bp, Artificial Sequence
  Description of Artificial Sequence: Synthetic polynucleotide
gttgtattaagttataattttatttatatggtgtgagaattttttgggttttttttttttagtaagatttggtattttttgatatttattagtttaatgygtgggaaatggtgtttttttttaatttgtattttttttgatttatagaaagttgtttttagtttyggtttatygattatttagttttttattttttgaatg

SEQ ID NO: 4589 - DNA, 201 bp, Artificial Sequence
  Description of Artificial Sequence: Synthetic polynucleotide
gttttttyggtattygtagtttygatagtttagttttttttatttgaaagttttatttgaggttttttttaattttgtttttttgtatttttggygtygyggggagttaggggttaaatttygtggttygygtggtttttttttttttygtagttttttygtttttattyggygtygygtttggagygttygtttyggaga

SEQ ID NO: 4590 - DNA, 201 bp, Artificial Sequence
  Description of Artificial Sequence: Synthetic polynucleotide
tttygggggtgtygagtyggyggggggtgaggtggttgygtyggyggtygggttaggaggtgygggtattgggggygygggaggggaygtggtaggtttygygggggttayggygattttaggggttaggaaggtttygttgygggtaygtaatttgttttygtttttttttayggagtygtttygggtaggyggyggygg

SEQ ID NO: 4591 - DNA, 268 bp, Artificial Sequence
  Description of Artificial Sequence: Synthetic polynucleotide
agttggygttggataagtygggtaagtygaagyggaaggtgaattatygtaagtatttgtagaagtagattaagygttgtagyggttttatgggygtygygtttttyggttygtttttttygagygtygtygataygttagttaaayggtygttggtygtttttagygtttygatagtygyggtttyggtttayggtaaggttgtttttyggygggaggygtygtaggtygtygyggtygttagtttgtaaagtygaagtttggtygc

SEQ ID NO: 4592 - DNA, 614 bp, Artificial Sequence
  Description of Artificial Sequence: Synthetic polynucleotide
atyggtyggggttgttgtygtygggggtttgggttttttagttagttgtggattaaayggtttttttttatttaaattaattgygttaygygtaggyggygtaygggttgggtttgggaatggggatygygaggttttagtatttygatgttttgaaagttttttygtttyggggatttgtttttgtgttgtagttggtaggggtygtttgaagtgggagtagygtttggagaaggygggaggagttyggttygggggaygggyggygggatagygggatttyggyggygyggtgygttttagggygtagyggyggtygtagatygagtttygggygyggtaagaggyggygggagtyggtggyggttyggtattatgygtygagggygtttgttggagatygttttgggatttatygtgtttttagygttttataygagttatggggyggaygttaatttggaggttgggaaygtgaaggaaattagagttagtygggttaagagaagaggyggtggaggataygaygygtttaaagggtaaaggaatyggtttttttttttggtgtgggttttttaagttttaagatttagaataaygggtaggatgatttt

SEQ ID NO: 4593 - DNA, 201 bp, Artificial Sequence
  Description of Artificial Sequence: Synthetic polynucleotide
agatgtattttagtttagygatttttattggyggaattttygygtttatygygygtygygttaagatggtttaggttatttttattgttttttygttagygttttttagttttttatatttgttttgtatatatattggtttgtagaggggattygtttygaatygttygggagtggggtttgagttyggagttggtgttt

SEQ ID NO: 4594 - DNA, 201 bp, Artificial Sequence
  Description of Artificial Sequence: Synthetic polynucleotide
gttttgttttttttataagaggttaagtygatattaygygagtgtgtaygygttggggattgagttttygaagygaagttttgtyggaggagttttaggygggagtgggaayggttgggygtggggttagtaayggygttattyggtagggtggggggagttaggtttgttagagttagagygygttatygtygtygygag

SEQ ID NO: 4595 - DNA, 201 bp, Artificial Sequence
  Description of Artificial Sequence: Synthetic polynucleotide
gtattgyggagtagygaggtagygygtaagtaagttagggtaggggtygggggtaggggygggggttggagttatggttaggggtggttgtttaggtygygtgagttgttttttttattygtatttggtygttaggttattyggttattagaagtttttatttatattttgttttttatttggatygtyggttggttgtaa

SEQ ID NO: 4596 - DNA, 201 bp, Artificial Sequence
  Description of Artificial Sequence: Synthetic polynucleotide
ggggatyggtygtagggyggggttttttttggyggtgagtgagygagatygttaggttgaagtatygggagattgttttggtagtttttggtygttattygygtygtaataaaagtttttygyggtttttygtttagttagtttygtattgattggtygtygtgggagggattygagttggttggaggyggyggtygagyg

SEQ ID NO: 4597 - DNA, 201 bp, Artificial Sequence
  Description of Artificial Sequence: Synthetic polynucleotide
aagtttyggygygyggygttygttgggyggtgygttttttttyggttttttatttatygtagtygagtygggtattgtggggtgggtgtgygtgtttgtyggggggtgtgtgtttgtgtyggggaggggtgttgttggggaattgttgtttttygtattayggyggtagygatagtatygttyggtagttygtagtattyg

SEQ ID NO: 4598 - DNA, 261 bp, Artificial Sequence
  Description of Artificial Sequence: Synthetic polynucleotide
gygttyggtttaagtayggtgygagygtttyggggaggyggygagygagtyggtgyggagygtttygtgygttygggtggtttygygggtyggygggatygtgygtattttaagygygtgygggagtgtgygaggygttgtgygagttagyggygggygygttagggtgggaaaggtatttygaaygtattaggtgtagagatyggtatttatygagagyggtygggagygtayggygagtttyggtgttatygtyggttt

SEQ ID NO: 4599 - DNA, 201 bp, Artificial Sequence
  Description of Artificial Sequence: Synthetic polynucleotide
gtttgggttttaggttatygtagaggaygtgttttygggygygtagatggygggagatgaggyggtygaatttygygtttttgygtggtggagtatataygttttaataagtttagygttatttgtttagttttttaatttttttttttttygtttyggggyggtttttttttttttttgttttggttgttgttttggtyg

SEQ ID NO: 4600 - DNA, 201 bp, Artificial Sequence
  Description of Artificial Sequence: Synthetic polynucleotide
ggtttaygtattgttygtyggtttaygygggagtttygaggggygaggyggaggttgggygtagtttttgtagttagtagttattttygygygtttygtygyggtttagttaattatttgttgyggyggyggtygtgttttttagggtgtattagtattttygtygygggygttgttttygyggygtyggtatygatgttc

SEQ ID NO: 4601 - DNA, 201 bp, Artificial Sequence
  Description of Artificial Sequence: Synthetic polynucleotide
taggtagtttygygtggyggyggtygggatagttgggygygttggtaggagagtaggtatagygttttttataggtaggatgaygygggtttygtagttygtttttttaygttgtttygtattattgtttyggttttgaygtgygtgygatagatttatygtaaatagtttttagygggagtaygaggtygggataggagg

SEQ ID NO: 4602 - DNA, 201 bp, Artificial Sequence
  Description of Artificial Sequence: Synthetic polynucleotide
atatagttttaagggattgagyggttyggaygggatttgaaatttttggaggattagttaygttygtatagttygtttatgygygttggtattaggattygtaggttgttagyggygagttttygtygyggttttttagggtattttyggagaagggggyggttttgaggaattttttgtatttyggatgttttatttttt

SEQ ID NO: 4603 - DNA, 219 bp, Artificial Sequence
  Description of Artificial Sequence: Synthetic polynucleotide
gtygtygttttttygggagtyggagtygtygtttttttagtgggtgtagtyggggtttygaygggggtygggyggttatyggggttggagttgyggttayggaggtttttgygtttgygtygygtygagggtagggatagggattggggtgaggggttgtttyggaaygtttatagttggygttggtttttttttgtttgatagttttttggttygggg

SEQ ID NO: 4604 - DNA, 268 bp, Artificial Sequence
  Description of Artificial Sequence: Synthetic polynucleotide
ttagtygtyggygaggttattygggaggggygggagtygtttgttagttattyggtagtttttttggggtttttttygygygttygtttgtttttttttygttgygttttttygtttgttggygtttttgttttagygggattyggtagttaggggttttagggggyggtgtagtaaatttttagyggtttgygtttagtagattaggttggggagtyggtttggygttgtagggaggtagagagygggaggaagaggtagtggtagg

SEQ ID NO: 4605 - DNA, 201 bp, Artificial Sequence
  Description of Artificial Sequence: Synthetic polynucleotide
ggttgttttygggygtattttgyggttygggtatttgtagggygggtagyggtyggttttttattatgttggtygtyggtatgggggtygtygtttttgygttttttttgagtttttygttagyggtttggttygygtttttttttggttgttttttattttyggtttygyggtatattttttaattttggggtygaagga

SEQ ID NO: 4606 - DNA, 517 bp, Artificial Sequence
  Description of Artificial Sequence: Synthetic polynucleotide
tagygtttattgtyggggaagattyggaygaaaatygaggtaaattaattattaaaaagtgtatttaataagaatttttttatttaggtttttygttgtygagaygyggtagatttttagagyggtttatttatttatygaagyggattttgggyggtttygggttgattygygttgttagggygyggattttatttygggygtattgttaggagaaggggtttttyggggyggygygtttygattttgggttttyggtgttygtagagggyggagattygyggygttttaggttatttattygtattttttygagttaaatttttagygtttattyggattygayggtttaagtattgatttttaggtaagagtygttttttttggtttttagggaattgatattatygygggaygttttttttaggatagttagtaggttttaggagygtagtaygtaatagygtagagtagatttagatttttttyggggtgagattyggaggttygygttttg

SEQ ID NO: 4607 - DNA, 226 bp, Artificial Sequence
  Description of Artificial Sequence: Synthetic polynucleotide
ygtyggggggttttgtttttygggaggagaaggaatyggtygttttygtttttttttttttttaggygttttygggagggggtygttgggyggyggaatygygttttygttyggggagttattaygyggttttttygyggaattttgaygttatttataygtgggggaaggggttgggagagtaagaggaagyggygggggagggggtygyggttgggagagygyg

SEQ ID NO: 4608 - DNA, 201 bp, Artificial Sequence
  Description of Artificial Sequence: Synthetic polynucleotide
atttyggaggtagagatgagagygttttaaaattttttttttttattttaattttygaggagtaggtgggtgtatagtgtyggyggyggyggggaygygyggygyggagtttggttttgggaggtagtggtygttttagtagtygaatttttygyggttttagttttygygtttagtagttygyggttygtttttyggaaa

SEQ ID NO: 4609 - DNA, 212 bp, Artificial Sequence
  Description of Artificial Sequence: Synthetic polynucleotide
tgygtagtggggyggaggaggtggygatggtygggggaggyggggggattgttgtttatttgtagttgggttaatttygyggygtaggyggyggyggagygyggggagttygyggygggtttagttgtygtagtattatgttygagttttttttygggtagaygtygygygtygtyggggtttyggtaggggaggatgttagaygttyggga

SEQ ID NO: 4610 - DNA, 388 bp, Artificial Sequence
  Description of Artificial Sequence: Synthetic polynucleotide
ggtagtygtagttttttygygygttttttttttttttaygtttttygttttygttatggggttaaygtggggtttttaagagttgtyggtttttagyggygtaatttttagttaaagttatygygggyggattatggtttagggygttagaggggttagaggtaygggaagaggaaaagayggttaattgggaaaaaaagagaaaaygaaagaaaagttaaaygatgagtttttataaggaggayggagtgaatagtttgtgttagaaggttttgtatatygttatygagttgtgtttygtyggttaggtggagtgggagaagtgttygggtattttttttygggataggggtagttagggyggaagtagtataggtaatygggaggg

SEQ ID NO: 4611 - DNA, 201 bp, Artificial Sequence
  Description of Artificial Sequence: Synthetic polynucleotide
tttttttttttttgttttttaagataygygttygaaatygaggggtgagagtaaagatygtttattaatttagtattttggatttagagtttttaatttygaaaggaggttggtattgttygggttatygagagagggagggagaagagttgaggttgtaayggtttttgggttttttagatygggtttggtatttaggag

SEQ ID NO: 4612 - DNA, 201 bp, Artificial Sequence
  Description of Artificial Sequence: Synthetic polynucleotide
ttattttttttggaagtttattagttgtttaagtgataattaatatyggagagttagggttygtttaataggagtaygyggagatattttagaygatagygygttttttttatttttatttygtttttygggygttttaggttagygtttattagattttaygtttgggggattgtttgggttttagygagagtgttaygg

SEQ ID NO: 4613 - DNA, 212 bp, Artificial Sequence
  Description of Artificial Sequence: Synthetic polynucleotide
aggtgtagagatagtggagatgaggttttgatgttyggttttggttttaygygggtagygttagttggtyggtgttayggagttttygygtttttygttygtttagttttygyggatttatttattggggttgtttygtagygygatttttttttatttygggggagggttaagggyggyggtggggggyggggtgggggggaagyggyggg

SEQ ID NO: 4614 - DNA, 250 bp, Artificial Sequence
  Description of Artificial Sequence: Synthetic polynucleotide
tttttygtgtttttygtagggtaggttatagttttttagattttygtttaggtggtaaagaagatggagttgggggtygygtttyggyggygyggggttygaaggygaggtygtttagttygtattttattttaygtayggtataygtygtygyggtttttgttaygtatattttygygttgtttygtttaygtgggygtyggggaggaggttygagagatgggaagaaaggttggtatttatttttttg

SEQ ID NO: 4615 - DNA, 488 bp, Artificial Sequence
  Description of Artificial Sequence: Synthetic polynucleotide
ttgtaaatattggaggaaagttgygttgttttaattaaataygtttttttaaaatayggagatgyggggagtgggggttygggaaagaaatttttaaagyggtagtgtttttttaagaaggggtaaaaaaatttgtttatggttatttttttttygttttattttttttttttttgatagtttyggttttggttgttygagtygggggtgtgttttyggttttttttagatttgggyggggggygggaggagtgagygatttgggaagtttygggggtggagagggggygtttyggggtttgggggygaygtggatattttttttggagtayggyggtgygtttgggatttgaaggaagggtygaaggaagyggggtgygggygggygagttgttygttaagttgtttggygggygyggygaggggagatgygtaagtttgtagatygggggttyggagttyggygtttaggttggyggggggygtgt

SEQ ID NO: 4616 - DNA, 201 bp, Artificial Sequence
  Description of Artificial Sequence: Synthetic polynucleotide
gtagagttgtagtttttgyggttttttttttttygttgtttagtygagttttgggtttttagtttaagtttttygtatygtygttgttgttgtygttatygtygtygtygtygygygttgttagagtygttttttygtttttttttttttttttyggtygggtttttttttttttttgtttttttttttttttttttagtt

SEQ ID NO: 4617 - DNA, 364 bp, Artificial Sequence
  Description of Artificial Sequence: Synthetic polynucleotide
attgygtatgtgggtttggggtttgygygtatyggaggttgtaggygttggggagggtgtggggggttgtgygtggggttgtttttatyggaagttgtaygttttgggaagygtagaggygggggtgttgttygygttggggagtaygtgaggggatatttagggattgttygygygaatggtttttaaygtatgygttttattttatattttatagtygttatgaygatygggaggttygtaayggttgyggggataagttygttgaggttgttaggygagttaggtttttttggatttygtttgattyggttgggttgtgtttgaaattgatttagttttattatattttttgattatgaga

SEQ ID NO: 4618 - DNA, 220 bp, Artificial Sequence
  Description of Artificial Sequence: Synthetic polynucleotide
gtgtaattttttggttaaaatgttatagttaagattaaattygaagaaaagaatgaaattaygggaagttttttagatagtygtygtaaggttatgggtygaagtggtgtaggggyggygttyggggaagygattggtagagttgtgygtattgggggtgttgtaggygttggggagagtgtggagaggttgygtggagttgygygttyggggtgggggt

SEQ ID NO: 4619 - DNA, 201 bp, Artificial Sequence
  Description of Artificial Sequence: Synthetic polynucleotide
gyggttgagttygyggagttgggtgagtgtttgyggttgatyggttygtgggagtagggagygtatagtyggttggtgttggagggttayggggatttayggggtatygygggagtygtygagygtagggaagttagtaggtatttgtagtgyggagtttgtaaggttgaggtaggagatygttygaggyggggagggygg

SEQ ID NO: 4620 - DNA, 201 bp, Artificial Sequence
  Description of Artificial Sequence: Synthetic polynucleotide
tttgagggttygggtagttattygtattttttygttaygyggagaaagtygagtatataggtygtagggtgggggttygyggggagagggtggaagtagygggtttttygygtttggggtggtygttgttttatttaggttttygtttgttttttatttttttagattaatygttttttgtaggtgttaaygyggtgtttc

SEQ ID NO: 4621 - DNA, 201 bp, Artificial Sequence
  Description of Artificial Sequence: Synthetic polynucleotide
gttttagtttttatttgtttaggtgttttyggygttttggygaattyggttattttagttttttaygtggtgagtatttagggtagygggtygatttttygaggttttatatttgggtttgaggggygyggttygtagyggygggtgtaggggygattgttagtttttatttygtttyggggtgygttyggaggtygatat

SEQ ID NO: 4622 - DNA, 358 bp, Artificial Sequence
  Description of Artificial Sequence: Synthetic polynucleotide
atttagggttattgtagtttyggggtatttyggaggttaygattygygagtagatgtttyggaagaggttttttatgtaggttgttaggtagatggyggygtgttygtggatgygtagygttaygyggttgtttattatttagygatataygyggtttayggagaaggtgaggtygtagygggtygatttgtygyggtttaggyggtygtygtyggygttgtttatgttgtagagggatagtgyggttagygtagtygtygtatagtgygyggttaggttttaggatagtaygatttttatggygttttggatttygtatttggtgtatttggygaagygtaggtttaggygttgygt

SEQ ID NO: 4623 - DNA, 201 bp, Artificial Sequence
  Description of Artificial Sequence: Synthetic polynucleotide
agygtttttttatggtygyggtagttaatygatgattgaatygaataaagagtagyggygagattaatttttaatatttatygatgggtagygggyggtygagtttyggygagtttyggtagtygtygttygtygttttagggygttygtttgttygttyggggatttttttaatgygtttagggygygttygggggtttt

SEQ ID NO: 4624 - DNA, 328 bp, Artificial Sequence
  Description of Artificial Sequence: Synthetic polynucleotide
ttttttagtttygttggtttgggagtygggagtttyggaggagtttttygttaagtttttttggttaygagygygtttggttttggtttgggagtagatygtgygttygagtggggtatttgttygaggtyggggattgtgaatygaaagattttatttagttttgttgtttttttggtattgygatttgggggygggttattttatttttttgaatttygtttttygttttgtttatggaaggttgtaagtttttttggggttygggatttttttttatttttatttttygagtagagaaataggygatgttttttttttttttgyg

SEQ ID NO: 4625 - DNA, 201 bp, Artificial Sequence
  Description of Artificial Sequence: Synthetic polynucleotide
gaggtgtgtgttggaggtgggtagtygtygyggaggttttagyggtaggtgygttttagtaggtagtagtagtygttattttgggtaagtagtaaatttygtataaatttyggagttattatgtttgttttttygttttatygtyggtttttttgttaggagtagtagaggatgtggtgaatgtatyggttttatygaayg

SEQ ID NO: 4626 - DNA, 319 bp, Artificial Sequence
  Description of Artificial Sequence: Synthetic polynucleotide
gggygtatatataygtttatttagatatttygygygttttttygygtttttgtttgttygttygtygtygtttgtttttttttttttgttttygtyggtygttttttttttttttttttttttttttttttttttttttttttttttttttttttggtattatagagttgttttgaaaatagaagatagagggagtttyggagttygttatttttagygatttttatattgggaaaaaatatggagttagtttyggtagttttygatttygtygttagygagttaggtagtagyggygyggaygyggtygtyggtttta

SEQ ID NO: 4627 - DNA, 201 bp, Artificial Sequence
  Description of Artificial Sequence: Synthetic polynucleotide
ttaagtttaattttaygtttttttyggtgttygattttgyggtygaatygtaattgygagtygtaggtaatggyggagtttttggtattgttagttgttygyggttgggggttygaggttgggagggtttygttttyggaatatygtttyggtttggtttttaattttgygaggagtttttttgygtttttttttygyggt

SEQ ID NO: 4628 - DNA, 370 bp, Artificial Sequence
  Description of Artificial Sequence: Synthetic polynucleotide
ttggattttyggggtgygggtttttttttttgttttgttttttagtatttttggtaattgygtaaagttgtttgggttgtaatggtggggtgtagggggygttyggttgttgtatttgttagtgttgggtttaggttgagaggygatttttagtttttataataatgtttygggttttttggtttgggttttygtagygttygattgatygttagygataygaygagaaygaggatttgtyggaygtggaggagatygttagygttygyggttttagtttggaggagaagtttygtagttagttgtattagggggatttygtgtaygttatggagggtaaaggtgaggygtttttatttygggtygtttt

SEQ ID NO: 4629 - DNA, 201 bp, Artificial Sequence
  Description of Artificial Sequence: Synthetic polynucleotide
ttttttygttttaggygtygttaagttttagtattatgygtttttttagatgttygaaagygtttttttagggtagtttatgtttttttgtgtttttttygygaygggtygggtttattattttatatttttygggtttttttatgtttattatygtgtgtttttttagtatttttttttttttttaagttttaatatagt

SEQ ID NO: 4630 - DNA, 201 bp, Artificial Sequence
  Description of Artificial Sequence: Synthetic polynucleotide
gttgggygtaggggtygtygttygaggattatgggtgggttagygtttygtygggttgttagttggyggggatygtyggygtttgtgtygggtygygttygaggttgygtygttygtgtygtagyggttaatgyggtagtattygygaaygttatygyggygggtttygttggttygggttgyggygtgggggygggggat

SEQ ID NO: 4631 - DNA, 201 bp, Artificial Sequence
  Description of Artificial Sequence: Synthetic polynucleotide
gtgtagygaygtttagttttygtgyggttagygygtygygtyggyggattttgtagtttagagagtttagggagtttagggaggggagyggggygygggyggggtagtgtygtataatygtaggygygtttygygtygttttygtttygggtttattttttttygtygygttttttttagtttatttayggaygagyggat

SEQ ID NO: 4632 - DNA, 263 bp, Artificial Sequence
  Description of Artificial Sequence: Synthetic polynucleotide
gygyggtttygyggggattttgygggygggygggyggtygggygygygyggggygggggyggygygygygyggggagygtgtgggtygggygggygyggyggggaaagttgggygygygagtygaggttgttgtttatttgtagtygygtygtttatttgtygyggagtgygygtttygygttttttyggttygtttyggagttyggtygttttttttttgttatagygggtaattgygtygatatgygataygagtagttta

SEQ ID NO: 4633 - DNA, 201 bp, Artificial Sequence
  Description of Artificial Sequence: Synthetic polynucleotide
ggygggagaggagtttyggtygygtggattttagtttgygyggtaattatygygttttgattttaggttyggttgtttagggaaggatagtttagggygygtttagygagttttagggggtayggaagtggttagggtagattttagggtgaataattaatattttatttattaattygttaaaaataaagaaaataaaat

SEQ ID NO: 4634 - DNA, 201 bp, Artificial Sequence
  Description of Artificial Sequence: Synthetic polynucleotide
tgtyggggtygygttttygggttygygtygttagtatttttttaygygygttyggtttygggttattygttttygtyggttttygttttttttygtagtygtagggaagygagtttgggaggaagaagagggtaggtggggaggyggatgaggggtgggggattttttgaygttattagaaggaggtgtyggggtaggaag

SEQ ID NO: 4635 - DNA, 201 bp, Artificial Sequence
  Description of Artificial Sequence: Synthetic polynucleotide
aggggttaggagyggygggatagygygggaagagtaggtaaggggagatagtyggattgygttttagtttttygtgttaagaatatygtygyggaggygyggttagttttttttggatyggatttttygtttttagggttaggyggyggagttttagttttgttttttttttagtttygggyggtttttagagttgagtaa

SEQ ID NO: 4636 - DNA, 201 bp, Artificial Sequence
  Description of Artificial Sequence: Synthetic polynucleotide
ygggygtyggygtgaattygygtttttyggagtttagygtygtgtttttaggtttyggttttgattttagggygtttaggtggaatggtttygtagttgygygttgttttygygttttygttttgtttygyggaaatygttttygatagttaattygatygggygygyggygttttyggtyggttttygttygatttygyg

SEQ ID NO: 4637 - DNA, 215 bp, Artificial Sequence
  Description of Artificial Sequence: Synthetic polynucleotide
gattttttygygtataygtatatgtataygttgygygtttttaygygtatatataygttttttttgtygygttygtygtygyggttattatygyggagtygagttttgyggagygggaatygaggtyggagyggggatyggaggtagtygagtygggggatgtyggttyggagyggagtygygygyggayggygygttygggayggtgagtgtgg

SEQ ID NO: 4638 - DNA, 201 bp, Artificial Sequence
  Description of Artificial Sequence: Synthetic polynucleotide
tygygtaatttttgaagtggtyggttagggygyggttggtttagtygtygtaggygttttgtaggygttggggtaggttttagtggtatagggtgattaygggttgtaygtttagttttygtagtygttttagtaggygtyggtagtagygtagtttttygyggttggggaygttygygttgttattggggagtattygyg

SEQ ID NO: 4639 - DNA, 201 bp, Artificial Sequence
  Description of Artificial Sequence: Synthetic polynucleotide
ggaygggagttgyggggagggyggtygggggatttygtagagttygtttygttygtagtygyggggygtygagggtagggygggygtttagtttggtttygtygtttygttygtagtttttygaaaggyggtygttttgttttggttagtttggttygattygggggygttgygtgygggyggtttyggggttgttggtat

SEQ ID NO: 4640 - DNA, 201 bp, Artificial Sequence
  Description of Artificial Sequence: Synthetic polynucleotide
aatttaatatttttttttttttttttggagttattttttttttyggaatatgtaagttttgggtggtttagttttgtygttagatttagtttttaagtgygggggaaggagatgggygtttttagtygygattttttgggaaggtggttatttatttgygttttgaaatagaagaatagggygaygttgtagataatttgg

SEQ ID NO: 4641 - DNA, 217 bp, Artificial Sequence
  Description of Artificial Sequence: Synthetic polynucleotide
attggttgaagtttttttagygatttgtatgaatygagagggagtgttttttgtygttttttttttaagagygttttgattgtagttttttagggaatgygyggtygagggaatgygygtagtttataggttttgggagtgagttggtgttyggygatttggtattygygtttggatatggggygtttatatygttttaggagtagtattagttata

SEQ ID NO: 4642 - DNA, 317 bp, Artificial Sequence
  Description of Artificial Sequence: Synthetic polynucleotide
agtaaaagtttttatttgtagtatygggtatgttgttygtttaaygygtttyggggatttgttggttygtgtttttaatttaggggtggttataygtttygygtttttgtttttgggtagatttttttatttgtgtattttggtttttttatttagtaaagagatgtgygaagtgtgygtttggagaygagtygtttyggtgatttttattygttygtagyggtggttttggtttttyggattygygttygygttttgygggtttttygygtygtttttgttygtyggattattygggtttagagggtygttygttt

SEQ ID NO: 4643 - DNA, 201 bp, Artificial Sequence
  Description of Artificial Sequence: Synthetic polynucleotide
gaggggaggtayggagygggaggagggggaygyggagaagattgtttggtttygtyggtttygttaaygtgayggttagtttygtygagygttygtattygtttatatttatgattattygtatattygttttaataygtgttaaggygygatygyggggtttttggtagttttygttgtatttttttttttataggggta

SEQ ID NO: 4644 - DNA, 201 bp, Artificial Sequence
  Description of Artificial Sequence: Synthetic polynucleotide
tygtttaatayggagaygyggagttttatagyggtggtagaaagtgagtattaatttagtaatagggggaaggaaggggaygtygggyggttagtgggaygtgyggtagtygagggttgtagtttgtttttgtagygygttygygtttatttgygattttttggtaggggatgttygttaggttgaattttttggtatygt

SEQ ID NO: 4645 - DNA, 201 bp, Artificial Sequence
  Description of Artificial Sequence: Synthetic polynucleotide
tagtygggtygagygygttgtttgagttgagtygtygtaggtgaggggttygygttttygttygttttgggygtygygtttggtattgattttgtyggtygtttattgtygtygtygtygtygttygygggtattatgatagttttgagygttggggttataggttggttatygtygtyggtgttygggaggttgyggygc

SEQ ID NO: 4646 - DNA, 201 bp, Artificial Sequence
  Description of Artificial Sequence: Synthetic polynucleotide
agtgtgattgatgtatttattatttaataatttyggggtgaaatttgaggtgaayggttttatttttttatatttaggaatggaattagttttyggtatygtgtatagtttgattttaygttygtaygttgggttttyggttttttggtagtgtatttaagtgtatttygygtgtgttyggyggattttygtgtatatygt

SEQ ID NO: 4647 - DNA, 201 bp, Artificial Sequence
  Description of Artificial Sequence: Synthetic polynucleotide
gygtagttttatttyggatggtttttgttttttygygggttygagggygttggaaatttagyggyggygaagyggagaggagtttygygygttttygttygtayggttttaggtttggggtttgygttggagtygygyggggagaggtygtttttgygatygtygygttygttttygatygttygggttygyggttagttc

SEQ ID NO: 4648 - DNA, 221 bp, Artificial Sequence
  Description of Artificial Sequence: Synthetic polynucleotide
agtttaggtttgygtttataygygyggygtttataygygyggygtttatttggttgtagtttyggttagggttagygygtygyggttgaagggggygttyggatttttttggggyggygygtagtygggatagtttygtatgaygttygygttttagyggtttygggaygyggttttatttttaatttttggyggttttagtttyggtttttgtgtttygg

SEQ ID NO: 4649 - DNA, 311 bp, Artificial Sequence
  Description of Artificial Sequence: Synthetic polynucleotide
gtttygtttygtattygtatatatttttttygtygttgttttgagygtagygataagggtttttatattttygyggttygtaatgtttyggggttaagtygaggtagggaggygttttygtagtttttgattttataattygygygygtgtgtatygagtygygggtatatygygaatatatatatatatatatatattygtgygttttygtttttygttyggttygggtttttygaatttattttygaggygtttygggygtagggttygtttttttttgygggtttttagyggttgttyggtagtggtt

SEQ ID NO: 4650 - DNA, 308 bp, Artificial Sequence
  Description of Artificial Sequence: Synthetic polynucleotide
ggtggygggtagtgtggtgatggtttttgaggaggtttgttyggagygtatygatttgatttataaaaattatyggaaattttgtaatttgttgatygaygtggaggagtggggttaggtggttattattagtatgtttattygttaygttygtaygtagtttttgagttttatttagaaygtaagtgggtttagtttaggtagagygggtygaagtgtgtttyggggaggygtttatagattygtyggttttttygtttaggaatttttattagaggagaaygyggaaaaagttttttayggtttag

SEQ ID NO: 4651 - DNA, 201 bp, Artificial Sequence
  Description of Artificial Sequence: Synthetic polynucleotide
ygagaattttgygggtttagaaygttygygyggaygttttttttayggygtyggaagtyggygtygagtttgttatygggtatttttttgttgttttgaygayggygggygttgtaagagtggagaagttgtaggtgttgaggygyggtgaaagaaattttgggagttaagagtaygaggagttggtgtttgtgttatatt

SEQ ID NO: 4652 - DNA, 201 bp, Artificial Sequence
  Description of Artificial Sequence: Synthetic polynucleotide
aggtgatttyggttttggygaggygygattyggttatgygtgtgtgtgttttttttyggagaggatttyggtygtygagggtaygyggggtttagttatygttygttttttaattagttgttggttygtttygatggtgtaaattgtttttttttgttttttattaaatagtaatagtttggttaygtttaagtggaataa

SEQ ID NO: 4653 - DNA, 201 bp, Artificial Sequence
  Description of Artificial Sequence: Synthetic polynucleotide
gggatttggtgattttagtattattttttttttttttttttttttttttgtttttttatygtttgttgtaattttgtaaagtttyggagtyggagagygygtttygtttttagagttttyggattyggygagttagygatygtygagtyggttattatgttyggtagatygygttattaggygtttttygyggtttttatt

SEQ ID NO: 4654 - DNA, 630 bp, Artificial Sequence
  Description of Artificial Sequence: Synthetic polynucleotide
agtttttttttgttattyggagtagagygygttagygygaggtygggtyggtygtttgygtagygtygggttaattttaattgttgattatatttttagygtgtttttttataggttttatttgtaattgagaygaatgattatagtggggygggaaggagtagttgtttattaattaatttttaattaaaagtgtttttygttttygggtgattaaagagaaatatygttygttgggygatattgattyggatggaatttatttgttaaygttyggaggaatggttttttygtttatygygyggtygggattgttttggtttttttyggtttgagtygtyggygagtgatyggygagtttgyggttaggtygggttgygygaggtggggttgaygttagagtttttttygttttaagtygygtatatttgatttgaygggttygygygattygtttttttttttttttttttygtaaaatatgtatttttgtygtygttgygaggtygttyggttttagagttttttygagttttyggaatgygaagttaaaggaatygyggyggttatygttgtttattttgttattyggttagaaaagtttgyggagygyggggatggattaatygg

SEQ ID NO: 4655 - DNA, 201 bp, Artificial Sequence
  Description of Artificial Sequence: Synthetic polynucleotide
gagggyggggygggyggyggtygygtttttaatttyggygttgygtgtgggagyggtyggattagggaattagygttgtaatttyggattagtaaygttygttaaatgagtgtttaatttygattttttatgttttttagygtygyggttgagttttaggaggttttttggttaggtttttttygygttttggttttattt

SEQ ID NO: 4656 - DNA, 239 bp, Artificial Sequence
  Description of Artificial Sequence: Synthetic polynucleotide
ttygtgaatttygttyggggatattttatagtagtygygtttttatttttttttttttaaatygtttygggtttttgtygtygttattttttgttaaatygtttttatttttttagyggagttatagyggggygyggygtatataaagggggtyggagggtggagagtatagaaggagggagagatttygttagggttygtggtaygggtttgggagtagttatttattygattttttt

SEQ ID NO: 4657 - DNA, 201 bp, Artificial Sequence
  Description of Artificial Sequence: Synthetic polynucleotide
gaygttagtygygygggtttttygagttygygtygygtttagggatttggttygttttttgygtttttatttttttattttttttagaaatatagtaygygggttttttttatgtaggttattttttayggagttttaggttagttttggggyggtgaaaygaaggtgttaaggtatagtattttttygggaggttggata

SEQ ID NO: 4658 - DNA, 221 bp, Artificial Sequence
  Description of Artificial Sequence: Synthetic polynucleotide
tagttgttaatttygygygyggagtttttyggyggtgtagtttygtttyggyggygygggyggtatgaagattagtygtygyggtygagygtttttggtygtggttttgaatttgttggygttgttgttygttattatygttttttttattaygtattggtgttagggtaygtagygggtttttaagtygggttgyggttagggygggygygttaattgtt

SEQ ID NO: 4659 - DNA, 201 bp, Artificial Sequence
  Description of Artificial Sequence: Synthetic polynucleotide
gyggggaggggatggggtggygggagaattgtttttttttttagttataaatttattaggtttttaaattttttttggattttttttttygygttttygygagttygggatttaggggatggagaattyggggyggaggagygtygagttaggygggagggaggtygagtygtgggygggaggyggatyggygtggggttg

SEQ ID NO: 4660 - DNA, 246 bp, Artificial Sequence
  Description of Artificial Sequence: Synthetic polynucleotide
gtttygggggtttttagttaagtatygtttggtgttttyggtttagggtygtgtgagtyggaggttgagtttaygtaaggtttttatttgtatagattaygagttggagaattatagtatgtattgygtgtaatgtaagatgttygtgtgttattagtgtttggaggagggtaaatattttagttaygaagttaaggttttgggggttatgtggaaattatataaggtgagttttaagaaaattta

SEQ ID NO: 4661 - DNA, 223 bp, Artificial Sequence
  Description of Artificial Sequence: Synthetic polynucleotide
tygattatgattatttggatttggataagatgagtttatatagygaggyggatagyggttatggtttttayggggggttygttagygtttttattatttygtgttagaagttttttaayggygttygygtgtttttttyggttatgtygttatyggttatttatttgttatyggttttggtttyggtgtttygtaatttttgtattatttgtttttagtgtta

SEQ ID NO: 4662 - DNA, 201 bp, Artificial Sequence
  Description of Artificial Sequence: Synthetic polynucleotide
ttagggtayggygttagyggatttayggagaaggagaaaagttttattgtygtgtagaagtttaggttygggtgagaygtttgygaaggttgttagtagyggaagagaaggggygtttttygtgttgygtagtattygttygyggtaggtgggygyggagtttagagttgggagttaaaygtaaaygttggygagaagttt

SEQ ID NO: 4663 - DNA, 244 bp, Artificial Sequence
  Description of Artificial Sequence: Synthetic polynucleotide
gtttygttgttttagyggtygttgttttagaaaagttaaygagaattagatgtggtggttattgtygaatttttttagagtyggtgattggtttttagtygagggttttagttaattagtttgttgggtgggtttggagtttygtttygtttaggygttygyggagatttaggttygaggttggygyggygyggagagtgggttggaggtyggggygggaygygttgtgtagygggtaagygta

SEQ ID NO: 4664 - DNA, 201 bp, Artificial Sequence
  Description of Artificial Sequence: Synthetic polynucleotide
tttgttyggttygttgaaggttggttttgggtttgggggtagtgttygygaagggttgygatggtaggtttygttgttatayggtatygagggttttttygtttyggygttaggygtaygtttttttgttatatttttygyggggygygtygttagggttatttgtttttttaagtttygttaggtagttaagggtgagga

SEQ ID NO: 4665 - DNA, 457 bp, Artificial Sequence
  Description of Artificial Sequence: Synthetic polynucleotide
ttgagggaggggtygggttttygggtttgtagattygttatygygygtgygtatgygtyggtygygagttttygggtgtaggtttgggyggtttyggttygygtatttgtttaggygttgyggtttagygygttttaatttttagttygggyggagagygggggygggattgaagtatygtgttttttaaagtattttttygtygtyggtagttttggtttygtaaatgttttagygygtttaggygtaygtagagattggygyggtagttttygggttaayggtaygygagtaaagttggttggygatttgggataygtagtagaagttgaggttgtatygattttygtygtttygggggaggtatgggttygggtaggtttaggaggaagttgtatagttygaggttygggygggagtggygggtygygggtaagggaaygtatatttggaaggg

SEQ ID NO: 4666 - DNA, 244 bp, Artificial Sequence
  Description of Artificial Sequence: Synthetic polynucleotide
gygttttttttgygygyggygaggtygagaygtttttygyggtgatagygtgtaaggyggagattyggygygtttttagtttagggaaagtttaggygaygygatygtaagttygagtttaggtttttyggagtygttagggygygtygggttgtttgtttttttgtttttttttgtaggaatttttygtygttygyggtygggatttygggtttttttygggygtagattttagttatygttt

SEQ ID NO: 4667 - DNA, 206 bp, Artificial Sequence
  Description of Artificial Sequence: Synthetic polynucleotide
gagygtagyggyggggtatggaagaagagggttgggggygygygttatttgtaaaggttttygaggtttttttttagttttggtggtaatttygtttagygtygygtttttttttagatttaaatttttgttgggtttttygggtggyggyggyggygayggyggyggttgttggagttaagttttgtygttygtagygtyggggc

SEQ ID NO: 4668 - DNA, 203 bp, Artificial Sequence
  Description of Artificial Sequence: Synthetic polynucleotide
agagagatagtatgagaaygygtagagttgtatttygygggggtygggygttagtagtatygygttgttttatttayggygygtttgtttttygygttgygygtttagyggggygtygagttttagaaattttagtatatggtyggttyggyggttayggtggtygtagttgttttgtttttygagygttttttattgttttt

SEQ ID NO: 4669 - DNA, 266 bp, Artificial Sequence
  Description of Artificial Sequence: Synthetic polynucleotide
ygtgattatttttygttttattttyggggyggggttygttagaaattttaagygttygtaatygttttttttygtgggygggatggggaaattgaggttygaggtygtttygttggttggtgtaagaattagtttgtaatttaagttttgagttgttggygtttygtttygtgtagttgaatttaatttattyggggttgtgggtagygtttttttggggttgataygttatttygagtttgaggattaagatyggagtgatttgg

SEQ ID NO: 4670 - DNA, 242 bp, Artificial Sequence
  Description of Artificial Sequence: Synthetic polynucleotide
ttygaatttttttaaatttggyggttyggggygygtgggggggaygtttygttatttgygyggttataaaggagagatttatggtgtygttgtagttagygttygagttttygttgttgtygttgtygttgygggttagtygtttgtatagttggyggggatygggttgagtagygagygttyggagatygtayggygtattyggttgtttttgggtttttggttttagatttttattaggc

SEQ ID NO: 4671 - DNA, 201 bp, Artificial Sequence
  Description of Artificial Sequence: Synthetic polynucleotide
taaagtaaaataggataaaygatygyggygygtygaygtttggygggttayggttataaagygggttttagagttttttttaggyggyggtaaagggggygttygaggttatyggtaagagatagattattggygtttygggaaaatagagtggggaagggygagattgtgtgtttatttaygttygygygggtttgagtt

SEQ ID NO: 4672 - DNA, 201 bp, Artificial Sequence
  Description of Artificial Sequence: Synthetic polynucleotide
aygttggygaatgattatggaaataatatttaatagtagtgttttttatgttaggtatataatygttttggygtgggttgataattatgtttattttatygygtggtattgagtygatygtatatttagggtttyggtttttagggttygtttattygtttattgygtgaagtatttattttygtaggagtyggagtagga

SEQ ID NO: 4673 - DNA, 312 bp, Artificial Sequence
  Description of Artificial Sequence: Synthetic polynucleotide
tggtygtttttttygyggttaggygtattttgtagygtttagatygtygygtttttattygygtttttaatygygagygttygtttgggtygggtygggygttygagattygggagagattaggggttygtaaagtagaagagtagatttagaaagaaaaaaaaaaaagygagaagtgygagaaaaatatattgaatttagttaaatatayggtagatgaaaaaaatattttgtttagaagttaaaaaygagttttygagtygtgagatattgttgygttttygttaggygtgtaggtyggatgttaggggg

SEQ ID NO: 4674 - DNA, 203 bp, Artificial Sequence
  Description of Artificial Sequence: Synthetic polynucleotide
gygttggtagggggaggtttyggtaaygtttgggggttttaggttagtttttttygggttggaaggtatygtataggggttttygttaatttyggttttygygyggtygggatayggttatatttgttygygggggtttgttttttaggtygtygtaggtttttyggagtttaagaggattttataagtagttaaagttagyg

SEQ ID NO: 4675 - DNA, 201 bp, Artificial Sequence
  Description of Artificial Sequence: Synthetic polynucleotide
tttyggggygggyggygaggggygggagtttagagagtgtttygtttttgtttagtgttgggyggygygtggggggggtagggttttygtttttttaygyggtttygygtattttaaggattttaatttgttaggtgagtttttgtttyggggaggggygttgggggyggyggygaggatttagttgygygygygtatgyg

SEQ ID NO: 4676 - DNA, 283 bp, Artificial Sequence
  Description of Artificial Sequence: Synthetic polynucleotide
gtggtaaggtttggggattgagaggttyggtgagtgttagtttygtaggttgygtyggtgttyggtttttattttagttygggggttttaggtttttygygggttttggggygttggtgttygygtagttttagtygttttygtagttatygtygttyggtttygyggaggyggygygtagygggggygttygggygttgtttttttgaggtttygggggtttagggtggttygtagtgttattggttagggtttgygatttttggggttygtygtygtygtt

SEQ ID NO: 4677 - DNA, 201 bp, Artificial Sequence
  Description of Artificial Sequence: Synthetic polynucleotide
gaaygttttttagttyggtttggtattggygtyggtgttttttattttggttattayggtttttagggatttgtgggaggattatagtygttatygtttygattataagattaattatttgggttgtttggtttttagtaggtgagttgggygggygggygagygagygygyggtggygtagggtagggygtttygggaat

SEQ ID NO: 4678 - DNA, 247 bp, Artificial Sequence
  Description of Artificial Sequence: Synthetic polynucleotide
aggygtagatttaygagttggagyggygttttyggtagtagyggtatttgtyggygttygagygygaatatttggttagttttattygttttaygtttaygtaggttaagatttggttttagaattatygttataagatgaagygygttygggtygagaaaggtatggaggtgaygtttttgttttygtygygtygggtggtygtgttygttttggttagggayggtaaattatgttaygygtttaa

SEQ ID NO: 4679 - DNA, 427 bp, Artificial Sequence
  Description of Artificial Sequence: Synthetic polynucleotide
tagygygtttygggtttygygygtygttagtttttggttygttygtyggtttygtygygttygttagtttygtagyggagtttyggttyggtttygggtygtygttattaygtygygygtygtatttygygttaagaatggggyggttaagttgtttaagtygttygtygtygtygtygtygtygyggtygaggygttyggygtyggygygggtatggagygttygtagagtygttttagtttgttygtttttttygaggygttygttatttatttttygtgtatgaattttttygaygaygaggaygtaggtaagygygyggttygttttttagattttyggggtgtttygggatttaggttyggtagtttttttttygattygtgygtttttttttttatttttaattttttgggaaggygtttt

SEQ ID NO: 4680 - DNA, 246 bp, Artificial Sequence
  Description of Artificial Sequence: Synthetic polynucleotide
ttygggggyggttgtaygtggtygtggttttgaattttttgygggggtttygaaattygtttgyggggaggttagggygatagaggattygggagttatygttggtgygtggyggygtggagygygtttgttayggttaaggtgygggttyggtttyggtttattttaaggggttatygggatgygaagttygggaygttygtygtygyggtgatttyggygggggygtatttyggttgtgggtyg

SEQ ID NO: 4681 - DNA, 384 bp, Artificial Sequence
  Description of Artificial Sequence: Synthetic polynucleotide
tggtggyggaattttyggggyggtyggaggyggyggtyggggagtygagaagtaagtattagygttttaggatygygygygtygtttygygtygtttygygtygtttttyggtttagagtttttattttyggtttgtgagtttgyggygttggtggagttyggttttaggaagaggagtttattyggttttttttgattggatagtagygaggttttatygggygttttygyggtttaaaatygaagygggggygagggggaggtagagttygttttttgygygtygyggttgggagggagaggaggtgggagagaaggaagaggyggaggaggtagygggygtygaggttttgggattygtaggtaagttagatygaygygta

SEQ ID NO: 4682 - DNA, 415 bp, Artificial Sequence
  Description of Artificial Sequence: Synthetic polynucleotide
yggggggggtaggggtttygggtygyggggtgygggggttgygttaaattttygyggggygtttygggygtayggagggttyggygtttattygttygayggygttttatttattggygtttayggttygtaggtaaagygtggaaggagttgaaygyggyggagaagyggtttttygtggaggaagtygaayggttgygygtgtagtatttgygygattattttaattataagtatyggtygygtygtaagaagtaggygygtaaggttyggyggttggagttyggttttttgttttygggattagygttttygtagttatygttygagttttttttygyggygtttggttyggttygygtttttygygagttgttttygttgggygtygagttygayggtttggggttgttta

SEQ ID NO: 4683 - DNA, 543 bp, Artificial Sequence
  Description of Artificial Sequence: Synthetic polynucleotide
ygttggaagaaaaatttttygygygtyggtagaattgtagygtttttttttagtgatttygggagtttyggttgtagtyggttttgygygtttttttaaygaataatagaaattgttaattttaataatttagagtaggttaaygaggttttgttttttygattygaattaaaggtttttygtttygtgygttgttaygagyggtgttttttggggttttaatgtagygagttgtgttygaggggttyggaaggygtaagttgggtagygatatggggaaygyggagygggtttyggggtttyggagttttgggttagtatttaygttgttgttgttygtygyggygttattggtygtgtyggaygtattygggygttttttygaggaggaygaggagttagtggtgtyggagttggagygygtttygggataygggattaygygttttygtttgtaygtttttgattagtagttggatttggagttgyggttygatagtagttttttggygttyggttttaygttttagaaygtggggygta

SEQ ID NO: 4684 - DNA, 227 bp, Artificial Sequence
  Description of Artificial Sequence: Synthetic polynucleotide
tttagggygtagattttttattgtttttygggtttttttygggttttttttttgatttttttttttttttttttygagtttttgtttatatttaggttgygtttyggtttggttgttaaatagaaygaygtttttgygtagagttgattaggggtggyggygggaggtaaggttttyggtatyggaaagtaaagtaaagaaaaaggtattgtagttatygtttttgg

SEQ ID NO: 4685 - DNA, 323 bp, Artificial Sequence
  Description of Artificial Sequence: Synthetic polynucleotide
ttttgtttygygattggygggagtyggagtttttttgaattyggygtttatattatgggttgagttygtyggygtygagggagttagtgygattyggttyggygygtayggttaaggtaygygygttggtataygygggygyggataygygyggatatataygtgygggataygttttttttygayggyggygttaatttttyggtaagtttagygttttaygygatttgttyggtttttaygttggttatagyggttgyggggayggggaggaaggtagyggggtggttttaggggtttattttgtagggttttttygaygg

SEQ ID NO: 4686 - DNA, 279 bp, Artificial Sequence
  Description of Artificial Sequence: Synthetic polynucleotide
ggygtagattatttggaaggggttgtggatgtygtgygtggtgtagagtatygggtatatgtagtgtaaagtgtaygattyggtgttggttttgagtatygaggtgtaggyggygygggygtttatygtgagygtygtgttgttggygttygttgygtttttygtgattttggygggygygtagtgtattatttgygtggtttygggttyggttaaggygygtgtggtttttaygggaggygtgttttatttgttttgygggttgttggygttygtgtt

SEQ ID NO: 4687 - DNA, 261 bp, Artificial Sequence
  Description of Artificial Sequence: Synthetic polynucleotide
ttttygtyggtggaggtygyggttggyggagatygttaagttagaggaggggattygaggtttyggttgggygaaggttttggagggggagaagayggtygaggygtggaggggtagtygyggyggggygatttttatttgtttattgyggggtttgttygtggggtyggggtagatttygtaaaggaygygtagtttgtaagttygyggttygygyggygyggggatggggagygtgtgygtygaggagygygygtygag

SEQ ID NO: 4688 - DNA, 364 bp, Artificial Sequence
  Description of Artificial Sequence: Synthetic polynucleotide
tgtaygygygygtggttygaygygaggttyggtyggttygggttyggggygagattgggggtttgtygttgtygttatygttygagygtaggaaatygtygttatttgatttygttattaagtttaaggtgttttggatttayggtaagtatagygtygttgtagttggtygtgygtttttattatygtygttaggtttygaggtygygtttagttttagtaagaggaaayggaygtttagygataaatyggygtatayggtygaatayggtagttttyggattygygatttaaygtygygtttttyggggttgttygaggaggygatagttttygttgygttttygtygtttagggttygagc

SEQ ID NO: 4689 - DNA, 242 bp, Artificial Sequence
  Description of Artificial Sequence: Synthetic polynucleotide
tagggtggaggyggtgtttgattgtttttttgygtgtgttttgggaggtgggtttgttttggggatagaggtgttggaygtgtaggagtagatatgtygygygtttygaggaagygtyggaattattagaagtatagggaygygggtgtygagagtttttagtattgaaaayggggatttttttttttgtaagggattttttttttttgttttaatttatttttttagatttaagggaygtt

SEQ ID NO: 4690 - DNA, 285 bp, Artificial Sequence
  Description of Artificial Sequence: Synthetic polynucleotide
tagtttygggtyggggtggttgttttattttygtggtttagggaggaggygttgggtgygtatgtttaggggtgtgttygttgttagggttgtagyggtygttatttttaattagttgtaagtygagttgtttatttgggatygggtyggttyggygggtttggttttyggygaaggyggyggygttggtgygyggyggttggggygygggaygtaggtagtgygtggygyggttggygttttygggygtygttatygagygagggtgyggtttygggyggtygt

SEQ ID NO: 4691 - DNA, 222 bp, Artificial Sequence
  Description of Artificial Sequence: Synthetic polynucleotide
ygttatygttgtygtygttttttygyggagtgaygygttttgtagttaatyggggtagtygggggggaggttygggaggggttttgggyggagtygggtygtttttttattttaygggttyggggttgtttttttygaaaattttagttttaattgttttgggaatgttygaggtagagaaagggagygagggagtaagtaagaagttggaggattagtgtt

SEQ ID NO: 4692 - DNA, 201 bp, Artificial Sequence
  Description of Artificial Sequence: Synthetic polynucleotide
gtagygttttttggtttygygygtygttygggggtygttggttyggtgygtgtggtygtttygtygtttggttggagtttgtttygyggygtagggttgygtttygagggttygttggttyggtggtttggggtttgttyggtttagyggtttatggttyggttttygygttttagttttygtygtygtygtygtygtygt

SEQ ID NO: 4693 - DNA, 298 bp, Artificial Sequence
  Description of Artificial Sequence: Synthetic polynucleotide
tyggttttgggtggyggygtyggggtagygygttyggtygagtyggggagaggagygygggagattyggagyggagyggtaggagagygyggagygaagyggtaggagtagtttatagttaggagygttttttygtttttaaygtygygtttttttttttaaaayggtttaaaaaaatttattaattgtatggtygygtatttttaaaaaggtattygtygttatttggtttyggtgaattttaggaggyggaggaagggygyggggtgggtgyggtgatatygtgggaggtggtttt

SEQ ID NO: 4694 - DNA, 272 bp, Artificial Sequence
  Description of Artificial Sequence: Synthetic polynucleotide
tatttatttygattygaggttgtttattyggtttggtatgtttyggygtttttggggtttttgtatttygttggtttttygttgtggtgtttygtagttygattatttttgtgtttttaggagtttattttgggyggtagggaggygttgygtggggtttaygagttttaygttgttatttttattagtttttattttttaggygtttgttttttygtattgttaggttttgttttygtagtatttggtagatttgagttyggtttttgtta

SEQ ID NO: 4695 - DNA, 201 bp, Artificial Sequence
  Description of Artificial Sequence: Synthetic polynucleotide
tttagtaatatttgtagggttggtttttyggtygtttatttygttagtttgggtttttgtgtggagtgygtttttgtgtttttggttagtygtyggttaygtgtattttttgttaggggttggtaggttttttatttgtttaaattagaaatataaggtatagtggtttttagttgagggatggtatttttttttatgttt

SEQ ID NO: 4696 - DNA, 251 bp, Artificial Sequence
  Description of Artificial Sequence: Synthetic polynucleotide
taygtttttygygttygttygygtttgttttaggtttttatygyggttttttttgttttyggggtygttttgttttttatagattttattttygggggtygtttttaggattttygttygtttttttttgattyggtttttgttygtttygtttttttttttygggttttttatttttttttygtyggtttygatttygggggygtttyggatttgtttttygaatatttttagtttygtttttagtttgc

SEQ ID NO: 4697 - DNA, 249 bp, Artificial Sequence
  Description of Artificial Sequence: Synthetic polynucleotide
yggyggtttttatttggagtygtatttggggygtygagtttyggggtygyggaaagaatgygygtygttygtgygtttygtttgtygygtttggttattygtagtygtygygttygtatttgattatggagtgygtttttttgttygygtgtgttttttyggttgygggttygggttygtygaggggtttggygggattggggygygtggttaaggtaggtgtygtygagyggagtttygagagygggt

SEQ ID NO: 4698 - DNA, 249 bp, Artificial Sequence
  Description of Artificial Sequence: Synthetic polynucleotide
tttttagagttaattttttagatttggaggtttttaaggttttygtaatttagtgagtttyggggtattaataaattttygygggggttatygygttygygaaygtagagtttataygtggattttygygtttgtgatgtttygattygtttygggttttygtatagataatgtygygygtttttttygtagttatttygggattygygtttygygtygttyggaygtttttttgygtttgtyggggat

SEQ ID NO: 4699 - DNA, 201 bp, Artificial Sequence
  Description of Artificial Sequence: Synthetic polynucleotide
ggtygyggyggtyggggtyggtgtyggygtttttttgggyggtagyggygaggagatgggtttygtygtygtygtggtgttygtygtgatygtygyggtygtygygtagagyggygygggttygtattattattattattattattaygtygtyggttattattattattygayggtyggygygttyggygtygygggtag

SEQ ID NO: 4700 - DNA, 201 bp, Artificial Sequence
  Description of Artificial Sequence: Synthetic polynucleotide
atggtttaggyggtygtttygygygttttagtttygtygygygtttgagttyggtgyggygttagaagatagygygtagtygtttttgagtygtggaggyggggattaagttggaaggagtagygattttyggatygagtygygagtgtgygtygttygtygttygtyggatttttyggatttttygatygtaagtgtygt

SEQ ID NO: 4701 - DNA, 251 bp, Artificial Sequence
  Description of Artificial Sequence: Synthetic polynucleotide
atygygtagttygygttttattgtygatyggattttaygttgttgtttttagygttgygygttttgygyggattygygttgttggaygtygttatttygygtttggggtttaygygagtygygagtttttgtttgtttttgygttatttygatttygygttttgtattygtttygggttygygtttygygttygtaygtaayggtattyggttttgtataygyggttggttttaygygttgttyggygtyg

SEQ ID NO: 4702 - DNA, 201 bp, Artificial Sequence
  Description of Artificial Sequence: Synthetic polynucleotide
ggggtttygttgagttgagttttgygattyggtttatgtgaygtgagttttattttaatttaagtgtgaggaagygaatagygttttgaaaygtagaaaygtgtttattygaattgttaaygygagygtagagtttattgataaagtaaaataagataaatygggagttagaaaatttagygatttataggatttatygtg

SEQ ID NO: 4703 - DNA, 201 bp, Artificial Sequence
  Description of Artificial Sequence: Synthetic polynucleotide
ttttagaattygygggttattygggagtttttttygtagtattagtygaaagtttttagtgtygaggagggygggtagttgtttttttygatttygtttygttygygyggaygttttyggttttaygyggggattatttygggattttygtyggatttygygygttygyggttaatttgygtgtatttgygtttygygtta

SEQ ID NO: 4704 - DNA, 201 bp, Artificial Sequence
  Description of Artificial Sequence: Synthetic polynucleotide
aggtygagttygtayggygttttygtgtagttagyggttagtgatygygyggttygggygtttttygygygttttagttttttagayggggttyggaygyggaygttttttttgtagttttgttttgatygttagggatgggttttgggtatttagyggttgagggtggggagyggttagygtttgatgtttagtttttta

SEQ ID NO: 4705 - DNA, 337 bp, Artificial Sequence
  Description of Artificial Sequence: Synthetic polynucleotide
gtggtttygttttagggtygyggggaggygttttygtgyggggyggagttgttatygttttttttttaattttyggggattgtggtttttttttaagttygyggygtttttagttgttttttattygtttygttygttagtttttttttygygygatggtttyggygttgagttatgtttttaagtttaagtttttygtgattttgttygttatttygtttttgttgttgttattygttattttgatgttygttaaggttagttgtatttttaggtagtttttyggatattyggygttttgtgtttattaaygggtatygatttygggagttttgag

SEQ ID NO: 4706 - DNA, 201 bp, Artificial Sequence
  Description of Artificial Sequence: Synthetic polynucleotide
tgttttyggygttttaygtgtggyggyggttagyggyggtttaggaggtagtyggtgagygtttgygagtagagtggygggggtygttgataggtttygygtagtttagtttagtttagttaygyggtttataggtggggtttaagagtagtttggagtaattyggygttayggagaggggtggayggttttgtaygggtt

SEQ ID NO: 4707 - DNA, 201 bp, Artificial Sequence
  Description of Artificial Sequence: Synthetic polynucleotide
ttttttgyggygaggtygtttgatgaatttaagggtattagtgtttygygagaattttttgtgggttgtgaygagaattaagyggagygtaatttttatygtattyggataggatgygttgygtaatttgtygtagtttttttgttttatttygggtggttygaagttgtaattttgttaattttttattataygttatgt

SEQ ID NO: 4708 - DNA, 201 bp, Artificial Sequence
  Description of Artificial Sequence: Synthetic polynucleotide
ttttgtagttttgtttagattyggaagtygtygaggaagggaggaaggygggggtggggagagygygattttaagygttggygggyggygaggaggggtygtagyggttygaggaagygtttggaggygttaggggygtygagtttttagggaggtygygttttygggaagttttttatyggttgttyggagtaggatygg

SEQ ID NO: 4709 - DNA, 1216 bp, Artificial Sequence
  Description of Artificial Sequence: Synthetic polynucleotide
gaagcgaagaggggttttttgatttgtaatatagaggaaagcgtcgttttcgtttagtttggtatttacgcgtttatacgtattcggcgtcggtcgggtcgtttatttgagttttaaaagttgttgaatttatatggttacgtttcggggagcggggttttagatttggttcgtttaggttatttgcgcggcgttcgcgttcgttcgttttcgtttcgcggcgtcggttttcggttttcggttcgtcgtttttcgtcgttcgtcggtcgcggggcgtatagcgagttagagcgcggtcgcgcggggttttatgtcggtcggcgcgtcgtcgtcgttggggcgtatggtttaggttgggcggttcgcgggggcgtatatttttcggtcggggcgcggggttcgcggtttttttcgtcggcggtatagcgaaggcggtagcgaggcggggcgtgtttcggcgttgtcgcggcgtagtaaagggttggggagtcgcggtttcgtttttcggggcggcgaggagggaggtcggcggcgttgtcgtttacggtgcgtgtttttcggcgcgcggtttttgtttttagtcggagtttcgcgtcgatggggcggcgttgtttagggtttggggtgacgcgacgcggacggacgcgagtttttttcgcgttgtcgggtcggggggttttgttagaggtttcgtcgtcgatcggcgttatttaagttgttcgggggtttcgtttgagcgttcgttttgtagacggtcgcggttcggagattggtaggaggcgggtacgagaggcgcgcggggcgagggcgtcgtggagcgcggggcgtggggacgcgcggcggcggcgtcgcgcggaggaggcgcgcggggatttcggggtttcgtcgttcgcgtttatcgcgttcgtcgtagagtcgttcgcgttgtttagtcgttttttttttcgcgtttgttttttcgcgcgttcgttttcgtttttcggagtcggttttaatttcgttcgttcggttcggtttacgttattcgtttttttcgtttttcgaacgggagttcgagtttttggtttggtttcggtttttgttcgtcgttttattttgcgggggtcggggtcgtcgcgggtggtggggggcgttgtgtttagtaggggcgatagcgtaggcggggttttttgtagtttttttttttattttcggtcgcgtttcggtttttattttg

SEQ ID NO: 4710 - DNA, 365 bp, Artificial Sequence
  Description of Artificial Sequence: Synthetic polynucleotide
ggtcggtggcgtttatttcgtatcgcgttgtttcgttcggggtattatggtttggggttggattatgttttttttattttagtcggcgttttttatttacgcgcgttgagggtgcggtgagttgagtgcggggttaagtatgttttggcgtcgatttcgtttaggggtttaggatttggcgtttaaggggttttttggcgacggagattttcgacgtagtagcgattcgcggttgtttaagttgatttcgttcgcgtttcgagcggttttgggcgcgcggggtttcggggattggaggatttcggggggcggcgtcgcgtggtggtcggaaggggacgttaagttcggggtgggcgtcggacgtt

SEQ ID NO: 4711 - DNA, 201 bp, Artificial Sequence
  Description of Artificial Sequence: Synthetic polynucleotide
gcggaaagtaaggcgcgtttatagtcgtttttttttttggaagttcgcgtttatttttgcgcggcggtcgtttcggaggcgtcgggttgggcgtgaggacgtcgtatttattattgggttcgcgagcgtcgttagtttagtcgttttttttcgtaggttcgggggtagcgtatttcgtaggttttataagtcgttacgtta

SEQ ID NO: 4712 - DNA, 201 bp, Artificial Sequence
  Description of Artificial Sequence: Synthetic polynucleotide
gcgttggttgggtagtttttgggagatgaagcgacgtaggcgttttaggtattggttgtagagttcgatgtcgttgtgttcggcgttttttatttatagcggttttatcgttttggggtagcgttcgtagagcgttagttcgtgcgagaagtcgattatttcgtttttcgtgtcgtggatgatgagtacgggcgacgtgat

SEQ ID NO: 4713 - DNA, 201 bp, Artificial Sequence
  Description of Artificial Sequence: Synthetic polynucleotide
tcgttttggtcgaagcgtagttcgagcgtcgcgacgcgttttacgcgtaggaagtcgtcggggtcgcggtcgtatatttcgaatatttcgcgtaggcggcgtacggagcgtagtagagtcgcgggggcgttcgattagttcgcgtcgttcgttattcgggtcggttcgtagtttagttcggatttttcgttcgtcgcgttc

SEQ ID NO: 4714 - DNA, 201 bp, Artificial Sequence
  Description of Artificial Sequence: Synthetic polynucleotide
cgtttcgcgttatgtatatttattgtggtgatgagagttcgcgtttcgtgttcgttacggttattgtgcgtttaataaaaataaatattgtcgaggagtcgtcgcgatgcggggcggacgcgcggttcggaaaggggagggggttttaggaagagttatattcgcgagtcgggtttgggttaggggcgaggggagagcgtt

SEQ ID NO: 4715 - DNA, 201 bp, Artificial Sequence
  Description of Artificial Sequence: Synthetic polynucleotide
gtggttttttggtttttttaggtagttaatattataattttttttgggagggggttcgtagaagggcgcgcgttgtttttttcgttttttaagttgtagcggggcgggtcgggagttagggttagggtttggagatttgggaggggatcggtgttagaagcgaagagttagggttagaaagttaggttaattaaggggggg

SEQ ID NO: 4716 - DNA, 201 bp, Artificial Sequence
  Description of Artificial Sequence: Synthetic polynucleotide
ggagaagggggttcgtgtaaattttaggttgacgatcgcgtacgcgtttttcgggttattagttttgtcgtttttggtggggtatatcgaggagatcgtcgtggggaatcggggatcggattgtttgatagtcgagcgttgaagattattttttttgagtttagggaggtttggttgttttgagttttttatttttgggtt

SEQ ID NO: 4717 - DNA, 213 bp, Artificial Sequence
  Description of Artificial Sequence: Synthetic polynucleotide
ttttgcggttggttaggaggagtttttcgtcgtttttattttagtcgcgtcgggcgttgggttcgatttttagtatttttggtattgatgtgtttggtgcgcgttgagacgcgaacgttttgtaagatgagtttttatttattcgtttttttttttttttatttgtttattttataaattgagtgtttggttattttggtttaggtaagaggt

SEQ ID NO: 4718 - DNA, 201 bp, Artificial Sequence
  Description of Artificial Sequence: Synthetic polynucleotide
gtttagcggtttgtatcgagagttaggagaggtttagatcggatttcgatttttcgaggcgcgggagtttacggagcgcggtgggcgcggcgttcgggtcgcgtagttaggtggggagcggcgcgtagttttagattcgtaggtaggtagcggcggattgtatttgtttcgtttcgtagcgttttttgtttgtcgtttttc

SEQ ID NO: 4719 - DNA, 201 bp, Artificial Sequence
  Description of Artificial Sequence: Synthetic polynucleotide
gcgttcgaggtcggcgcggtggggatcgcgggtttattattagttaagtttagttatttaattatttgtagagttgttgtaggtataggtttaggttttcgttttttattttttcgcgggtgatgcgttttgatagcggtcgcgggagcgggggtaaaggcggtagttggggcggcggcggcggtacggtcgagtgtttcg

SEQ ID NO: 4720 - DNA, 201 bp, Artificial Sequence
  Description of Artificial Sequence: Synthetic polynucleotide
tcgtaaggggtattcggttttgtgcgcgggggcggcgggggttttgcgcggggtcgggttgggtcgggttgagttggttcgtttcggcgtcggggattacgcgcgattggttagattttgtcgtgatttttggaaaattgtgattattttatatgttttgtttagttcggattttttgcgttaacgagttaggtttttttt

SEQ ID NO: 4721 - DNA, 324 bp, Artificial Sequence
  Description of Artificial Sequence: Synthetic polynucleotide
cggggttcgggttgggatcgcggggtgggcggtttcgagagcgtttcgtagtggttggagttttgggcgttgtaaagcgtgtttcgtcgggttttcgagcgtttcgcgttttcgtttcgttatgtttttgttgttggggttgtgtttggggttgtttttgtgtgtggggtcgtaggaagaggcgtagagttggggttatttttcggagtaggtaagtggagtcgaggggagtcgggtttcgggcgcggtcgttttttttttttcgtcggttcggtcgcggagtttttgttcgggtttttttcgatcgttttttaggtttttatt

SEQ ID NO: 4722 - DNA, 201 bp, Artificial Sequence
  Description of Artificial Sequence: Synthetic polynucleotide
gagggggcggttggaggattcggatttttaagaatttggttttgggttttgattcgggcggtcggagagaaggcgaagaagaggtcgagtagataggcgcgcggcggacgcgagagaaggacgcgggcgaagcgtttaagacgttcgtttttagggtcgtcgagttttttttttttttcgtttggcgcggtagtatcgcgg

SEQ ID NO: 4723 - DNA, 330 bp, Artificial Sequence
  Description of Artificial Sequence: Synthetic polynucleotide
agtttagtttagttaagtagtagagagaataggacggaggtttttattttttagggattgtagcgtttttaaatcgtttatttgcgacggtttcgcgagcgtgcgtagtttagtttttttcggacgttttcgttttcgttcgggtatatcgtgtttcgtatcgaggtagagaggggtacgcggattttagtttttgcgagtttttttgttcgtcgttattttatatttcgtattgttttagttgtcgttttagaagatgtatcgtttggcgcgtaaagcggtgtacggtttttagttcgcgcgtagtagtttggaggggcgttagagttt

SEQ ID NO: 4724 - DNA, 293 bp, Artificial Sequence
  Description of Artificial Sequence: Synthetic polynucleotide
gcgttttagttcgtggcgttgtcggcgtagatttcgcgtggggatcggcgaggttaattttttttgcggttcggggtcggtagagtacgtaaggggtcgcgggtcgcgtgggtttgggcgcgtcgtggtgggtaagcggggttagcggagcgggaattcgtatatttttcgagcggagtcgaggataggttcgtgcgggtcgcggggtttttttggcgttaggaagcggcggtcgaaggagataacgagaacgtagtttcggtttagggaggtttaaaagttgagatgttgaa

SEQ ID NO: 4725 - DNA, 201 bp, Artificial Sequence
  Description of Artificial Sequence: Synthetic polynucleotide
atcgtcggcgtcggtagttagagcgggatttagtttttatcgcgttttttattggagtttttttcggtttttcggcgagtgcggttcgtggggagtgggcgtcggcgcgaggaagtttttcggttcgggcgatttcggtttttgagcggtttttttttacgtcgtcgttcgttaggtcgacggaggatcggggcggggacg

SEQ ID NO: 4726 - DNA, 201 bp, Artificial Sequence
  Description of Artificial Sequence: Synthetic polynucleotide
cggcgttttacgttttttttttggagtaaattcgtttcgttttttttttggagtaaattcgtcgtattttcgtttgtatcgaaattttgagcgtcgtttcgcgttatttttagttcgcgttcgcgttgttttttttttcgggtcgtaggttgagaggttgggtcgtattttggttacgttttgttcggttttagcgggata

SEQ ID NO: 4727 - DNA, 226 bp, Artificial Sequence
  Description of Artificial Sequence: Synthetic polynucleotide
tcggggttgttagggcgtcgggttcgtgcgcggatattgggggcgtattcggttttcgggttaggcgcggttggagatttcgaggttggggttttgaagcgcgtaagtatttttttttttatcgcgtttttgtaagtagtttgaagttttaagtcgttgtttacggattttcgtttttaattttttaattgaaaaaatttgtcgaggagagtggaggtatcgttat

SEQ ID NO: 4728 - DNA, 363 bp, Artificial Sequence
  Description of Artificial Sequence: Synthetic polynucleotide
tattcgggcgcgggagtacgggcgggtcgggggcgtttgggtcggtttgtcgtggttcgggggttcggggcggcgcgatttatttggcgttttcggggtcgcgatttttttcgggaggtgtttgcgaaggcggttttgtcgcggtgggggtggggaggttagggtttcggatcgttggagttggggtcgtagttagtttttggcgagtgttttttggttgttgtcgtaggggtttgttttttcggattttttttttaatttcgtcggatttttttttttttttttttacgttcgttaagtttatggtttttgtaatgcggtgggtgtggttatttagtaaattgtaattgtggttttttgtaa

SEQ ID NO: 4729 - DNA, 201 bp, Artificial Sequence
  Description of Artificial Sequence: Synthetic polynucleotide
tttttcggagtgggggattgcgagggggtttcggttttacgaggtgcggaggaagagttcgaggtttggggcgaggcgcgcgggatagtggggttgacgcgtggtttcggcgtcgcgcggtttttcgaatttcgagtttcgcgttcggcgcggtcggggtttttaatcgttttttcgttcgtcgggatttttatcgggtcg

SEQ ID NO: 4730 - DNA, 201 bp, Artificial Sequence
  Description of Artificial Sequence: Synthetic polynucleotide
ttcgttcggcgttgtattttttcgtggttcggttgtaaggatttgcggtggaggtttggcggaggcgggttcgcgttttagagagagcgttacgttattcgagaaggcgacgttgggggttgttgagttttttaattttttttggcgcgttttgtttagaagtcggggagtttttggtcggcggttggcggggaagcgcgg

SEQ ID NO: 4731 - DNA, 267 bp, Artificial Sequence
  Description of Artificial Sequence: Synthetic polynucleotide
ggtgagttattgggatttcgttgttagggagtaagttggtaggtaggaagtagttaagatttgggggaattttttttagggaacgaatatagagaaggacgtatttgaaaatttcgtcgtagttattttttttttatgggaaagtttcgatttcggcgggtttagcgttattcggtttttcggggtgtggaatattgagcgaggtaggtgcggcgggagtatgcgcgcggggcgggtagggggcggttttcgcgtttttatttcgcg

SEQ ID NO: 4732 - DNA, 707 bp, Artificial Sequence
  Description of Artificial Sequence: Synthetic polynucleotide
agggaatggggagggttacgtatattttgtgcggttcgagtggttcggatggtatagtttaggtgttcgggttaaagttggtatttttaaagtttagaacgtaatttgggcgcgttagtataaattcggttttcggtttttttgaagttagttaagttcgtatagggtttttagcgtttggaaatttgagaggcgtggaagggtggggagtttcgcgaagtttttagtttttgggtgtttttcggtttcgcgggggagcgggtttggagttaaatcggtcggtcgtaggttggagtagcgggcgtcggagcgcgcggtggggatgttcgaaaaggagttagaggtttagtcggagagttcgagaatacgagggatgtttattttgtaatatggttttaagtttttttttgtttacgcggaagcgtttttcgttttatttcgggttgtgtagggtcgtttcggcgattaagtcgttttcggagtcgggtattggggagtcggtgttgcgttcgttgttggagtcggggttcgattgcgtcgttaggtagtcgggttttttttgggcggttatggtgggcgcgtagcgttcgggttttcgttgtcgtcgtcgttttgtttgcgttgtcgttttcgttcgtcggtcgggtttaattggtttttagcgtcgcggcgttagttcgtttttttgtagtcgtcgacgttatcgt

SEQ ID NO: 4733 - DNA, 201 bp, Artificial Sequence
  Description of Artificial Sequence: Synthetic polynucleotide
tggtgttgagtgcgggtcgggtcgtttttcggcggcggtgggtgggcgcgcgagggcggagggggtcgggagttttggtttcgaggtagcgaggagagacgggtaaatagtagagcgttaagttaagtttttaaagtgttaatagttgtagaagttcgaattttagcggttttaggggcgcgggtatagggttttgggttt

SEQ ID NO: 4734 - DNA, 201 bp, Artificial Sequence
  Description of Artificial Sequence: Synthetic polynucleotide
gttgttcggggttgttgtataagtcggtgatattgttttgcgggtttacggtttgtgagcgttgcgtggagttggggttcgcgcggttacgggcgcgggcgcgggcgcgggcgcgtgaacgtagtgttgagtcgtttgttggagaggtttttttcggtcgagtgttcgttgcgtaggttggagggttaggcgcggagtttg

SEQ ID NO: 4735 - DNA, 201 bp, Artificial Sequence
  Description of Artificial Sequence: Synthetic polynucleotide
agttagcgcggttttcgggtttttgcgtttatggcgagggtcgcgggggaatagtttttggtaggtaatttgtcgggtatttatttgagtttttcgtatcgcggttcgaaaatttgggagcgttttaggataaagggttagttttttggaattagtcgtgtgtgattagtgtgtgttagttcgtatgtgggggttttagtg

SEQ ID NO: 4736 - DNA, 201 bp, Artificial Sequence
  Description of Artificial Sequence: Synthetic polynucleotide
gttgcgtaggtatcgggtttcgttcgggcgtcggggtagggttgtcggggttagtaggtttttcgcgttttttttggcggggttttaggggttggattgcgggttttttttgtttttttttcggggtcgagtaagttcgcggggggtgtttttaggtagtaggagggtgaggtaggataatttttaggttttgtagttttt

SEQ ID NO: 4737 - DNA, 203 bp, Artificial Sequence
  Description of Artificial Sequence: Synthetic polynucleotide
atttttaaagaatgataaaataaagaagcgtacgttaggtttttaaggagatatcgtttttttttttttattattttttatttttattagattttttatcgcggattaaagatgaatttgttattaattaagtttttgtttaagttattttatttttcgtagtttttttatttgtcggggcggtgttcggcgtattttaggtt

SEQ ID NO: 4738 - DNA, 201 bp, Artificial Sequence
  Description of Artificial Sequence: Synthetic polynucleotide
tgatcgggcgtcgaaacgtcgggagtcgggggttaagggttcgagttaggaggtttcggagtagtagtcgttcgttttttacgtcgtcgtcgtcgttttcgcggttgtttggatacgggataatcgatttggggtttcgatcgtagtagagtcggaggggtgggtaggcgcgggttcgggagacgcgcggggaaacgcgcg

SEQ ID NO: 4739 - DNA, 201 bp, Artificial Sequence
  Description of Artificial Sequence: Synthetic polynucleotide
ttattttaaagcggtagcgtatttttagagttggttttttttttcgtttcgggttttcggatcggttgtaggagttttttttttcgggtcgggcggcggcgtttggcgttttcgggttgggttattgttttatgtttttttttgggcgtttggcgcgtgttttatcgtcgttatcgcgtttaaaggttaggttggaagttc

SEQ ID NO: 4740 - DNA, 208 bp, Artificial Sequence
  Description of Artificial Sequence: Synthetic polynucleotide
gggggcgttttattgattttttttggcgtttgtttttttttttaggttgcgttttttttatttattgcgagcgtgagttagcgttgaaggtttagagcgcgttgtacgagtagaagattttgttcggggtaagtggcgttcgtcgtggcgtaagcggtcgacgcgtcgatagggggcgatttcgggaggtcgggcggcggcgcggcgc

SEQ ID NO: 4741 - DNA, 201 bp, Artificial Sequence
  Description of Artificial Sequence: Synthetic polynucleotide
tattgatgaatgcgcgttcggattttcgggcggattttttttaagtcggttcgtttttttagtttaaataaataaataaagttagatggaagaaaaaagcgtttattttattttcgtcgtcgtttcgttcgttatttttgtttttgtttcgttcgtttggcgttttaatagagtatagtttggtggataaagtttttttat

SEQ ID NO: 4742 - DNA, 201 bp, Artificial Sequence
  Description of Artificial Sequence: Synthetic polynucleotide
gaaaggaaaaagcgatatttttgtttcgtatagagttaaatattggaagtacgagatagtcgacgtggattaggattattttggtttttcgtgcggcggcggcggcggcggttgcgcgcgggttttttgtggcgcggttttggggcgcgggcgcgggcggcggcggggttgcgggagtcgtcggggcgggaggcggagcgc

SEQ ID NO: 4743 - DNA, 595 bp, Artificial Sequence
  Description of Artificial Sequence: Synthetic polynucleotide
tttggttttcggcgttcggggttagcgtagttcggggcgagcggggcgcgggtcggggagggggagttgttcgcgtattttatttttttttttttcgggcgggcggcggcggttcgttgtatatatttcggcgtatttcgttaggtcgcgtatagcgtttcgagtttaggcgttttttcgtttttttttcgcgttttgcggcggcggcggcggcggtagtagtagtagtaatatggttgttgatgggtgtttggggtggcgttggcggcgggaggagttttttcgagtttttgcgtcggttgttcgttgttagttatggtaaatggtggcggcggcggcggcggtagtagcggcggcggcggcggcggcggaggtagtagttttagaatgagtagtaatatttacgcgaattattttagtttagacgcgttttttttttttttttttttttttttttttttttttttttttttttttttttttttttcgtttttggtttacgagtttaagatggatgcgtttattatttcggtgattatggaggtgtcgtgcgatagtcggggttaacgtatgtggtgggtttttttggtttttt

SEQ ID NO: 4744 - DNA, 201 bp, Artificial Sequence
  Description of Artificial Sequence: Synthetic polynucleotide
tttttttttttcgtttttttttttttttggagaagagagttggtgttaagagttagggattttggttgtgtgtttgcggatttgtagtggcggcggcggcggcggcggcggggaggtagtaggcgcgggagcgggcgtaggagtaggcggcggcggtggcggcggcggttagatatgaacgtcgtttcggcgtcggcggtg

SEQ ID NO: 4745 - DNA, 269 bp, Artificial Sequence
  Description of Artificial Sequence: Synthetic polynucleotide
tttatcgatcgtattatttgatcgcgggaaacgaaatttgagtttaggaatttgaattgttttacgtacgttcgttttcggataaattttttagaggatcgtgatttttttatttagagattatttagggagatgttttggatgggataagtagataaatggcggttcgaggaaaatgtaggaaattttatattgtagacgtttaagtattaattgtttgggtttcggggtagggaacgggagatattatttatcggaaatattatatt

SEQ ID NO: 4746 - DNA, 201 bp, Artificial Sequence
  Description of Artificial Sequence: Synthetic polynucleotide
cgcggtcgcgaggcggggttggagggcgttgcgggttgcgcggaggttgcgggaagcgcggggagtacgcggagttcgattagtagggagatcgcgtcgcgtcgggtataggtacgggattcgcgttttaggagggcgtagcgagaggcgtattgcgtatttaggggttgcggtttcggtcgtcgtgcggtgataagttga

SEQ ID NO: 4747 - DNA, 267 bp, Artificial Sequence
  Description of Artificial Sequence: Synthetic polynucleotide
tgaaatttagaggaaaataaaaatgtagcggtttttacggaggtttttggtttgtaggatatttgagggtggagataaggatgtcgcggagggaggattcgggagttcggtcgcgttttttagtttcggtattcgcgtttagcgcgtcgcgtttcgcgtttttcgcgcgtggtcgtttttcgcgggtcgggtcggggttgcgttgttatttagcggtcgcgcgtttagcgtcgcgttatcgtttttgtaggtcgtcggggtttttgt

SEQ ID NO: 4748 - DNA, 287 bp, Artificial Sequence
  Description of Artificial Sequence: Synthetic polynucleotide
ggtttagatttcgcgagtttcgggtttcgtttattcggtcggcggttttttcggggcggagcgcggcgtttttggagtcggtatttcggatttcggcgtcgtttcgcgtatcgttttcgttttagtttttagtggcgcggcgttttttcgcgatattcgcgggtttttaggagcgagtcgattttcggttgggtttggagtcggggttaagtttattcggagggagtacggagtttatttagttgtttttgggggtaggaggtttaggttttattttgtatatcgtt

SEQ ID NO: 4749 - DNA, 201 bp, Artificial Sequence
  Description of Artificial Sequence: Synthetic polynucleotide
cgatttggtattagcgcggaggttattttgcgtagtcgggtaggtacggcggtttttaggtattttcgtagtagttttagtttttggttcgcggcgtcgcgagggcgagaattcgtgggcgtcggttttttttttcgtcgtcggtgttttgtaaagtggaggtcggcgttttcggcgttttcgtcgcgttcggggtaggtc

SEQ ID NO: 4750 - DNA, 201 bp, Artificial Sequence
  Description of Artificial Sequence: Synthetic polynucleotide
cggaggtttacgttgagttcgcgtagcgcgtacggttcgtcggcggcggtggttttcgcgttgcgttgtgttcgattcggttcgcgcggatttcgttcgcgttattttacgcgtaggttttgtagcgtttttaggagtagtagcgttcgtaggggatcgtcgaggtcgtcggggttatttgggtagagcgcgagtaggcgc

SEQ ID NO: 4751 - DNA, 286 bp, Artificial Sequence
  Description of Artificial Sequence: Synthetic polynucleotide
gcgcgggaggcgtcgggggtcgcggaggcggggcggggaggggtcggcggcggcggcggcgcgcggaggagatcgtagtgcggtcggcgttaggattcgcgggggttttttaggtcgcggcgtttttcgtttttttttatttttcgattttttttcgtttttaaaatgaggaaacggagtaattcgttttaagttgtgtagtcgggatcgtttcggggtgtgtagtcggttcgcggaggtttttttgggggcgggcgcggggcgcggttcgggggcgttttttgag

SEQ ID NO: 4752 - DNA, 244 bp, Artificial Sequence
  Description of Artificial Sequence: Synthetic polynucleotide
aatgtttagtattatttaaaaagaaaattatatatattagttaatgatatattttaatttttaataaagttggtatttttttttgattatagattttgtcgtggtaaattcgggtttcgacgatagaggtagcgtagaagttcgtttttaaatgagataattttattaaaattataattttttgtatttttatagcgtttttttagtggcggagattttaggtgttttacgttagggtttatta

SEQ ID NO: 4753 - DNA, 201 bp, Artificial Sequence
  Description of Artificial Sequence: Synthetic polynucleotide
gttttaattttttttcgagatttcgggcggcggggattttttttcgggtggttgcgtgcgcgtttagtaattcggtgggtggaggtttggagtttcgttcgcggtcgttttcgttgattttttagtgtttttgtttgttttttagagtttaggtagttagtttttcgttaggaaggtagagtagcgagattttcggtttac

SEQ ID NO: 4754 - DNA, 372 bp, Artificial Sequence
  Description of Artificial Sequence: Synthetic polynucleotide
ggattcgtcgtttaggttcgcgtggggatcgtagggaattcgcgttacgtcgggggttattgtttatcgcgaggtgttgaagtggtttcgtgatcgtcgcgggtcgtggttgatatcgcggagaagttaggatttttatagtttttgttagatttgaaagtaagttggaaatcgatagttgttttagttgttttagattttaatttggtttgggttttttttttttttatttgaaaatagatttagggtaatgtttaagagaattttaatcgacggaagtggtcgggaaattttgttttcggtattgagggatgttatcggagatttttttgttttaggtttgtcggagtttattatattcgttaatgttat

SEQ ID NO: 4755 - DNA, 201 bp, Artificial Sequence
  Description of Artificial Sequence: Synthetic polynucleotide
aattttttcgtgttttttgtataatttgggagagacgtagcgttgtgggtgtagagttgtttagagagggttttaggttagggtagggaagagataggacgtcgcggggttcggttgtcggcgttgttgttattttatggttgaaggggattgaggtcgaattgggtaaggagaagtcggtcgtagattgtggagttgatt

SEQ ID NO: 4756 - DNA, 247 bp, Artificial Sequence
  Description of Artificial Sequence: Synthetic polynucleotide
ggggtaggattttagaagttatttaattagggacgttgggttggaaatcgtttaattaggtacggggtaggagaggatagggcggttttcgggatgtggcggggtttttgtttttggttgtagttggagttttgcgtttcgttttcgtttttttgtgttttttgttgttagaggtttagtttttgtggttttgtgatttgcgggtattgggggatttatagttaagacgttaggatttttcggaagt

SEQ ID NO: 4757 - DNA, 201 bp, Artificial Sequence
  Description of Artificial Sequence: Synthetic polynucleotide
tcgttttttttttcgggatgtcggatcggtatttttattatttttaggtttttagggggttttggcgttttagttgtggattttttaatattcgtaggtcgtagggttatataggttgggtttttacgtgtagaggatataaagtagatagacgaaaattggagtttcggcggtagcgagaaataaaggtcgcgttaaatt

SEQ ID NO: 4758 - DNA, 201 bp, Artificial Sequence
  Description of Artificial Sequence: Synthetic polynucleotide
ggattttgagttggggatcgtttaattaggtacgtaattggagcggatagggcggttttcgggatttggcggggtttttgtttttcgttgtagttggagcgtttggtttcgttttttttgttttgtgttttttgtttttagaggtttagtttttgtggttttttgatttgtaagtattgggagatttatagttaagacgtt

SEQ ID NO: 4759 - DNA, 235 bp, Artificial Sequence
  Description of Artificial Sequence: Synthetic polynucleotide
atttcgttttttgtaagtttgtaatatttcgtatttagattcgtaatttaggcggaggataaagggttgtagcggagggcgtagagtagatgtttagggcggggtagagggggcgggaagttggcgttacggtcgcggcgagggcgagtagtcgcgcgttttcggtgttaggaggaatgttcgtagagcggaggttggtaggcgcgagaggttttaagcgcgtagttcgattaag

SEQ ID NO: 4760 - DNA, 201 bp, Artificial Sequence
  Description of Artificial Sequence: Synthetic polynucleotide
gcggtatttcgttttcggttttgcgcgtttatttcggggcgcgtcgaggttatcgtagggtatttatttggtatttgtttttgagtgtgtagatcgtcgcggtttttatttgggtttttaaataagttttagggagaaagaaggaggtaaaaaaaaaaaatttaattatgtaaatggatttcggattgggaggcgcgggat

SEQ ID NO: 4761 - DNA, 201 bp, Artificial Sequence
  Description of Artificial Sequence: Synthetic polynucleotide
gtcgcgttaacgaacgtaggcggcgggaggttcggcggcggggttcgcgtttttgtatcgcgatcgcgttagaaaatatttcggggttgggcggcgtttcggagacgtatttttttgttatttttatcgtttttggtaacgattattaatgttattatgttttatttttttttattttttttcgtttttagagtcgcgttc

SEQ ID NO: 4762 - DNA, 201 bp, Artificial Sequence
  Description of Artificial Sequence: Synthetic polynucleotide
aaagagggagaaagagattaaaaaaagaaaaagataaggggagggggaaggaaggaaggagagaaggaggaagaagtttggggtttgttgttttaggagcgtttaggtagtcggtgttggagcgcggggcgttcgttttcgtcgggattgtcggtttcggggtttgcgagagcgttagagttttagtcggcgcgttcgggc

SEQ ID NO: 4763 - DNA, 201 bp, Artificial Sequence
  Description of Artificial Sequence: Synthetic polynucleotide
gtttttgcgcgcggaaaggcgttggaggcggttttatagtcggggaggttagcggcggcgtatttgtattttgggagacgtttggatttagtttaagttcgtaggttgggcgagcggagatttttgattttatcgtgtgggtgagattattgtttttcggtttaaaagaaaagaaagtatgttgtgaatttttgaaataaa

SEQ ID NO: 4764 - DNA, 201 bp, Artificial Sequence
  Description of Artificial Sequence: Synthetic polynucleotide
tggaatttacggcgtttcgttcgtttcgcgtttaggaatattgtgcgtttagcgtagatgcgtttttacgattttttgtttggttcggggttatgtggtcgcgtatcggtttttgaagtttttatttgattgttggggaaggcgtttagaattaggagcgggttggttggggattggttttcgcgttgggtcgtttcgttt

SEQ ID NO: 4765 - DNA, 296 bp, Artificial Sequence
  Description of Artificial Sequence: Synthetic polynucleotide
tcgggggtgggggtaagcgttacgtgcgcgttaggtttttggtgtgttcggtaggcggcgttgcgtggttgcggttggtttcgagggtgcggggggcggcgattcgggagggaaaatttttgttttttttcggggtttgttttgttcgttttttaaattcgttttatatttttttcgattttcgtttttgtaagcgttatttgtagttttatcggttttcgtaacggtggtggtggttggtggggggtttcgaagtttgtttttggttagtcggatttcggtgggagatggaggta

SEQ ID NO: 4766 - DNA, 201 bp, Artificial Sequence
  Description of Artificial Sequence: Synthetic polynucleotide
gtcggtcgagtttcgggagtcgaggttggaaacgttggagcgggcgttgtttatcgaaggcggttcgggatcgggacgcgggttcgagcgatcggagcgcgggttgtcgtggcgttggtcgtagtttaggttgatgtcgttggatcgggcgttgtcgttatcgtcgtcgtcgtcggatttcgttaggttggttcgtgggtt

SEQ ID NO: 4767 - DNA, 201 bp, Artificial Sequence
  Description of Artificial Sequence: Synthetic polynucleotide
attcgttattgtgtatttggacgttatttgtagatttagcgtttgcggggatttcggaaacgggagagcgggttttcggaaacggtgattaatgggaaacgtgattagatgttattaggcgaatagttcgtttttaggtaatatagaaggaagagacgtttttagttattttaaaatagacggagtttttagttaatggat

SEQ ID NO: 4768 - DNA, 266 bp, Artificial Sequence
  Description of Artificial Sequence: Synthetic polynucleotide
ggaaatcgttagttttgagcgtcggattttttgtgttgggtgggagtgggggttcgcggttttggtgttttaatttttggaggaggacgtcgggcggggcgatgtttgtgtttgtggttttttgaggtagtgggagtggcgtgtgaaggattgtgagagtttggcgtgaagtgattgttatttgttagatattcgtttggttgagtgtggtttcgggatcgtgttcgtaagcggatttcgtggaggcgtttttttttttatttttt

SEQ ID NO: 4769 - DNA, 201 bp, Artificial Sequence
  Description of Artificial Sequence: Synthetic polynucleotide
taaagaagtcgcgggtatcggtttaataaggtgtagcgaatagtcgttcgttttcgttttaatttatagttttatattttacggtgttattgattttttcgtatttagttatataggacgtggataggtatacggggtgatagtttcgtattgaacggtattaatttttattcgtatcggagttatatagatggtttgcga

SEQ ID NO: 4770 - DNA, 228 bp, Artificial Sequence
  Description of Artificial Sequence: Synthetic polynucleotide
aggatacgttggatagtttcgaaaagatatagtgggtggtttcgggcgtgggtaatcgggtgcggaattatagcgtattcggagttgcgaatttagacgcgggtgattgttgattttttgttttgtcgtttttatttgtgtatgtaggtggcggttagttggggttagggaagcgtggagggtgggttttaatcgagttaagaaaagtttggggtgttttgaattttg

SEQ ID NO: 4771 - DNA, 248 bp, Artificial Sequence
  Description of Artificial Sequence: Synthetic polynucleotide
tcgggattgagtttttgtagttttgaggtttggaggttcgggcggtagtaattgtgtcggattaggttcgtgggtgcggtttgtggtgtagttggagatcgaggtttcgcgtattttcgttcgcgttttagttatttaggttcggtcgtagcgaaaaggtttaagagggaagttagaggtgaacgttttaggatgaaggttttttgtaaaacgttgggatttagatttggggtgggtgtttggggttt

SEQ ID NO: 4772 - DNA, 387 bp, Artificial Sequence
  Description of Artificial Sequence: Synthetic polynucleotide
aagtcgaggtgttggaggacgtgttgcgggagtagttcgggtcgttgttttagttggtcgttgtttgtcggtttaagcggttgttttcgggcggttattcgtttattgaaaatttttagttggtgttggagcggcggcgtgtggttaacgttaaggagcgtgagcgggtgagggatttttagggtcgacgttcgttttttttttttttgttttattattaaatatttggttaatattcgggggttcgtttatcgtttattttcgttcgaggcgatttcgagttttcgaggttttttacgtttttagtttgttaggagaatggtagtggttttttttttttgtattttcgtgtagttgttcgttggcggtcgttgcggtggtcgtttc

SEQ ID NO: 4773 - DNA, 203 bp, Artificial Sequence
  Description of Artificial Sequence: Synthetic polynucleotide
cgatttaggttttttagttttcgtttagtttttcgcgtgcgggcgtcgggatcgtagtatttgtgacgtcgaagtttagtaggtcgtagacgggagttacgcgcggttttggtatagggtaaaaatttacgtttaggtaggcgggtagttacgatgtcgggtaagtttagggtagattttcggtggcgtatagggaagtagcg

SEQ ID NO: 4774 - DNA, 203 bp, Artificial Sequence
  Description of Artificial Sequence: Synthetic polynucleotide
tgcgaataagattaaggcgaggtgaggtttaggttttcgggattgatagcgtcgcggtagggggttcgaggcgggagttggggattttagcgttttttacgcgcgttttacgggggttgtcgttaataaaggcggagggtaagggtgcgtttatttaagtaagggggacggtgggtcgttcgggttgagtagcggagcgtagc

SEQ ID NO: 4775 - DNA, 312 bp, Artificial Sequence
  Description of Artificial Sequence: Synthetic polynucleotide
ggtttaggaggagtcgcgtcgggttcggttataagaggtcggttagtaggcgtttcgttagtattcgttcgatttcggttcggagtatcgggcgtttagcgcgggtgaaggcggagtcgtagggttggtttttaaagggatgttttcgttcgagcggcgagattagtttcgttcgtttttcgtcgcggtcgcgtcgtagtcgtttacggtcgtcgatatggttttttattgcggcgataatttcggagtgtattcgtagttcggtttgttttcgttcgtcgttatcgtcgtcgtttcgggcgttttttcggt

SEQ ID NO: 4776 - DNA, 407 bp, Artificial Sequence
  Description of Artificial Sequence: Synthetic polynucleotide
tttcggttcgcgggaggtagttgtattaagaaggtgaggacgttgagcgggggttcgtgtttttcgtcgtcgtagtttttattgtcggcgcgcgtttttcgcgttcgttatagtagcgcgttaggcggacgtcgcgggaatttgacgttcgaggttcgcggtttttaatgagagttttagaatatttttcgtttttgacggttagcggtagcgtcgtcgtttttcgtagagcgttcgttttttcgtttttagagttttagttttttttcgagcgatttcgtagtttttttttcgtttttattcgtcgtcggttttgtagttcggttttttttttagtttaggcgcgcgggttgtagtgggcgatcgttttttttcgatttttcgtcgtgtttttgggtttttcgaag

SEQ ID NO: 4777 - DNA, 295 bp, Artificial Sequence
  Description of Artificial Sequence: Synthetic polynucleotide
attttgggtcgcgggagaagtgcgtgtagttcgggtaaggtcgggcggggtcgggcgcgggcgggcggtcgagggatgcgatagggtcgggtacggtttcgtattttttcgtattcggcgtcgtcgtttcgtcgttttttttcgtttgtagggtcgtttcgggtattttagggttgttgaggggcgggcgggtcgtaaaagttacgagagaggggcggtagggcggcgcggtttgcgagcgtcgcgggatttcgaggagcggcgcggggagtataggggcgcgcggggcgggcgc

SEQ ID NO: 4778 - DNA, 435 bp, Artificial Sequence
  Description of Artificial Sequence: Synthetic polynucleotide
ataattttggttttatatattttatatgtttcgtataaagaaatagaaagcgggcgatacgttttgggagggcgggttggcggtttttttagttcggagcgcgtggaggttgcgcgtaggggttcgggacgcgggatagggatttcgcgtagtttaggcgtcggggaatcggggttggagtcggggatttgagtttagcggacgtttttttcgtttggaggttcggtacggatcgggatattagggcgttcgtggtcgtggttcggtttttggttgttgcgggtcgcggtttttagtgggtttttaggatttttttttacggcgggtatttatcgaggttgagaggttacgtcgtgttgttggggtttttcgtcgattatatttttgggcgttagttcgggtagagatcgcggggattggttaggtcgggttagg

SEQ ID NO: 4779 - DNA, 410 bp, Artificial Sequence
  Description of Artificial Sequence: Synthetic polynucleotide
tggttgtgttagtcgatatgagtttttttttttttaggaaggcgtaggattcggggaagttttcgcggttaggtcgtttgtttattcgtagatttcgggcgtcgttcgcgttttttgttttttattttttaatttttgcgtggttttagggtttatatttttggagtttttttttttagtaaatagtgttgttttttatttaatagtagaggcgtttaggagtttaggcgatgtgtttaaggtcgaatagagggatagtagtgagttgtttaatttttttagttgcgtagttaggatacggttgggggcgggtggagatgtggcgtagggttagggttcgggtttcgggaagtaatgatcgagggcggtgattattgtttttagtttttcggcgggtttttttttaaggg

SEQ ID NO: 4780 - DNA, 392 bp, Artificial Sequence
  Description of Artificial Sequence: Synthetic polynucleotide
tggaagtattcgttttatcgcggggtttggtatttaggttttgggatttttgttattgttaaggattttttcggggattcgagttttcgggttgaggatcgcgggggattttaggtcgggacggagttttttttggttcgttgtgcgcgtacgtttggaaaggcgggatttaaggtagcgatgttgcgggaggttttgtagtgttaacgagttttcgaacggtttcgttttattttttttttgtgtgtttcgtaagtttttgtttagtaaatcgttatagtttcggcgcgcgagagtggcgttggtacgtttaaatttcggggtttttggttaggttaggggggcgggcgtgcggcggggtcgggtcgggtcgggtgcgtttagcgggtttc

SEQ ID NO: 4781 - DNA, 203 bp, Artificial Sequence
  Description of Artificial Sequence: Synthetic polynucleotide
ttcgattttagttcgtcgtcgttttttaggcggattttttagaggtaggttttagttttcggcgcggggaggcggcgcgttttagaggggcgtagggtgcgcgggggtcgttggtttttcgggtattttttttttgcggttttttcgttttttttcggagttggtgtttgaggtcgttgggattttagtttggcgtttttttt

SEQ ID NO: 4782 - DNA, 398 bp, Artificial Sequence
  Description of Artificial Sequence: Synthetic polynucleotide
gggttcggggataaagggtgacgtgtggttttggggaaggttcgggatgagggagttgaatttagttgtttcgcgcggtgtttagagtgttttatcgcgcgtaataaattttcgtagatatcgtatttttaatgcggtgtttttttgtgttagtgtttcggcggtttttgtagggtgttaatgttacggttgtatatcgttttttttttttattatttttatttgaatagatttggaggaggcggaaatggaaattagggtatgtttataagttggattcgttagatttttttgttcggcggtatgtttgtgtatgtttgtatgtcggtaaggagttacggatagggaaggtttaagagttggttatttgagcgtagtagatgggttttcgtagtttt

SEQ ID NO: 4783 - DNA, 286 bp, Artificial Sequence
  Description of Artificial Sequence: Synthetic polynucleotide
gtcggtttttttatatttacgtgtttttcgtgtgcgcgttttcggtttgtagatgttataaggttggcgtcgtttggattttcgggcggttttatttttcgcggtcgttacgtttcgttttttgtatttagtttttttggcgttttcgttgtagtatttaagattaggcgtcgtttttgttagtcgtgttgtttagtacgtttgagggtcgttgtcggtaggttttatttttcgttcgggttttttatttatttttttttttggacggtggggtttaagttttgta

SEQ ID NO: 4784 - DNA, 267 bp, Artificial Sequence
  Description of Artificial Sequence: Synthetic polynucleotide
ttttattttttttttttttttttagtttggttgaagaacgtttttaaggaaattcgggttgtttttttttatttggaagtggttttttttatatcggttcgtaaattgattatgaaatatacgatgttaattcggagttgtattttttagttgggtattttcgcgcgttggttttcggggtttcgttttttattttttgtttttttttttcgcgttttgtttttattttttatttttcgcgttggttatttcgtttttttggtagtt

SEQ ID NO: 4785 - DNA, 260 bp, Artificial Sequence
  Description of Artificial Sequence: Synthetic polynucleotide
gaaattacgataggtttgtattatcgtttttttttttacgttttcgtttaggtttgtaaagtcggttgtttttggttaataggcgttttttttgttttacggtgaaaattagtttgtggtgtattgagatttgtaaattattttttgaatgttaggggcgttgtaaaatagtcgtcgggtgtagtgggtcgggcgttcggttattttggttgcgattatcgtagttttttaaaggatgcgggtagatgtagacggttttg

SEQ ID NO: 4786 - DNA, 239 bp, Artificial Sequence
  Description of Artificial Sequence: Synthetic polynucleotide
gtgagcggggtacgagagtgtagggtttcgttggtgtttttttttcggcgttcgtcggatttatcgtttttatcgttgcggtgttcgaattcgcggattcggatcggcggtagtagaagcggtagcggtaaagtattcgtagaatggggtatcgcgaaatagttttttttttttttttttttgttggtggtgtagtcgcgatagttcgttttttaggtaggggtttggagtttgttttt

SEQ ID NO: 4787 - DNA, 846 bp, Artificial Sequence
  Description of Artificial Sequence: Synthetic polynucleotide
ggtggtttttggggtagatagagtaggatttgtttttgttttttgtttttttcgtttttttttttttagcggcggcgatcgtagtaatagcggtagtggcggttgttgttattgttttgtcgttgtcgagtcggttatttgggtattcgcggagtcgcgtcgttgttatcgtttcggcggtttttcggagtgcgcggagggggcggcggaggagcgagatatttatagtaatcgaggatgcgaggggcgtttagtagtagcgagtgtttgggagttaggaggaggttttcgcgcgtcggtaatttttagtgttaggcgttttgtagttttcgcgcgtcgcgtttgggttcgtatcgttttcgtagtgagggttcgttcgagcggtaagtttttttcggcggttaagtcgatatttttttttcgtttcgtcgtttatttcgggtagtagtcgcggaataatggagagcgtagttagtagttttggagacggcgttcgggggaggacgcgtcgtcgtcgtcgtcgttgtcgttagggtaggcgcgcgtcgcgtggagtcgggcgggtgcgagggcgcgcggcggggggtggggggtacgcgtcgcgcggggggcgggggtagtggggggcgcgcgcgcgggttcggggagttcgcggggagagttcggcgttcggcgtagcgcggcgcggttaagtttcgcgtttttttcgttttttttcggcgcgttcgttttcgtttcgtcgttcgtattcgttgggggcgtttagaaagatgtatagaggtaacggttaggggagcggaggtttaagttatatgtttgcgttttcgggggttagagttcgttagt

SEQ ID NO: 4788 - DNA, 526 bp, Artificial Sequence
  Description of Artificial Sequence: Synthetic polynucleotide
agttgtgaagaggcgtgggggtcgcgggaatttttttttggtcggtgcgatgaaagtcgggcggacgaggtggtttaacggggttgagagtggttcggtcgaggcgcgggttgagtttttagtatttggtttgagcggcgtgggtagtagtttgtatcgcggatatttttaattttgtcgcgtttgcgtcgtattttggtcgtggtagcgatttttcgggtatttttgaggtcgtttttagttttataagtatttagtcgtttattttagagtagcggcgtcgatcgttttaagaggagttagttttcgatatcgttttttatttatttttttatatttttatcgttggagggggtgagtgtcgtggataggcgttttcgttcggggatagtttagcggcggtagttagttcgattttttttcgcgcgggtcgtttaaatttgattagtagagcgagcggtttagcgtagtagtcgttttcgcggtttttagttgtagaaaagtaaagcgtcgggaggaagtagta

SEQ ID NO: 4789 - DNA, 201 bp, Artificial Sequence
  Description of Artificial Sequence: Synthetic polynucleotide
gtttttcgtagataagtaaataatttggacgtgaaatggaaatggtaattaatgtagtaatgttgttatatttcgagtgtgtaaattttattgattcgtcgcgttacggggggtgtcgggcgtacggggatcggtggcgtgcgtttaggttgtttattttttttttttttttttttttttttttaggttttcgggcggggc

SEQ ID NO: 4790 - DNA, 523 bp, Artificial Sequence
  Description of Artificial Sequence: Synthetic polynucleotide
ttttacgagaagaataagaagggttggtaaaatagtattcgttataattttagttttaacgagtgttttattaaggtgtcgcgcgagggcggcggcgagcgtaagggtaattattggacgttggattcggtttgcgaagatatgttcgagaagggtaattatcggcgtcgtcgtcgtatgaagaggttttttcggtcgtcgttcgcgtatttttagttcggtaaggggtttttcggggtcggaggcgtcgtaggcgggtgcggcgtggcgggcgtcggggtcgacggttacggttatttggcgttttttaagtatttgtagtttggtttttttaataattcgtggtcgttatcgtagttttttttatttatgttttatgttttttgttagatggcggtagtcgtagcggttgtagtagttgcggttgtagtcgcgggtttcggtagttttggcgcggtcgttgtggttaaggggttggcgggttcggtcgtttcgtacgggtcgtatatacgcgtgtagagta

SEQ ID NO: 4791 - DNA, 276 bp, Artificial Sequence
  Description of Artificial Sequence: Synthetic polynucleotide
tcgtttaggtagtattttcgtagtagtcgttaacgagttgtagtcgtcgtttattgttcgcgtcggttttcgtttttcggtgtttgtcgtatcgtgggtcgtttcgtcgtgttcgatgggtgcgtttttagcgttgtcgtcgcggcgttcggtttcgggttttcgtcgttgcgtcgttagttcgtcggtagtagtcgcgtttattggcgcggattcggagcggtttaggcgtttatttcgggacggttcgtgacgttacggagggagggaggtggt

SEQ ID NO: 4792 - DNA, 357 bp, Artificial Sequence
  Description of Artificial Sequence: Synthetic polynucleotide
attttttttttaggtaggagtagatatttgtttgtttttacggcgcgttagcgttttgttttagtcgtttttgggttagagttcgaaatttatttattgcgtttttatttcggtatagatagtttttaaagttgttcgtattttttagatttcgttttttgtttagttttcggatttcgtttaggggttgagttgacgttcgcgggtggatttttttggttcgttgcgtagggaattgatttcgggaatttagggcgtatagaggttaaagaagttgcggtaagggagggtgggtaaatttagtttgagtttaggtttttgtcgtttttatttttaagtttgttttgtttttttttt

SEQ ID NO: 4793 - DNA, 278 bp, Artificial Sequence
  Description of Artificial Sequence: Synthetic polynucleotide
tgtcgcgttgtcgtcgtagttagtcgcgtcgtcgtcgttgtcgtagcgcgggcggtcgcgcgtcggtagtaggggtttggcgaggaagtcgttgagtttcgcgcgtttcgcgtttttggcggtcgtagcgttgtttattaattgatttttttattgatttatttaatttttaggagcggttgttcggaggtacgggtttttttttaaatttgtagcgacgttttcggcgtgggtataaaggtttcgacggcggtcggcgggggttgtttagcgttcgg

SEQ ID NO: 4794 - DNA, 336 bp, Artificial Sequence
  Description of Artificial Sequence: Synthetic polynucleotide
ggtgatgaagtttgggtagaaattttttgtcggtcgttcgttttacgtttttttcggggtcgatattgttaattttttcgggtattgaggatatttttgcgttttggagcggtgggaggacgcggagcgtcgttttttggttttcgatattttgttcgttttttttagtgggtttgtggttgcgttttttcgaaggaagtaataaatttttttgattttgggggttagaggagacgttttagtttttcggaggggtgtgcgggcgggatcgttttttcgttttattggatttttggtcggggttgtttttgttttattgtgttttatatgcggagt

SEQ ID NO: 4795 - DNA, 311 bp, Artificial Sequence
  Description of Artificial Sequence: Synthetic polynucleotide
gggagggcggtaaggagtgcggaggtttaaacgggtatgagtacggggcggttcggtcggaggcggttttgggcgtttttagttgttttcggttgttttcgttgcggtatttagcggtttatcggggttgtattgttgtagcggttttttgtgttatttgtagtttaggaggttgagtatagtgagtattagtagtagtgtatagttcgcgtataatattagcgtttttttacggaatatttttatttcgagaggggacgcgggttagcggcgttttgggcgtcggggttattgcgggagtagggtacgcg

SEQ ID NO: 4796 - DNA, 201 bp, Artificial Sequence
  Description of Artificial Sequence: Synthetic polynucleotide
aacgtcggtatcggttgggaagtttcggtgtttcgggttttttttggcgagggcggagaagtcggcggtttttgtttagaattttgtgattgtagggatcgagatattaagggcgggggtgtagaggattataagttttttagcgcgttttatttgtatataaatgtgttttgttttttaattttgtttttgttatttgtg

SEQ ID NO: 4797 - DNA, 201 bp, Artificial Sequence
  Description of Artificial Sequence: Synthetic polynucleotide
tttttatttcgcgtttttcggaattttagaattcgggtggtcggtttttggaaagtcgtagtcggcgcgatgtattttgtagattttattttgttgggacggattttttaatttttagaatcgcgggtcgtagggagttaaattgttgtttttttttttttttttcgtgcggttggtggtttgttttttaaaggaacgttt

SEQ ID NO: 4798 - DNA, 481 bp, Artificial Sequence
  Description of Artificial Sequence: Synthetic polynucleotide
tcggggtcgtatcgttatggcgatttgtttatttgattcgtttcgggtggattcgtcgcgatttttgggcgtttaggtttttgagggtttaacgggcgacggttttttagttttagttgtgcgttttcgttcgggcgaggtggggttgatcgcggtcgtttgtatacgttttttttggttcgcgttttcggtttgggagggcggattcgtttattttacgatggtttcggttttggaagggattgttttcgtgattcgtttttttaatagtcgttaataattttttttaacgttttttgcgcggttcgtttttgagaattttggttcgggagagcgacgcggggttttcggggttgcgtaggttgcggcgttttgtttacgttggttcgagggcgcggttcgtttcgggtcggtttatatatttacgttttttgtcgggaggcggttgggacgcggcggggttgttttaagtgtagtcgcg

SEQ ID NO: 4799 - DNA, 280 bp, Artificial Sequence
  Description of Artificial Sequence: Synthetic polynucleotide
gagttagtcggaggggcggcggcggtttcgcgcgtttagagttttagtttatgaatgggattttattttgagcgttttttttcgggtttggggaggcggcggcgcggcggcggggggcgtttcgtaagttcgcggttttgagcggttattcgcgtagtaagttgggcgagttggtagtcgtttgtatttgttttttggtttcggtttttgatttcgttttcggttttaagcgttcgggttgcgttttcggttgtttcgcgaggtagttttaggaggttta

SEQ ID NO: 4800 - DNA, 252 bp, Artificial Sequence
  Description of Artificial Sequence: Synthetic polynucleotide
gcgtggggagtttggtattttatttaattagagcgttggattgagaattgtttaattaggcgcgtagtcggagaggagggggcggtattcgggatttggcgcggtttttgttttttgcgttagcgtgagttcggttagggtttttacggtcgtgtttttattttttagggaggcgtcggtgattcggttatagttttagttttcgtcgttttgtgatttgcgggtattggatgattcgtagttgagatttcg

SEQ ID NO: 4801 - DNA, 239 bp, Artificial Sequence
  Description of Artificial Sequence: Synthetic polynucleotide
ataggcgatggatttttcgggttttcgggggcgttttacgtgggtgttggtcgggggttttttggtagtggttttggcgttggggggtcgaggttgtttcggcgttagtttacgttttcgttggcgttttttcggcgcgtagttatttcgggatttttaggtggtttttaggtttgggttcggtttgaggattttttcggggcggagcggggcggggttcgagagtagtacgtaggtaa

SEQ ID NO: 4802 - DNA, 405 bp, Artificial Sequence
  Description of Artificial Sequence: Synthetic polynucleotide
agtttttaattaggtttaaggagtcgtagagtcggggtttcgggttcgtaggatttagaagttacgcgtttcgcgtttttcgtttcgtcgttgtttgttcggtcgatttatttggtgtcgcgtgcgttggcggttcgcgcggtagttaagttaaaggtcgaggtcgaggtcgagcgcggcgtttagtagtacggcgggggttagtagggcgggcgtcggtcgtagcgcgtttcgttttagtagtagtcgcgcgtcgtttttgtaggtcgtttcgtcgcgggttattcggggcgtttaggttgtcgtttcgtcgtatttcgtcgtttgttgtatcgttttcgttagggcggcgacgcgggatttggagttcgggcgggttaggggcgcggttcgtttcgtagattt

SEQ ID NO: 4803 - DNA, 237 bp, Artificial Sequence
  Description of Artificial Sequence: Synthetic polynucleotide
ttaagttgttgtcgtttaaggttattaagtagaatttttttaacgacgagggttgttagagcgatttggaggataacgtttcgtagggtagtagcgacgcgttgttgttgcgcggggcggcggtcgtcgtgttttcgggttcgggagcgtacggtggtggcggcggcggcggcgcgtaggataagcgttcgggtttttttacgttgggttatcggggtttttatattatcgtgcgcg

SEQ ID NO: 4804 - DNA, 204 bp, Artificial Sequence
  Description of Artificial Sequence: Synthetic polynucleotide
agtcgagtagtagttttagagtttttcgtaagttttttttatattttttcgttttcgttttaaaggagtagtagtttttttttgtttttttattgtcgtcgtcgtatcggcggagtttttttttcgcgcgtttttttttcgatggagttcgggcgtcgtcgacgtcgtcgttgtttcgaattttgagcggggtcgtttcggtcg

SEQ ID NO: 4805 - DNA, 224 bp, Artificial Sequence
  Description of Artificial Sequence: Synthetic polynucleotide
ggtcggggtgcgcgcgtgtgtatgttgtgaatgcgttgcgcgatgtgcgtttttattttatatttagtcggttttttgtttgtgttgttcgagtgtggacgtgtgtacgcgttgtattcgttcggtgtggtagcgtttcgtgagtttttggaggtagggaaaggttatttgtgtttagaggttttgttgagggcgggaggggtttagttttagtggggagtttt

SEQ ID NO: 4806 - DNA, 278 bp, Artificial Sequence
  Description of Artificial Sequence: Synthetic polynucleotide
agcgggtttgttttttatttttttagtttcgcgtcgtcggtttatagcggttttttttggggatagtttttttcgggtgtcgttttcgttttttttgtgcgttttttttttttttttttttttattaaatattatttgggaattgtttaaattttttttttaaaaaaagagagaggcggggaggagtcggagttgtggagaagtagagggatttaggtaagtatttgtggatttaaacgggcgtttttggaaattttggagaacgtcggatgggagac

SEQ ID NO: 4807 - DNA, 232 bp, Artificial Sequence
  Description of Artificial Sequence: Synthetic polynucleotide
gggaaataggtcggcgtgtcgaaagatatcgagtaggtagaaataaggtaaatttatagaggcgtaataggttcggtttttcgtggttagggcgagtcgcggtttcgcgtggcgtttcggtcgttgttttcggattttgagcggttattgttggggttttcgaaagaggtgtcggttttttgggagtcggaagagttgtttgggtgggtttcgttttgttttttattttatc

SEQ ID NO: 4808 - DNA, 331 bp, Artificial Sequence
  Description of Artificial Sequence: Synthetic polynucleotide
tgttttgtttggattttatcgtggtcgagaaggaggaatggtatatcgttttcgtgaatattatttacgtcgagttcgcgtcggatttcggggtcggggcggcgggcggcggcggcgcggagttgtatacggagaagacggagtgcgggcgttacggagagtattcgtttaagtaggacgttcgcggggaggtggttatggttagttcggtttacgatcgtttggtttgcgattttaatattaagttcgtcgtttcgattcgcggtaagaattggatagtttttatttttaagggtaattgtacgtatagggataagattcggaacgcgtt

SEQ ID NO: 4809 - DNA, 231 bp, Artificial Sequence
  Description of Artificial Sequence: Synthetic polynucleotide
gttgcgttttgggcgtatttgcgcgtttggtttcgcgtttcgcggagagggcgatgggtttcggttaggattgagtttttttttttttttttttagtttcgtttggtatttttttttttgtttcgagggcgagttacggtttgcgtcgtcgttttttttttcggtgttttcggttcgtcgttttttcgcgtttttttttttcggattcgttttcggggttattatggtcgc

SEQ ID NO: 4810 - DNA, 201 bp, Artificial Sequence
  Description of Artificial Sequence: Synthetic polynucleotide
tgttcggttttgggtttagttcgtcggcgttgttgggggcggtaagtttcgtattagtttttattcgttttatttttttcggttgaatgagtgttagttcgcgtattggggttatttagaggagacgggtaaagtcgcggttttacgggttgtattattggtcgcggagtttaggggagttgtaggagaaattattgcgag

SEQ ID NO: 4811 - DNA, 201 bp, Artificial Sequence
  Description of Artificial Sequence: Synthetic polynucleotide
agttcgatgattaggagttttcggttttcgaagttgcgttttatcgtgtaaattttgttgatggcggtgtattgtagttatacggatacgagcgtttcgcgtagttcggggtagcggtggtattcgaaggagatgtcgtttttttgttgtagtcgtcggcgtcgttttatgttcgtcgcgggcgtttcgggtttttgggtt

SEQ ID NO: 4812 - DNA, 219 bp, Artificial Sequence
  Description of Artificial Sequence: Synthetic polynucleotide
tcgttgtagttatgaggagaatttttatttttatggttggtttatcggttatttcgagatgtcgtttttcgattatagtatggttttgttttatagtttcgagtatgttagcggcgtcgtcggtttggattatttttattacgggggggtgtcgtcgggcgtcgggttttcgggtttgggggggtcgcgttcggtgaagcgtcgaggtatcgttaatcg

SEQ ID NO: 4813 - DNA, 284 bp, Artificial Sequence
  Description of Artificial Sequence: Synthetic polynucleotide
gtcgggggaggtggggtcgtcggggaggaggcgagggaaacggggagttttagggagacggttttcgagggagagtgagaggggagggtagttcgggttcggtacgttttttttttcggtcgtttttttttatataagcgtaggtagagggcgcgttagttatgttttgtttttgcgttcgtcgtcgtcgtcgtcgtcgtttagttcggcgcgttttggaggattttgcgtcgcggcgttttcgggtttcgtcgtcgttagtcgtttcgtcgtttttttttcgt

SEQ ID NO: 4814 - DNA, 429 bp, Artificial Sequence
  Description of Artificial Sequence: Synthetic polynucleotide
aaagtattttttttttaatttatgaacggatttcgatttttgttttgttattatttatgcgtttcgtattcgaggtgtcgtttttatttatacgttttacggtttcgcgaaattcggttttttagttcgcgggacgcgttgtttgttaggcgggttcggcggtatttcgggggcgggaggggtcggtcgtagggtttttagtttggcgttcgcggggcgttcgtagcgaaggggtgggtgtcgttcgtgaacgtagtagggattagtttagttcgcgttcgtttttgggtttcggttatcgttttttcgttattttttcggtttttgcgtggatcggttcgtggcgggggttgttttgcgttttcgttttcgtagtagtcgcggatttttattaacgttgacgagttagtgtcgcgattcggggagaga

SEQ ID NO: 4815 - DNA, 283 bp, Artificial Sequence
  Description of Artificial Sequence: Synthetic polynucleotide
aaaagatcgcggtggagaagatggggcgtttttcgcgatattcggttgtttagaggtgtaaagtcggtgggcgtacgttcggggcggttttatagttttcgggtcgttagttttagggtgtcgggttttaattaaggtttcgaagtttttacgtatttgagggtattttgattagtttttgcgggttgttttgcggtcgtagtgggttttgaaagtttatttcggcgtagggtggaaatcggcgggaggcgttgttgattttcgattaaataatagtgacgag

SEQ ID NO: 4816 - DNA, 241 bp, Artificial Sequence
  Description of Artificial Sequence: Synthetic polynucleotide
cgcgggtggcggcggttgtggggtcgtttgggatttttcgtagtattgattttgtaattttttgtgtttgcgtttcgtggtgaggggcggcgggatgcgcgcgatttttttttgatttagttaaacggaaaagttcgcgcgtttcggttggaaggtggaggttaggtaggattcggtaaaggtatattttaaacgaagtagattttattttttatttgtagagggaaggcggtgtggacgg

SEQ ID NO: 4817 - DNA, 244 bp, Artificial Sequence
  Description of Artificial Sequence: Synthetic polynucleotide
gtagtagttttacgttgttggcgtaggcggcgcgtaggagggtcgtcgttttcgggacgtttttcgggacgtttttcgggacgtttttcgcgttttcgacgtcgtgttttttttcgttttcgaaagggtagaaagagtcgttcgaggcgatgttgcgggtgtttggtagattcgagaagtttttaaatttttcgtagttagcggggtttttttcgatttgcgcgtttcggggtggggacggcgg

SEQ ID NO: 4818 - DNA, 225 bp, Artificial Sequence
  Description of Artificial Sequence: Synthetic polynucleotide
gtagggggcgttgcgttcgtcgagttcggaggggtcgtcgggtcgggcgttgcgtattcgcgtcgggagtcgtttttcgttcgcggcgttcgtttttgtcgttcgttagtattttttgtttcgcggtcgcgtttagataataaaagcggaagatgttgtagttgggtaaggttaggattttgttttgaagtcgggcggcgtcgcgtacgttttttttcggattga

SEQ ID NO: 4819 - DNA, 249 bp, Artificial Sequence
  Description of Artificial Sequence: Synthetic polynucleotide
cgtcgttttcgcggcggtattgggtatgtttcgtattcggggtcggtttcggcggcggggcggacgtttttttattagtcgggcgttcgggtcggtcgtcgaggtttaggtggaggttgaggttgtcgcgcgtcgcgggaggagtttcgttttcggcggttgaggcggcggcggtataggtggcgcgggtcgcgcgcggggcgtagttcgggagcgttcggcgtcgggcgtcgcggcggttttaggttc

SEQ ID NO: 4820 - DNA, 255 bp, Artificial Sequence
  Description of Artificial Sequence: Synthetic polynucleotide
ttcgatcgggagtttagagttttgttagcgtcgtattgtgcgtcgcgtaagtcgttcgatttttttagcggtatcggttttaagtagtaaatatttgtgcgtttttgagttagggacgcgcgtggggggtgggcgtgtacgcgggtgggttagcgtagagtgggagtttgtgggtgtttttcgtcgggatttttaatttagttgttttcgagagtttaagttgagcgtcgtacgtgttcgtgttatttgttgtat

SEQ ID NO: 4821 - DNA, 243 bp, Artificial Sequence
  Description of Artificial Sequence: Synthetic polynucleotide
acgtttgtttgagtcgtgttgtcggggattagcgattttttatttttttttttttataggagcgtttcggttttcgttttcgttttaatcgtcggcgcgcgtttttatcgcgtacgcgtttttttcgcgcgcgtatacgttcgcgtatatacgttttttcgttttcgttcgcggagtttttttttattttttagtcgtttcgtcggttgaagtatcggcgttgggaggcggcggcgttgttga

SEQ ID NO: 4822 - DNA, 201 bp, Artificial Sequence
  Description of Artificial Sequence: Synthetic polynucleotide
cggtttgttttgggttcgtgaggcgaggtcgtagcgtttcgacgtcgggtgggcgtgtgggtggagtggagatttgggtttttcggcgtatgggagtttcgtcgtttgcggtagggaatcgttttttatttttggttcggttcgggtcgggagtcgtgtttcgcgttgattcggtgtaattttttagtttattttttttta

SEQ ID NO: 4823 - DNA, 208 bp, Artificial Sequence
  Description of Artificial Sequence: Synthetic polynucleotide
gagaattgaaaaggaaggcgaggagtaggggttgcgggtcgggtttttgttgttcgcggttttcgggggtcgcgtcgcgtcgggttacgtgggggttttcgtttttcgagcgggcgtcggtgggaaatttgcgcggcgagagatagggggatggggcgtttttgacgcgattgtggggtgcgggtagttttggaggaggatgttcggt

SEQ ID NO: 4824 - DNA, 257 bp, Artificial Sequence
  Description of Artificial Sequence: Synthetic polynucleotide
tagcgttttcgttttggttatggagcggtcggcgttcggcgaggtggttatgagttaagttatttagtcggcgtacgttattgcgcgcggcgagttgagcgcggggtagttgtttaagtggatcgatattatcgtttgtttggcgggtaggcgggcgtcggggttgcggggaggcgcgggatcggggttgcgggagcggcggcggttgggggttggggggggtaggaaggcgaggaaggtatttgcggagagttgaa

SEQ ID NO: 4825 - DNA, 350 bp, Artificial Sequence
  Description of Artificial Sequence: Synthetic polynucleotide
aaagtgtttgtaaagtttgagtagagtgcgcggggtcgagcggggagaagggtgcggggtatcggggtgagatataggaaagaggaggacggtggggagcggtagaagatagcgtttttaggattagcgattttgtggtttattcggttattgggtttcggcgtaaattttttttaggtagtgcgggcgatgttgattgtagacgtcgggtagggttttcgtgcgggcgggagcgggggaagttagtgcgttcgggcgttagttagttgatgcgggaagaggttggggagttgtagggtcgttcgttttcgggtgcggtgttttggcgtagggtttgggttgagtcgttc

SEQ ID NO: 4826 - DNA, 216 bp, Artificial Sequence
  Description of Artificial Sequence: Synthetic polynucleotide
ttattttgttcgttagtatattttagagtttttaatttttttttgtatgtaagtttaggtagagttttgttaggttttatattagagtatatttttgtacggattttttaggatcgcggcgtcggttggttgtttcggtttttcgcggtcgcgtgagtttttttttggtggtggagggcgtattttaatttggaaatttttagtttttaatttggt

SEQ ID NO: 4827 - DNA, 269 bp, Artificial Sequence
  Description of Artificial Sequence: Synthetic polynucleotide
tcgcgaagggtataatttgagaagttcgtggtagtttttcgtagcgtcgggtgatatagggtttttttatttttaggagaagtgggtaggagagagggtcgttcgttgtttttcgttgcgtttagggatggagggttttattatttatggaattgttggtttttttgcgtggttcgggattttagtcgtggtttcgcgttaagagggtattttttttaaacgaaatcgtttcgttcgttcgttcgttcgttcgttcgggtagtaatgtc

SEQ ID NO: 4828 - DNA, 258 bp, Artificial Sequence
  Description of Artificial Sequence: Synthetic polynucleotide
agtaaaatttttattattttttcggtgtttattagttcgtttttttaggtttttgggattattttatttaaaagtagttttttttagcggggtttagatcgtttttgagatttcgttgagaaatttttagcgggttagcgtttgggcgttgggcgtcgagttcgatatggttttttggatgtcgttgatttgttcgtcggttgtttagtttttgttttatttcggggcgtagaaaggggacgggtaggggttcgattt

SEQ ID NO: 4829 - DNA, 224 bp, Artificial Sequence
  Description of Artificial Sequence: Synthetic polynucleotide
agtttttagggatatttgaggtattatttttgttattgtcgggtattcgcggcgttgttaacggtttggttatatgtttttcggagagttacgggagggcgttgggtaatttttattcgagtcgcggtcgcgaggaggagggaaaaggcgagtaaaaaggaagagtgggaggaggaggggaagcggcgaaggaggaagaggaggaggaggaagaggggagtata

SEQ ID NO: 4830 - DNA, 256 bp, Artificial Sequence
  Description of Artificial Sequence: Synthetic polynucleotide
ggtcgtgtagttcgtttcgttttttttttcgaagagagatttggtgttggtatgggtatttcgcggttatcggagtggtttttcggatgagtttggtttcggcgttgacgttttggttttgggggttgtttggttggtgttaggtagcggaagacgtttggagagttattcgtttttttttttattcgtttttatcgttgttcgtgttaggacgcgtagtttgtagttgtagtttaggtattggcgcgggatggcg

SEQ ID NO: 4831 - DNA, 310 bp, Artificial Sequence
  Description of Artificial Sequence: Synthetic polynucleotide
tttcgtcgtttcggaggttggcggtgagggtattcgggcggtaggggttcgtcgaggggtcgtggtatacgggtaagggggttaattcggaatggttttcgagtagttttacgttttgttaaggacggtaggtgtaagggtcgggggattttttgacggggtcgttttttcgggtacggggaggtttttatcgagttttaattttgaacggggtagggggtagagtttttggtaggtaaggttttcggaggagggaacggttggggagtggcggagtttcggagtggtggttttgttaacgttttttttc

SEQ ID NO: 4832 - DNA, 410 bp, Artificial Sequence
  Description of Artificial Sequence: Synthetic polynucleotide
aaggatttatttagacgtacgttcgcgcggagacgtacgttggtatacgcgtttatatacgcgagtatatatacgcgtatattattcggttcgtgcgcgcgggtcgttgtttttgttgtattatgtaaaggtggttgggaaagcgcgttgatttatatttatatagtttattttttttttatagtatgtgattaatacgtatttcggggaggagggagcgcggttgggggtgttaatcggaagggaatagatagtgagtgttattttgttgggaggttttagaagtaaagcgttaacgacgatagtagcggtggttttagttttattagtaattgtcgttggtaggagtattatacgttttaggagtttttcgggtattaagtatgggtttagttcgttttagttatttt

SEQ ID NO: 4833 - DNA, 274 bp, Artificial Sequence
  Description of Artificial Sequence: Synthetic polynucleotide
agatcgagggaacgttgtttatgcggtgagagttagcgcgggaggcggcgagggcgcggggagatcggggagggggtgggtttcgcggcgttcgtcgttcgtttttacgcgcgttgtcggtatttgttcgttttgttgtaatttgttgtagtgtttgaaagagtagtaggagcgtatggaggtggggtcggggaaagattaggcggagtggttgtggggtgagcgcggagtgggtggggaggcggcggcggtggggaggggggattggttttag

SEQ ID NO: 4834 - DNA, 201 bp, Artificial Sequence
  Description of Artificial Sequence: Synthetic polynucleotide
gtcgtcgtcgtcgttgcgtcgttttttatttagagttcggcggcgtcgttttttttttttttcgcgtggtggcggggtatggtattattacgggtatcgcgagggggtcgttagcgtttgcggcgggggtagcggttttatgtgcgtcggcgggttttaaggaggaagtcggcggtcgacggggcgttcgttagttagaga

SEQ ID NO: 4835 - DNA, 265 bp, Artificial Sequence
  Description of Artificial Sequence: Synthetic polynucleotide
ggtcgggaggcgcggagttagtcgtttacggagtttaattgtttgtatcggggatcggcgggcggggcgcgttcgagtggtttcgtcgggaaagggcggcgggcgttggagaaggcgtttggcgcgaagttgggcggcgtttcgagggcggaggataggtggtcgcgcgatcgtagttaggtagcgaacggttcgggggttgcgtagcgcggttttaaagtttagttcggtttcgggtttagttcgttgtcgtttgttacgggag

SEQ ID NO: 4836 - DNA, 201 bp, Artificial Sequence
  Description of Artificial Sequence: Synthetic polynucleotide
gcgtagggggtagttgcgtataacgcgtttttggtagcgcggcggttgcgggcggggcgcgttttacgtgtttgaaggcggacgtttttttcggggggacggagagtagagggaagtcgcgtagggttttagagtagggtaggttaggcggcggcggcggcggcgggtttttagcgagtaggtatttgggatggtggtggt

SEQ ID NO: 4837 - DNA, 362 bp, Artificial Sequence
  Description of Artificial Sequence: Synthetic polynucleotide
ttttaaatcgagttttcgggtgtgtagattcgtagcggagtcgcgggagcgaggtgggaaattttggtcgcggcgtcgggtttcgttcgtcggggggcgcggggcggcgggcgtatgcgcgtgcgcggtgcggttttagttttggttgtcgtcgtttgtcgtcgtcgtcgcgatgtttattttagttaaagcggttgcgggtttggggattcggttcgggtagcggagttttcggattcgtcgattcgtcgaggagcgcgcgtcgggttttcgtcgagtagttgagttcgtgtgtttcgcgtttcgcgtttcgaagttgtcgtttcgaattttggtcggcgttgtttaggtttttcgttagg

SEQ ID NO: 4838 - DNA, 298 bp, Artificial Sequence
  Description of Artificial Sequence: Synthetic polynucleotide
tagcggagacggttaagtgtttttttattaatttttttttttcggagtttaggggtgttgtatgggcggcgtttggattcgcgttttggagttattaggcggagtaaagttagcgcgtttcgcggttcggaatttagttggttcgttatttttttatttttgcgattttattttcgatcgcgttttagggtagaagcgtttgagttttcgttagtgggtatttaaagtttatgttcggcgggcgtgttgacgttattcgggggttgcggagcgggagggggcggtggggggcggggat

SEQ ID NO: 4839 - DNA, 295 bp, Artificial Sequence
  Description of Artificial Sequence: Synthetic polynucleotide
gaaggatacgtaaatttgtcgagggttcgggggtttcgggttgttgttgttgttagcgttttgggaagtgataggtattaggatttgttggtgcggcggcggcggcggcggtagttttagtcgcgttcgttatatatatttttattcgttcggtgtatacgtcgcgtcgcgggtagtgtcgtttgcggaggcgcgttcggggttcgtaggggtagtagcggtagtttggtagcgtcgtcgcgttttcgggtatttggttcgcgaagtttcgtttttgtcgtttttcgcgtcgttc

SEQ ID NO: 4840 - DNA, 203 bp, Artificial Sequence
  Description of Artificial Sequence: Synthetic polynucleotide
ggatgcggtcgcgtaggcgttcgttttttggttttttggtcgggtagcgggcgttcggttatcggagtttagtttaagggtttagtcgaggttttttcgcgcgaggcggttgcgttaggtgagcgggtatcgcggtcgcgttttttttgttatttatttagcggttagaggtattttgcgtttgggagttttaagtgttttcg

SEQ ID NO: 4841 - DNA, 215 bp, Artificial Sequence
  Description of Artificial Sequence: Synthetic polynucleotide
agttttaaattttacgttataaagtttcgaagaggcgggttgggggcgggggtcggggcggatttttaggggcgtggttgcgcgtttgcgatttcggatcgtgttaatttcgtcgtcgttttaaaatttgtgggaaattttagttttgttatttattttttttggaggacgtagataggatttgttttgtaggagtttaggtcggtcgattcgcg

SEQ ID NO: 4842 - DNA, 201 bp, Artificial Sequence
  Description of Artificial Sequence: Synthetic polynucleotide
gggcggcggcgcgcgggggatttatttcgtttttatttgatttcgggtgattgtttattgttatggtttgcgatttcgcgtggggatcgtttagggtttcggggttttggatgtttcgggtggcgtcgtcgtaattttcgtgtttttcgcgtcgtttttatttcgtttttattcgggtcgattcgagcggttgtagttttt

SEQ ID NO: 4843 - DNA, 340 bp, Artificial Sequence
  Description of Artificial Sequence: Synthetic polynucleotide
tttttcgagtattcgtttcgggttttttttaagtagttgtttcggtttcggatttttatttgatttttttaatcgatttggtagggtacgtatatttgacgtttattttgtagtcgagtatataaggttcgtcgaagttatcgagtaggttttgtagttgtaggtagttttcgtcgtcgcgttttattacgtcgtggaaggtaggtacgtagtcgcgtagcgcgttagttattagtcgcgttaggtagtagcgtttcggtttcgagtagcgttttaggattagttcgttggtgttcgtcgttttaaaattttttgaggatcggtattcgttagcgtcgtt

SEQ ID NO: 4844 - DNA, 201 bp, Artificial Sequence
  Description of Artificial Sequence: Synthetic polynucleotide
ggcggagggatagagttggattcggaagtcgcgggtgggagttgtttttcgcgagttcgaggttgttggtattttgtcgcgggtagttcgcgttagtttcgggagtttttgggtttcgggagagcgagtcggggtcgtttggttataaagatgttcgcgcgttcgttttgcgtacgggattcgttttgcgttttgagtttt

SEQ ID NO: 4845 - DNA, 236 bp, Artificial Sequence
  Description of Artificial Sequence: Synthetic polynucleotide
aacgttcggttaggttttagagttttcgcggagagcggggcgtttgttgggggcggtcgggagggtcgggttaggggcgcgggagatttcgcggggacgcgaggtgttgcgggttttgtgcggttggttgggaacgaggagaatgtgttattaatagtgtttaatcgattgattattttgggtgttgtgtttttttttttatttttttttatttttgggaaaatgtattgtttagg

SEQ ID NO: 4846 - DNA, 251 bp, Artificial Sequence
  Description of Artificial Sequence: Synthetic polynucleotide
gtgtttgaatttttcgggatatttagacggttggagtttttcgattttaaggcgggcgacggtaaagttaaacgttagcgcgttgcggttttcgggtatcgaggcgttttcgttttcgttatttatatagggcgttaagtgtttcgattcgcgagtgacgaggacgtataggttagtgatacgattcgtagttagtattgagcgggacgacggggttcgagcgtaggagggtgcgcggggagttgaggagc

SEQ ID NO: 4847 - DNA, 201 bp, Artificial Sequence
  Description of Artificial Sequence: Synthetic polynucleotide
tgagtagtttaggtagtcgcggtggtcgtgaacggggcgggagtggggggtgtttaggttattagaggcggtttcgcggtttgtatcggttggagtgggcgatttagagtttgagtggagggggcggggggcggcgatagcggggggttttggtagcgatggtttgaatttgcgttggtgggggatggggcgggggcgggg

SEQ ID NO: 4848 - DNA, 206 bp, Artificial Sequence
  Description of Artificial Sequence: Synthetic polynucleotide
gcgttggggaagggatttttcggaggtacggggtagcgtgcgggttgcggtagcgatttcgattcgggttttcgggttttgtcgggttgagtttgcgttcgtttcgtcgtcgttaagtttttttaattttgttcgttgcgttcggatcgcgcgttaggtttgggggcgtagtaggggttgggggcgtacgttgcgtattcggggac

SEQ ID NO: 4849 - DNA, 201 bp, Artificial Sequence
  Description of Artificial Sequence: Synthetic polynucleotide
gtttcggtttcgggcgtcgattaggtttttttggttttcgtcgcgcgttttttaatttgttgttgtcgtcgtcgcgttttttaggttttgttagttattcgcgttttgagttcggggttagatttttatggaagcgtcgcgatgttcgtttttcggttgttggatttttagaagacgaaatacgcgaggtgagcggcggtc

SEQ ID NO: 4850 - DNA, 203 bp, Artificial Sequence
  Description of Artificial Sequence: Synthetic polynucleotide
tgggattttttttttaaaaacgtaggcgttttttcgggtcgtagtcgtagtcgggagattgagggttagggcgcggtcgcggggttttttgggtcggggcgcggtttacgttttaggtttttgcggttttgattagaagtcgttgcgtttttggtcgttttttattcgtttcgttttcgtaattttaggtttagggttatagc

SEQ ID NO: 4851 - DNA, 216 bp, Artificial Sequence
  Description of Artificial Sequence: Synthetic polynucleotide
taggggagacgaatcgattggttgttcggtcgtcggaacggtaggtttcgtcgtttttttcgtttttcgtattttcggttcggtttttttttattatcgcgtttcgttttaattcgtagttagtattttttttttatttttttttcgttttcgttgttatttttttttttggatgttggaagcgtagttggtattttcgtttttttaattttttaa

SEQ ID NO: 4852 - DNA, 335 bp, Artificial Sequence
  Description of Artificial Sequence: Synthetic polynucleotide
gtttattcgttttttaggtgattcggcgttttcgtcgcgttcgttggaagtttgtaaatttttttcgggggtttcgtcgttacgttgggaagttggggacgcggggggaggtttttggttcgtcgttttcgttgtcgtttgatcgtatttttggagggtttcgtattttgttaggtttttggaggtaaatatatattttcgatttataattggttttcgcgttaggggattcgcgcgtttttatatacgtacgtacgtcgggcggattcggcgtcggttttacgttagtatttttttaggcgcgcggcgcggcggttatcgagcgtttcggtatt

SEQ ID NO: 4853 - DNA, 230 bp, Artificial Sequence
  Description of Artificial Sequence: Synthetic polynucleotide
tcgggcgttgatagacgattttttttatttgttagttttttcgtttgttagtagagttgttggtaagtgagagaaaatagaggggcgcgaaggtaggcgcggttagggagtgagcggggcgttgggcgcggggcggagtcgggtgcgcggcgttcgggttaggttttatcgttcgcgtcggttttcgttttgtttagtcgtcgtttttttttttttttttattttttttt

SEQ ID NO: 4854 - DNA, 224 bp, Artificial Sequence
  Description of Artificial Sequence: Synthetic polynucleotide
agcgtagttatttgaaggtttttatggttttcggcgtttgcgtttgaagttcgtttttaggttttggggggtatttgtagaaaatttttagtagcggttcgttaattagattttagggtgtacggggggtggcgtcggtaattatggtaatttttaaaataaaataatataaaataaagtaattaacgtttattaattattattttattttattttttgtattg

SEQ ID NO: 4855 - DNA, 211 bp, Artificial Sequence
  Description of Artificial Sequence: Synthetic polynucleotide
gggatacgtagggggatacgtagggattgttcgcgcgaatggtttcgaacgtatgcgttttattttatattttatagtcgttatgacgatcgggaggttcgttcgttaacggttagttaacggttgcggggataagttcgttgaggttgttaggcgagttaggtttttttggatttcgtttgattcggatgggttgtgtttgaaattgatt

SEQ ID NO: 4856 - DNA, 205 bp, Artificial Sequence
  Description of Artificial Sequence: Synthetic polynucleotide
ggcggtgttaggtcggggcggggggtttttttatttagtacggggtattaggtcgggatgggatttttttttagaaagtcgattggatgttaggagaggcgtacggttgggggttttttttttttttttttttttttttttcgcggttgaattaaattagaattgttatttagggtttgtgagttagaagggatcggattatacg

SEQ ID NO: 4857 - DNA, 398 bp, Artificial Sequence
  Description of Artificial Sequence: Synthetic polynucleotide
ggcgcgggtttcggcgcgtttagtagttcggttagcgttagcgcgttcgttagtaggttgagaacggttagcgtttttagcgtggtcgtttgttttagtcgtagcgtgtagtcgcggaatagcgtttttagttttgggtaagcgaatttttcgtcgtacgttcggagttcgcgtcggcggtttgtttcggtcgttcgttcggcgttttcgggttcgttcgcgtcgttttcgtcgtcgttttcgtcgcgcggcgttttcgttattttagcgttatgtagcggtcgcggtcgcgggcgcgtttttcgtcggttcggggcgtcggggcgcgggcggcggcgtcggggcgggcgggcggcgggcggcgaggcgtcggggcgcggggcgcggggcgggcggag

SEQ ID NO: 4858 - DNA, 290 bp, Artificial Sequence
  Description of Artificial Sequence: Synthetic polynucleotide
tatcgcgtcgcggtttcgtacgggatgcggcggtcggcgttgtgttcgcgggtcgggtagttcggttcggtcgcggcgttgcgggattcgcgcgtaattcgtgggggcgcggcgcgggcgatacgtgcgggtcgttaggagggggagggggacgcgcgtcgtcgggttcgttattttgtattcggggtcgttggtcggtcggggtatttttacgttcgtttcgttggcgagattggagggattcgggatatcgtaaagtattttttttagtgtttgggagcgttcgttgt

SEQ ID NO: 4859 - DNA, 307 bp, Artificial Sequence
  Description of Artificial Sequence: Synthetic polynucleotide
ttatcgtagtcggtttcggtcggatttaaatagttttttttttattttcgggatatttattttacgtatttattattttttagtttttagatgtttcgtcgttttttttatggattttttagtatttgtaggttataggataatagaagttatagtagagttatcgaggaattttaggaacggaggagatggaatagtggagacgcgaattaggattagagttcggaagttaggagataaaggtttcgttatattgaagaggtcgtttttttttttgtagttgcgtatttgattggatagttttacg

SEQ ID NO: 4860 - DNA, 212 bp, Artificial Sequence
  Description of Artificial Sequence: Synthetic polynucleotide
gggggtggttgtgggttcgaagtggaggacgagtatggtttgggagataaggaatcgttttgagatagagaaggttttcgggagcggatagagagtgggcgaaatcggtgcgtagtaatcgcggcgttagttttagcgcggtttttggggcgtagttttatttcgttttagtagttgcggagttttttgacgagttttcgtttggtagtatt

SEQ ID NO: 4861 - DNA, 375 bp, Artificial Sequence
  Description of Artificial Sequence: Synthetic polynucleotide
tagggcgttttcgtttggattataggagaaagtttgggaggtaggtttaattttttaatttggcggggaattttttttttttttatatagtttgtagcgcgggggcggcggggtgatagttttcgtgtatgaattagttattttttaggtttcgtttcggcgggggtcggtcggacgttcgtttcgtataaagcgggtattcgggtcgtttggagtagaaagtcgcgtattttttttcgttaggcgttttttcggacgttttgtttagcgggtcgttcgattttttgtattatggatttcgttcgttttttggggttgtcgattttgttgttttttttgacggaggttgtattgggcgatgttgtttaggagtta

SEQ ID NO: 4862 - DNA, 201 bp, Artificial Sequence
  Description of Artificial Sequence: Synthetic polynucleotide
ggcggtatggagcgtagtggttgggttcggtagattttttttttagcgttgttgttgggggcgacgttgagggcgcgcgcggcggttggttattattttcgtttttcgttttttttttttttgtgtatttattacggggagttggaaggggatggggagtagggcgaggtgtttatttttttgtatattgcgggtaatttt

SEQ ID NO: 4863 - DNA, 356 bp, Artificial Sequence
  Description of Artificial Sequence: Synthetic polynucleotide
gggcggggcggcgcgcgggggcgggggagcggtcgggatacgtgtggcggcggcgggggggacgcggcgttcggggttttaagaaggtgtggagcggggcgggcgtttttttaggtttggtcgaggggcgtcgcgtagaggcggcggcggcgtacggaggcggtagacgacgcgttttcggcgttcgtagtttcggtttcgcgttttcgcggtttaaagtaattttgggagtcgtcgtttttcgcggaatttttcggcgggggttcgtttttaggttcgttttcgagttcgtttcgttttcgttcgtttttttttcgtttttttttcgcgtggttttttcgtttcggcgtttttaa

SEQ ID NO: 4864 - DNA, 265 bp, Artificial Sequence
  Description of Artificial Sequence: Synthetic polynucleotide
atttttaggtattattcgagtttgttaattttattttcgtttaattttattttaaaattttttatagatgaggttttgtcgttgtcgcgaggggtcgggcggtcgcggcgggagggatagggggtttgggtgggaagggagcgcgagggtttttagcggttcgcggtttcgggcggatttttagaacgagtgcgggtcgttcggattggtagattgcgagtttcgaggggcgcgggacgtagtcggtttagataaagaaatcggc

SEQ ID NO: 4865 - DNA, 697 bp, Artificial Sequence
  Description of Artificial Sequence: Synthetic polynucleotide
gcggggaggcggcgggggcgggagcgggcgaggggtcgcggtcggtcggcgttcgggtttcgattttcgggtcggttaggggcgcgtcgagtagtaggtcgtgcgttaggcggaaatgttttagtaggttttcgcgtatcgggtcgttcggggggtagtaggggtaggcggcggcgggtaggtcgagcgcgtcgggcggtggcgtagcggggtacgagtattttttgtgcgttaggtaggtttcgaggttgtggaagtttacgcggtaggtcgtgtattcgtggtagtcggttagcgtcggtgtcggggtttcggggagcgggcgtcgcggttttttgtttaggtcgatggggtcgtcggtcgcggggtcgggcgagcgcgtaggggcgaggtcggggtcgttttcgttttcgttttcgggtcgcggcgattcgggcgcgggggcgtggtcgggcggcggggggggcggggcgtcggtcgcgtgtagttcgtagagtttgcggcgtttgcgcgtgcgtataggcgcggcgggagagggggtcgggggcgcggtcggtttagggggtttcgggggcgcggtcggtcggcgcggcggcgggtcgtggcgcgaggcgtagtagtatcgtttgtgtacggtgtaggtttcgtggcggttgaagcggatgttgtaggtttcgtatagcgtgcggttggggtc

SEQ ID NO: 4866 - DNA, 226 bp, Artificial Sequence
  Description of Artificial Sequence: Synthetic polynucleotide
gtagaggcgcgtagaaaacgcgcgggtggcgcgcgcggttatttagtgggtttcgttcgcgtcgtcggcgtcgtcgtcgtcgtcgtacgtgcgtcgtcgtgagcgcgaagggcgttcggattcgcgttttgttcgttcgtttgttcgtcggggttattgtggatttttaggtaatagttaagtgagaagttttttttattatcgaaaggtgtttgcgtttttttta

SEQ ID NO: 4867 - DNA, 201 bp, Artificial Sequence
  Description of Artificial Sequence: Synthetic polynucleotide
tttagggaggatgggggtcgcgggggaagtcgggcgtttcggggttttcgatatttatattttcgtacggcgtacgttttgtttcgagtttgcgtttttcgagttagtacggcgagtttgggattttcgtgttttttttttgtggttttcgagaaacgtcggagtttcgtgttttgttgggggttggggggatggagaaaa

SEQ ID NO: 4868 - DNA, 201 bp, Artificial Sequence
  Description of Artificial Sequence: Synthetic polynucleotide
tttggagatgtgattttttaaaagtttagtcggcgaatgggagattgaagggtgacgggaagggggtaggcgcgttcggcgttttgattgggcgtgcggcggtaggattttaaagcgttttgtttcggatcgtttgttttgggtgatttttcggatttgttttggtggaattcggatttgtttcgtcgagatgacgaggta

SEQ ID NO: 4869 - DNA, 215 bp, Artificial Sequence
  Description of Artificial Sequence: Synthetic polynucleotide
agaggaggaaggaaggaggaaagaggaagacgggcggtcggaggcgcggggttgcgcggcgtcggtcggcgcggcgttggaaggcgtcggcgttaatttcgcgaggtaggcgacggagggggagcggcgttaatatataagagtattgtattacgttaatttttttttagaatagtatgcgttagtagtatatttacgttttgattgaaggataa

SEQ ID NO: 4870 - DNA, 252 bp, Artificial Sequence
  Description of Artificial Sequence: Synthetic polynucleotide
tcgtcgttgttcgggtttcggggttgggtggaggaaaggggtgttcggaatcgatttttatttttcgatttttttgttggatattacgtttattttggacgtcgtaagagaagttgttaagtttcgtaggttttgattcggcgtttttcgcgtttttcggttgttttcggtttttttgtgtttcggtggagtatttgcgttcggggttggggttggaggaggtagttatacgcgcgtatacgtatacgttta

SEQ ID NO: 4871 - DNA, 203 bp, Artificial Sequence
  Description of Artificial Sequence: Synthetic polynucleotide
ggcgggggagtgagcggagttttttataatgtttcggtgcggtgtagtcgcggatggatgttgcgggaaggggttgttatttgttgtttttgttagcggcgcgcggatttgttcgcgtttttgtagtcgtcgtcgtcgtcgtcgttagttcgttcggtttttgtagcggcgtcgtttgcgtttttttcgcggtcgtcggagcg

SEQ ID NO: 4872 - DNA, 201 bp, Artificial Sequence
  Description of Artificial Sequence: Synthetic polynucleotide
ggtcggttttatgcggggcgtttcgtcgcgtcgcgttcgcgtttttgtatcggggtgcggggtttagttcgacgcgtattcggcgtttcgcgcgttttgcgggttttttaggtcggtttcgggtgggttaggatcgcggcgttggtaggtcggggttgagttcggtttttcgcgttggagtttttgcgtcgggtgtcgtcg

SEQ ID NO: 4873 - DNA, 201 bp, Artificial Sequence
  Description of Artificial Sequence: Synthetic polynucleotide
tgaattttagagggttgggttttgatttgagtgtcgattcgttaatgaggacgggaggataaggttgtcgacgtagcggaaggtaggggggaagcgattcgaggatttgacgattatttttaggtaggggttttttaagtaggtacggaaattaattttattaaatcgcggagtggggattgggttcgggcggtgtttagt

SEQ ID NO: 4874 - DNA, 201 bp, Artificial Sequence
  Description of Artificial Sequence: Synthetic polynucleotide
ataattttcggaaggagggggttaaatgcggtagcggcgggtttgaaaagggttaggagcgtcgtaggaattggggtgtataggttttcgcgtgtttagcgtttcgttttttttcgttttaggtttgttaggggcgcgcgtggcgcgggtagagtttggtgggtgggttggcgcggatagaagttttgtcggggagcgggg

SEQ ID NO: 4875 - DNA, 213 bp, Artificial Sequence
  Description of Artificial Sequence: Synthetic polynucleotide
tcgatcgcgttttttgcgttcgttcgcgttttttttgtcgtttcgcggtttaggggtgtgagttattcggcgatagtttcgttaggttatttcggggcgcgtaggtggatacgtataggaagatcgttatttttaagatttttatattgtttatcgtggggcgaaattttataattttttgtataaaatgtataaataatattaaatgagttg

SEQ ID NO: 4876 - DNA, 385 bp, Artificial Sequence
  Description of Artificial Sequence: Synthetic polynucleotide
tttgtacgtatgagtaggtatttaatattttttggtttagttatatgtgatatgaggttatttacgttttttttaattaatttttatgataattatgtgcgttatggagaaaattaatggaggaaaaattatagagttattcgaaatagttgcgttgtttattattcggtgtttgagtttgttttttttgtaattagattatatgtgaggtagttttagttaattgtttgtgttatttatcggggaattttagttttatttgtgaatatttaggttttttcgtcgtaggatagatgttgggtgaggtttgttttttacgtaaatatttgttttgttgtttcgagttagttacgagagttagtcggtttagataagtaggggatga

SEQ ID NO: 4877 - DNA, 278 bp, Artificial Sequence
  Description of Artificial Sequence: Synthetic polynucleotide
agggtattaagaaaagaggggtatgcgagtttggaagttggagagagttcggggttttttagagcgggtgggacgtcgcgtttttaggatttcgcgttacgcgtattttttttatttcgatatttattgttatttttatagcggagcgaggggtttcgtcgagggcgagcgtatttcgtgcggttgagatgttcggaacgttttttcgcgtttcggtttttttagaaggggttatagtcggttcgcgagttttcgggcgggggttgagtcgtagtgtt

SEQ ID NO: 4878 - DNA, 248 bp, Artificial Sequence
  Description of Artificial Sequence: Synthetic polynucleotide
tcggcgtaggcgagtttggtttaagggttcggatcgggtttgggaaaagtttgtttttcgagggggagagcgagcggtcgcgttgaggcgttcgcgttgcgcgggggcgtttttcgttgtttgtagggagcgcggcgcggacgcggcgggcggttcggttatttggaacgggcgttcgttttggttttcggggttgtttttgtcgtttcgggaagtcgtcgatgggttttatcgttggcggttcgcgt

SEQ ID NO: 4879 - DNA, 216 bp, Artificial Sequence
  Description of Artificial Sequence: Synthetic polynucleotide
tcgtcgtcgttggtgggtggcggcggttcgggtgttttttggattgcgtagtaaagaggtattttgggagatggggttaaggttttagggggtgttattcgcgaacggtttattcgttagattaggggggttttttggttgtgcgtttggttagaattggttttgacgatggaagtttttggaattaaagcgttgtttttttttttttgtgttata

SEQ ID NO: 4880 - DNA, 201 bp, Artificial Sequence
  Description of Artificial Sequence: Synthetic polynucleotide
gtatttattagggcgtttcgtaaaaaatttcgttttcgtttgtttttgggaattataggtaagttttgggttttcgaggtgtagttttaggtagagtttcgtgttgggaggtgggaagggggtttgattttggggatttaggtagtttggggatagttttattaggggtcggtgtttagaattggtgagggaggtatttta

SEQ ID NO: 4881 - DNA, 208 bp, Artificial Sequence
  Description of Artificial Sequence: Synthetic polynucleotide
cgagacggataggaatcgaggagatttttttgtagcgttttttatttttcggatagaaattttgtagattacgtttatttttttatttcgtgtatcgttcgtggttcgtgggtagtagttgtttttttgggatttttttcgtttgttcgcgagttttcgtacggtcgcgtttttgttgttggggtcgttcgttggttttggttgttcg

SEQ ID NO: 4882 - DNA, 201 bp, Artificial Sequence
  Description of Artificial Sequence: Synthetic polynucleotide
atttggtttaatcgtcgttagttttaagttacggtttcggttttttttttttaattgtgtgggatttcgtcgtttggtttcggtcgggcggaggggtgacgttagtcgtttatatagtgttttttggtcgttggagttcgggaaatttgtgcgttcgaatttggtttcgttaagaagttgggtaaggattcgggtttttga

SEQ ID NO: 4883 - DNA, 364 bp, Artificial Sequence
  Description of Artificial Sequence: Synthetic polynucleotide
ggcggttagtagggttttcgttttcggggagaagtgtttacgatttaagggttgtttgttttaggaattttttaaagaattatagatattgagagtattcggggtttggtaggaagtgtagtgtattttttagttttagggtaattaggatagtatgaattttttattttgtggtagaataaacggttagcgtttcgatgtggcgcgttcgatttttttttatagagtttaaaagttacgtttaattaaattgtagcgttttcgttttagttgggtatcggtttggaagcggtttggaattagattggattcgaggaggtaagatttcggtagcgcgaggttaattataggttttattcgcggt

SEQ ID NO: 4884 - DNA, 213 bp, Artificial Sequence
  Description of Artificial Sequence: Synthetic polynucleotide
ttttttaggtttttggcgttttcggcgcggttgttttcgcggttgttttcgtttatggtcggcggcggtgcgtagcgcggcgttgttcgtcgtgttgagcgttgattcgcgcgttcgttgttgttcggttttcggcggcgagaatggaaagttgtcgttttcgttaatttcgaggagagatagaagattttatatgttggggagaggttgggc

SEQ ID NO: 4885 - DNA, 201 bp, Artificial Sequence
  Description of Artificial Sequence: Synthetic polynucleotide
ggtttgtttttggaagaatcggttttttagtttttcgtcgtcgtagttgtgatataagtaagtgtagtcgcgttgttcggggttcgttagggtttttcgcgttcgttttttatcgtggttcgcggcggtcgcgttttcgtttcgtttcgttcggtcgtttcgtcggtttttgtttttagttgggttgtcgtgacgaggaga

SEQ ID NO: 4886 - DNA, 201 bp, Artificial Sequence
  Description of Artificial Sequence: Synthetic polynucleotide
tttatttatcgcgtttaattattttgtatagttggtttttttttttttttaagtatagtttaagaaggtaaagggagataggaaagggtggtagtttgacgatttagcgatgtattttagaatcgtttttatttttttagtgtgaagttttttgggagaggtgagttaaatcggacggtcggtttttgtagtcgtttagag

SEQ ID NO: 4887 - DNA, 296 bp, Artificial Sequence
  Description of Artificial Sequence: Synthetic polynucleotide
tattagtcgggttggttgggcggttcgggagttcgagcggtggcggagcggcgagtagcgagtagcgtttgcgggagcggtcggtcggtcgggttttcgcgtttcgtacgttcgtacgtttagcggggttcgtattgagtatgggcgcggcggtcgtgcgttggtatttgtgcgtgttgttggttttgggtatacgcgggcggttggtcgggggtagcgggtttttaggtaagttttcgatcgaggtggggggcggcgggcgcggggggttcgggcggtcgaggcgcggtttcgga

SEQ ID NO: 4888 - DNA, 201 bp, Artificial Sequence
  Description of Artificial Sequence: Synthetic polynucleotide
gtttttagtaggtttttattttatttttttcgtcgttcgtcgagttgggttttattaagggtatgcgaagtcgtaaggaaggtaagatgtagcgggcgtcgcgcgatagtgacgcgggtcgggagggttaggaattatagtcgcggttttaggacgaatttcgggtttagtagtttcgggcgtaggagtcgttaggtaggg

SEQ ID NO: 4889 - DNA, 297 bp, Artificial Sequence
  Description of Artificial Sequence: Synthetic polynucleotide
tgtattttcgatacggagttggtgtttcgggaaggttgttttttgaagttttttttgttttgttgtggttttgttttttcgcggatttttttttcgtgtcgaggtttagtttttggttttaaggaataaattcgttggtttgaaagggagttacggtagaagtttaggggtagagcggcgggagcgcgcgattcgcgcggttggagtttcgggggtatttggagagtagcgcgtttaagcggggttattggtttcgcggttgcgtttttttttttttcgcgtcgcgttttttttttc

SEQ ID NO: 4890 - DNA, 268 bp, Artificial Sequence
  Description of Artificial Sequence: Synthetic polynucleotide
gtgtagcggggtttggcgtcggtttttttttattacgcgttcggtttagggtcgtttagtcgtcgttatcgtcgtcgttttttgggtcgatggagtcggcgcggaaggttcgcgcgttttgcgtcgtcgtcgtttagtgtcgtcgttagtatttttttcgttttttcgtttttcgggtttatttcgcgggggcggcgttattttttcgttgtttaggttcgggtatcgcgggcgtttcgcgggcggtagtcgtttttttcgagcgcga

SEQ ID NO: 4891 - DNA, 201 bp, Artificial Sequence
  Description of Artificial Sequence: Synthetic polynucleotide
aaggagcgggattgttttttcggttggacgatagcgtcggggattcgtagcgtgcgcgggtcggaattaaaaaagtagttcgggagcgcgagggttgagcggggtaagtatgggttgtttttcgtagttttttttttgttcgaggttcgggttggtcgtttgtttgtttatgattgtttagttgttttttcgattgtttag

SEQ ID NO: 4892 - DNA, 201 bp, Artificial Sequence
  Description of Artificial Sequence: Synthetic polynucleotide
ttaattcgttcgtagttgttcgttttggattaagtcgtttcgcggttcgtgttaggtagtgggttcgtttttttttttttttttttttttaaattgggacgtgcgaaggcgtagttgttttttcggggttttttttattttttatatattttgttttcgttttttgttttttaggttcgtggcggagagatgttgatcgcg

SEQ ID NO: 4893 - DNA, 201 bp, Artificial Sequence
  Description of Artificial Sequence: Synthetic polynucleotide
gttttggagtttagtagagttggagcgtatattttcgttttttttttttcgttttcgagtattaggcggatatattcgtatttcgaatgttttagtgggcgtagagtttattagaaatggatagtcggatttttcggcgtttgttgggggtatcgttgttaggtgtttggggttcgttttttcggttttgttcgtataggg

SEQ ID NO: 4894 - DNA, 201 bp, Artificial Sequence
  Description of Artificial Sequence: Synthetic polynucleotide
ggtcgtcgggcgttgtagtgggacgcgcgcggttgtgagtttgcgggatatgtttttcgcgtcggttttttgttggcggttatgaagaggtagaacgtgcggattttgttttttatcgtttgtatttttatttatttgttggtgggcgtcgtcgtgttcgacgttttcgagtcggattacgagatgcgcgaggaggagaaa

SEQ ID NO: 4895 - DNA, 302 bp, Artificial Sequence
  Description of Artificial Sequence: Synthetic polynucleotide
cgttcggacgtcggagggtttcgattttcgcgcggtttatgcgttcgcgttcgtttcgttgtttcgcgaggttcgcgggatttttttcgtcgtcgtcgtcgcgttcgtcgttttcggaggagcgggttggtcgatcgttatcgcgtcgtttttcggtcgttttcgaagtcgttttatcgcggtttttgtcgttttggggtcgcgtttcgttttcgcgttttgggggttgagtcgagtaaatttcgcgtatcggtcgacgttcggcggggatttcgttgcgtattcgcgcgttcgggtgggcg

SEQ ID NO: 4896 - DNA, 201 bp, Artificial Sequence
  Description of Artificial Sequence: Synthetic polynucleotide
tttttttggggttttttatgttaggtttcgcggttgtgttcgtaagcgtagatggtttcgggattcgggttattttgacgtcgtagatttagtacgttgcggatcgggtacgttggatttcgggataagtgcggagggtcgggggttggaagggattcgagagtagagttcgcgtttttattttacggacgcggttatcga

SEQ ID NO: 4897 - DNA, 220 bp, Artificial Sequence
  Description of Artificial Sequence: Synthetic polynucleotide
cggttcgtcgtttcgtatttgcgttcgtagtcgcgcgttcgttcgttcgtcgtcgttaggtttcgcggttcgggcgtttatgtcgcgttttgcgttcgtcgtcgtcgtcgttgagagtcgcggagcgtagttcgagggagcgtcgggcgggggagtcgagcgatcgggggcggggcggggggcgagagttggttcggggttcggtagtcgttcgtttcgc

SEQ ID NO: 4898 - DNA, 347 bp, Artificial Sequence
  Description of Artificial Sequence: Synthetic polynucleotide
ggcggtatatcggtagggcggtcggttttgttgggttttttgggcgtcggtttcgggggttcgggcggtttttttcggttttcggtttggattcgcgaacgcgcgggcgcgaggggttgggacgcgggagttttttgagtgcggagcgcggagttttggtgtttcggcgtattgtagttatattttcgggtcgcgcgttttcgtcgttttttattcgcgtcgtagggtttttttttttgaggcgtcgttcgcgtatcgtcgggggggagggggtagcgttaataaattggggagttcggttcgtcgcgtttaggttttcgtttggagtcgtcgtattcgggacggtg

SEQ ID NO: 4899 - DNA, 201 bp, Artificial Sequence
  Description of Artificial Sequence: Synthetic polynucleotide
cgtgtacgtttcgtttttattggtttcgtttcgtgattacgttttcgtaattttgatagattttattttcgaggattttttttaggagtatagtgatttcgtttttatagggttcgtttcgttatattgattttttcgtgtcgttcgcgggattttatttttgttcgtttgtttcggtgtttatggggaagtttggtgtta

SEQ ID NO: 4900 - DNA, 201 bp, Artificial Sequence
  Description of Artificial Sequence: Synthetic polynucleotide
tagattcgggggaattaggaaacgcgttcggcgattttcgggtagtagtatcgggttaggtttgttttcggaatcgttgacgttattcgtcgtttttttcgtttgggtttttcgcgggtcgtaggggtggaagttcgatttgggttagggttcggatttttttttttcggtttttgcgtcgtcgttttcggtgttaggacg

SEQ ID NO: 4901 - DNA, 225 bp, Artificial Sequence
  Description of Artificial Sequence: Synthetic polynucleotide
ttgtagtttgggtaatcgagcgagattttatttaaaaaaaaaaaaaaaaaaaaaaattaaggttgaattcgggttttcgtacgttcgtatttatttgcgcggttattacgcgttgtttttcggcgattaggttgtattttttgtattggtagtcgcgttatatgtagaagcgtttgtggtttttgagcggcgaggcgtagtcgtggtttttgtagcgtgcgtatt

SEQ ID NO: 4902 - DNA, 318 bp, Artificial Sequence
  Description of Artificial Sequence: Synthetic polynucleotide
ggttttggtagagcgcgtagcgagtcggggatgaggttttttaagttttcgttggtttgttgtcggcgtagcgttatttgcgtagttatgattcgttgtcgttcgatgatgaggatgtatttttcgtaggtgtagtttttgaagcggtagtaacgtttgtggtttttgagttaggataggacgttatggttgcggtagcgcgcgtatttgggcgtgcgttgtaggggcgttcgtggcggttgcgatatcgggtcgtttatgtataggtagggggagtcgtagtcgtttatgtttcgggttttcgaatgagttggtagt

SEQ ID NO: 4903 - DNA, 265 bp, Artificial Sequence
  Description of Artificial Sequence: Synthetic polynucleotide
gtggagggaaggagggaggaagttagttaagtttttagcgatttagtttagtatatttcgaattttgtaaagttttgttcggttttttgtagtttcgggcgttttattttgttgaggtcgttttcggttttttttgatttaggttgggcgggaaaggtcgggtcgttttcgtttggtttagatcgttggtttattcggcgggcgcgcgtagttgtatttagcgtagcgttattggttttagtttgtagattgcgttttttttttt

SEQ ID NO: 4904 - DNA, 259 bp, Artificial Sequence
  Description of Artificial Sequence: Synthetic polynucleotide
gggtcgcggggtcgggggcggtcgtcgtttggttgggggatcggggtcgtgttgggcgtcgcggagtcgggatagtagtagtggcggcggggatagcgtcgcggttggggtttcgcgttttttggagcgttttttgtttagatacgacgatttcgttcggaggtatatcggttttggggataaagattagagagagatgttgtagattttggggttggcggtaaggatttttattcggtttttcgcggtttttttttcg

SEQ ID NO: 4905 - DNA, 201 bp, Artificial Sequence
  Description of Artificial Sequence: Synthetic polynucleotide
gagcgtagattaggtttttagggcgcgggagtttgttgtttttttttgtaggggtcgttttcggacgttttattcgtcgttacgtggtttcgggatgtgcgggttgcggtagagagtgggtagtaatgtttttggttttgcgttttcgttttagtcgcggggatttcgaggcgagtcgttaattggtatcggtgtttcgtt

SEQ ID NO: 4906 - DNA, 323 bp, Artificial Sequence
  Description of Artificial Sequence: Synthetic polynucleotide
acgcgtttgtcggggaagggttcgtcggcgtcgcgttttcgaggtttttgcggcgaatcgcgttacgcgcgatttttggtcgggggcgggaggcggcggcggcggtaggagaagtttaaggttcgagcggttcgtagtttttacgtttgtatttttttattttcgttagttcgatggttcgtttcgcggcgtgtattggagtaagtaggtttcgtttcgagcgcgcgcgttttgggaagtgttgtaagtttggagatttggagtgagtttcgggcgttgttggttcgattgttcgcggtgttttttcggtgaggtcgcggggg

SEQ ID NO: 4907 - DNA, 201 bp, Artificial Sequence
  Description of Artificial Sequence: Synthetic polynucleotide
tagcggcggcggtcgagtttagttcgtagggtgggaattgagataggcgttttacgttgtttatcgcggttgtcgcggtcgtcgtcgtcgtcgtcgttacggtcgtcgttttttgtattttgtcggggtgagacggttgttgaggttgcgattgttggggcggttgttgcgggggttgtgacgggaggtgcggaggcggtt

SEQ ID NO: 4908 - DNA, 355 bp, Artificial Sequence
  Description of Artificial Sequence: Synthetic polynucleotide
tagcgtcgtatagaagtcgtagagtagcggcgtgaagtcgcggttcggcgcgtatcgggtcgtcgcgaagtatagtgttattattttgttttgtagcgtcgtttcggtttttatcgtcgcgtttttataggttattaggtgtcgttcgtttagaatgttaattatggcgtagatacgtagttatttgagattcgaggatatttgtaggaggatgattatttgcggggaggcggcggcgagcgtcgcggtgtttcgtttttgttcgtattatcgggcgttggattttttaagatttgttttagatgcgtttatattttggttaggtttcgtttgtggttggagtaattgtgttcgc

SEQ ID NO: 4909 - DNA, 201 bp, Artificial Sequence
  Description of Artificial Sequence: Synthetic polynucleotide
tgtatttgcgtcgtttttggtttttttaggaatgcgttgaagtttgtaattagttttgtgaagttattgagtgtacggttgagtgaaatttttaaagttcgaggaaaacgggtcggttgaatgggagttagtatggggtttttttttaagttttcgcgttgttaaattttagtagagttttttataatcgtttcgcgcggg

SEQ ID NO: 4910 - DNA, 290 bp, Artificial Sequence
  Description of Artificial Sequence: Synthetic polynucleotide
ttgttatgcgcggtagttcgcgtcggggtcggtattagtagcgttcgggcggatgtagcgagtttacggaggggtatgtttttacgtattaagtataatcgttttaggaatgattcggtgatatcggtcgatgattttttttatagtttgtcggtgagcggcggcggaggtaaggtttcggcggcgcgcgcgatttcggcggcggttttttatttggtgttcggcgaggcgttgcgtaaggcgttcgacgatgggttcggtagtttgggttatttgttttataaggtgtt

SEQ ID NO: 4911 - DNA, 201 bp, Artificial Sequence
  Description of Artificial Sequence: Synthetic polynucleotide
ttattcggcggaaattcgcgagtcggttttttcgcgtttaagaagtttattttttaagtttttttattatgattttgaatgcggataattggggttaaacgaggaaggatatagatttaaaagttagatttaggttttagcgcgtttttgggttttaatttgggagattcgtatttagttcggcggaagttatagttttta

SEQ ID NO: 4912 - DNA, 201 bp, Artificial Sequence
  Description of Artificial Sequence: Synthetic polynucleotide
ttttagcgtttaggtcgattgcgttttgatcgggagttattgcgtttagcgtagttcgagggcgttgagttcggaggatgcggcgcggggcgggggtttcgggagtaatagagattgggattcgagggttcggttcgcgttgttgtttacgtagcgtttttattttggaaagagtgtttttcgcgcggcgggtcggttttt

SEQ ID NO: 4913 - DNA, 288 bp, Artificial Sequence
  Description of Artificial Sequence: Synthetic polynucleotide
gtttaggagaattcgtaagttagcggcgtttgcgttcgagttgtagtcgttttttgtcgtttacgcgagttcgagagcggttttcggagttcgggttagcgtcgagttgtaggcgcgcgtttaatcgttttgttgggtttacgcggtttgagaggtcggagcgtttaattgttggtacgcgagtaacggtttagttaagtttattcggtttgagaggtcggaggttgcgagtgtcgttgttgaaggttgtggtggatcgggttggatcgcggattttgagttatatcg

SEQ ID NO: 4914 - DNA, 212 bp, Artificial Sequence
  Description of Artificial Sequence: Synthetic polynucleotide
ttttgcgtggtagatatttagggataggttaattattatttttaattattcgtttttgagaggtttaggatttgtttttatttgatggatagtggtgtacggattaaagacgacgtaggataggtaatttttttttttaatttttcgggattagggtagttttgaagatttttagaggtagttaagtagttttttttcgtagcggggagtga

SEQ ID NO: 4915 - DNA, 201 bp, Artificial Sequence
  Description of Artificial Sequence: Synthetic polynucleotide
gaggtagggaggcgggggtgcgggaggtttcgcggttgcgcgggcgcgtgttggtggtttcggcggaggtttagtttcggttcgcgttcgcggcgttttcgttgcggttcgagcggtttggttgcgggatttgtgcgtacggatggcgcggtcgtttcggtagtattcgggggtttgggcgtcgttgtttttgttgttatt

SEQ ID NO: 4916 - DNA, 246 bp, Artificial Sequence
  Description of Artificial Sequence: Synthetic polynucleotide
cgtttagtttcgcgtacgtttttttgcgagttcggtcgtttagcgttttttttcgttcgagtcgtcgtttgcgtttcggggtagtcgttttgtttttagcgcgatgtggtttcgtttggttttttgttgttggggtttggcgttcgtttcgggttgggcgattttttagtagatgttttcgtcgcgtaattttagttttcgtttttttttcgagatcgcgttcggggttttcgggagtattttcgc

SEQ ID NO: 4917 - DNA, 201 bp, Artificial Sequence
  Description of Artificial Sequence: Synthetic polynucleotide
ttttttagggatggagtagttacgtttttcgagtgtgtttattttatcgatggagtaaagtgaggtttttagttcgttcggatgtttttgcgtcgttcgcggggtagttttcgtatagatacgttcgtaagttttcgattcgttcgttattcgcgtttagatattcgcgagtttttggggtcgtagggacggtgtagcgtt

SEQ ID NO: 4918 - DNA, 201 bp, Artificial Sequence
  Description of Artificial Sequence: Synthetic polynucleotide
attttagatatataggtagtcgggattttcgttcggtgcgtttgtttatttatttttttgcgttaggttgggacgcgtttcgtttgtaaaaggtttaaacgtatttttcgtcgcggggcgggatttaggggtttaggtttcggggtttagaggcgggtaattttgttaattttttttagcggcggggaacgtcgcgtaatc

SEQ ID NO: 4919 - DNA, 358 bp, Artificial Sequence
  Description of Artificial Sequence: Synthetic polynucleotide
ttaacgggttcggtgtatcgttatcgcggtttcggtttcgttcgagttcggttgagtttttaggtcgggtttcgggtttcgggcgttcgcggggtaggacgtttttcgtcgaggcgtaggggtagttatattgcggggcgtttgggcgacggcgttaaagttagggttataagggtacgggataagcggggcggggggagtaggagattaggatagaggtcggcgttcgtcgcgggcgtttttacgtcgcgggtatcgttcgttcggttttagcgttcggggcgtaaagtaagggcgtaaattttgttcgaggcggcgacggttgcggtcggggtttattttgaagtcgttaggtgtt

SEQ ID NO: 4920 - DNA, 201 bp, Artificial Sequence
  Description of Artificial Sequence: Synthetic polynucleotide
gttgcgtgttcgtcgtttatagtcgtagttaaagagacgtaggcggttttacgcggtttggtttatcgtcgtttgtagtgttcgcggcgcggggcgtttcgaggttgggtttatcgtttttttcgcgtttttgaagatttttcgggttttttcgaaggagtattgtttttttttgtattttttttttagggagttcggtcg

SEQ ID NO: 4921 - DNA, 201 bp, Artificial Sequence
  Description of Artificial Sequence: Synthetic polynucleotide
cgttttttcgttttcggttcgagcggtcgttatcgcgggcgggcggcgttgcgttcgggtgcggtttttcgtcggcggcggcggcgcggtcgagaggtgcgggtttcgcgcgggcgggacgcggggcgttgttcgtaggagcgattaggtgggcgtcgggtcgatcgtagtcgtcgtcgcgttttttttcgcgtttcgggt

SEQ ID NO: 4922 - DNA, 201 bp, Artificial Sequence
  Description of Artificial Sequence: Synthetic polynucleotide
gtcgaggtttagagtcggtttttgttcgtaggcggcgaacggtattttgtttcgttaggtttttgcgggtgtgattcgtgattcgtagattttttcgggcgtttttggtttatgacgcgggggttgttcgttttacgtaggcggtttcgggatgttttttcgtttagattttagcggtagaaatagtttcggatttttttt

SEQ ID NO: 4923 - DNA, 277 bp, Artificial Sequence
  Description of Artificial Sequence: Synthetic polynucleotide
aggggagtaaaacggagttttcgggggtacgtaggtttcgtttttgggtgttggttttgtttttggtttttttagtcggtgtagtgattcggaatagcgcggtcgttttttcgacgttcgcggttttttattgcgtcgaggcgagcgttacggttaaagtttaagtttcggcgttcgttgcgtttgtcggagttttgtttgttcgagtaggtagcggggtttaggtacggcggcgacgtcgaagggttagtcggtagatagggttgggtttttgcgg

SEQ ID NO: 4924 - DNA, 201 bp, Artificial Sequence
  Description of Artificial Sequence: Synthetic polynucleotide
tattttgtttttagttcgattttttttgcgttcggagtttgggttcggcgcgtaggagattgcgtgtattttggcgttttcgatttttgttagggcgtacggggattttagagcggattttttacgagttttaataggaggttagggagtcgggatattagagataaattttttcgaagttttttttcggttttattgatt

SEQ ID NO: 4925 - DNA, 247 bp, Artificial Sequence
  Description of Artificial Sequence: Synthetic polynucleotide
gtcgttatagtcgtttcgagttcgcgcgtagttttagttgttacgcggattttttgtttagattgcgttgttgaagtcggcgtttcgttttatacgggtcgcgttaattcggtcgttgtgtacggtcgggtgcgaaattttttcgcgggtttacggggttgtcgaggcggggtcgtagcggtcgtcggggttggggttggtttcggtttgagatagttttatggaaggttaggttttcggtttttgc

SEQ ID NO: 4926 - DNA, 201 bp, Artificial Sequence
  Description of Artificial Sequence: Synthetic polynucleotide
cgtcgtttcgcgcgtttcggttatcgtcgtgtttttttcgggcgttagggaaggtggttaggtggtttttgttcgtcgcgttttgcgtttcgcgtcgttcgttttgcgttttgttttgttcggttgcgttttttcgggttttttcgtcgttatcgggaagcgtcgttcggttttgagcgttgcgcgggttgcgcgcggggg

SEQ ID NO: 4927 - DNA, 201 bp, Artificial Sequence
  Description of Artificial Sequence: Synthetic polynucleotide
tttgaagtcggcggtgtttaggagcgcgtcgtttttcgcgtagggtcgtttgcgggtatacgttagcgttttttagttcgcgtcgggcgttttcgcggacgcgcgtagttttcggttcgttaggttcggttcgcgtagcgtagttcgcggttatcgcgatttatcgggcgggcgggcggtcgggcgggggcgggtttggcg

SEQ ID NO: 4928 - DNA, 201 bp, Artificial Sequence
  Description of Artificial Sequence: Synthetic polynucleotide
taggtttggttttagaatcgtcgggttaaggagaagaggttgaagaaggacgtcggtcggtagcgttgggggtagtattttcgtaatatgaagcgttttcgcggcggttttaagtcggataaggatagcgtttaggaggggtaggatagcgacgttgaggttttttttttcggtaggcggagggatcgcggagttcggggg

SEQ ID NO: 4929 - DNA, 356 bp, Artificial Sequence
  Description of Artificial Sequence: Synthetic polynucleotide
ttgatcgtgatgataagaaggttggggaggttaagagaaaagggaagagagagtgtagttgtaaattttttttcgggttcgagaagtatcgtttttttgcgtgtttaattggtatttgttattaatatgtttgtttttatttaaatggtttagagtaaggttttgattaaattagtatttttacgttaatatttagtagcgtttttggtttttggtagattttttttttagttgttaaagtaaaattatagaagcgttttggttttatttaaggtttgttggggttttttgttttttttcggagattcgaatagttcgtagatgtgcggtatttgtttatgttcgtgtttcgtgtt

SEQ ID NO: 4930 - DNA, 201 bp, Artificial Sequence
  Description of Artificial Sequence: Synthetic polynucleotide
agtcgatacgcgcgatgcgcgagaaagcgcggtgtatcgggtcgttgtcgcggtaaaattgtagtacgtggcggtatacgttgtttacgcggtcgtatacgtagcgcgttttgtgggcgttttagttttcgcggcggtataggcgcgagtagtagtaggtgtagtagttgtggtaggatttgaagtagaggtaggcgttga

SEQ ID NO: 4931 - DNA, 281 bp, Artificial Sequence
  Description of Artificial Sequence: Synthetic polynucleotide
gggttttatcggggcgtagggttggggaatcggagtttcgttcgtcgattcggagtatcgtttacgtagattcgtttcgggcgagggaggggtcgggcgcgtattcgcggggagggcggcgagcggggattagtcgaagtcgggagaggggcgtttttacggggcgggaaattggcgcgcgattttgggggaagtgtaggatggggggataggggcgttttcgcgggggtggatgggggattatagcggggttggcggggtaggggtcggcgtacgaggtt

SEQ ID NO: 4932 - DNA, 222 bp, Artificial Sequence
  Description of Artificial Sequence: Synthetic polynucleotide
tatcgatttttcgtgtagcggtttcgtttcgtcggattttaattattgttttaaggattgggattataatggtttttttgtgtttattattaacgttatcggttaggtgaggcggttaggcgggtcgcgggtttgggggcgggtagagagcggcgagggcggggttttacgttcgttgtattttttttatatttttagtgggatttggtgtgtgatttgggt

SEQ ID NO: 4933 - DNA, 237 bp, Artificial Sequence
  Description of Artificial Sequence: Synthetic polynucleotide
gcggttcggaggcggttatgattatgtatatgaaggggcggtcggtgcgtcggttcgtggggtagatggtggtgggcgtgaagcgtttgttggtttcgacgaattcgtaaagttgttcgtagacgcgcgggaattcgtggcgtaggaagacgtcgcgtagtcgtagttcgcgttggatgtggatgaaggttatttcgcgcgcgcgtcggttcgtttcgtcgttttgatttaggttcg

SEQ ID NO: 4934 - DNA, 201 bp, Artificial Sequence
  Description of Artificial Sequence: Synthetic polynucleotide
ggtttggaatagagattttagttgatttataaggacggggtttgagatttggggttttttgttatagtggtataatttagtttgtattgattaatatagttttttgtgaatttcggttttaatatttaaattaaggtattcggttgttttattaagttgttatacgtttatttaaaagtattgttagattgaggaattagg

SEQ ID NO: 4935 - DNA, 364 bp, Artificial Sequence
  Description of Artificial Sequence: Synthetic polynucleotide
gcgttcgggttttgtagttttttgttgttgttcgcgttcgggtacgcgtgtttcgcgggttgcgtttgtatcgattcgtatatcgtggattgtcgcgatcgcgggttgtttagcgtgttagattttttttttttggacgtgcgtaagttgttggtggtcggtaatcgtatttagcggattttcgaggatttttttattttttacggcgatttggtttatttggattttaggaataattcgttgcgttcgttggaggagggtacgtttagcggttcggttaagttcgtgtttttcgattttagttataataatttgatttagttgggcgtcggcgtttttcgttcggtcgggaggttggtgaagt

SEQ ID NO: 4936 - DNA, 201 bp, Artificial Sequence
  Description of Artificial Sequence: Synthetic polynucleotide
tcgggatacgttttagggaaatcgtttttgggtttggtagttgaatttagacgtcgagtgtagttcgttcggtgcgcgcggcgttttattgttagatttcggaaattagttgttagggtggggtcgcgttttggcgacggttattcggttatttttgtcgttttcgttttttttaagagatttttttagcgggttaatttt

SEQ ID NO: 4937 - DNA, 201 bp, Artificial Sequence
  Description of Artificial Sequence: Synthetic polynucleotide
gttttagaggggagtcggggtggatttttatggaagggagacgtttgcgttagtttaggagtggagttcgtgttttatcggttttttaaattgcgagtacgaaatttttagaggggagttgagttggtgtttcgcgtgttttttattttttattttttattcgtaggttagatttgcgttgtttattttaggagggagcgt

SEQ ID NO: 4938 - DNA, 201 bp, Artificial Sequence
  Description of Artificial Sequence: Synthetic polynucleotide
tcgttttatcgatgcggagcgcgagttgtttattgttttttattatgtttaggattttggtttgggggcgagagaggtgataaagagttgtatgatgcgcggggggcgcgcggtcgggtattttcggttttatttgttgtgtttttcgcggttcggtttcgttcgcgtttcgatttttaggtatcggtagcgtcggttttt

SEQ ID NO: 4939 - DNA, 222 bp, Artificial Sequence
  Description of Artificial Sequence: Synthetic polynucleotide
agcgtatatatatagatataggtttatatagatagattcggttttaaaaatacgtattcgtagaggtaaaggttagcgtataagtacgtatagatatatcgataggcggttttcggatatcgcgttttttgtcgtatttacggtttacgtaagggtttatatacggttttacggaggatagttataaaatatttagatatacgttatatacgtacgcgcgta

SEQ ID NO: 4940 - DNA, 201 bp, Artificial Sequence
  Description of Artificial Sequence: Synthetic polynucleotide
gtttatatatattagtgaaacggttaaatggtagtattaggtgttaagtgatcgtataggcgtgtttttgttagttgtgagtaagataaggtagtttatcgtttttagggagtttagtttttatgggggtgtattcgtttgttagggttgttgtatttaagtattattaattcggtggcgttaataatagattttattgtt

SEQ ID NO: 4941 - DNA, 265 bp, Artificial Sequence
  Description of Artificial Sequence: Synthetic polynucleotide
ggcgggcgtcggcggggcggttttttagtaagatgtgcgcggcgtcgcggggcgttttttatttgtagcggcgttcgggagtcgggcggttgggttaggcggcgttttcggggttgttgcgcgttcgcgtttagagttgtcgttttagggagttcgttacggtcgcgtttcgggtacgttcggcggcgtttaacgatgatcgttttttggcggcgttttcggagtttggtttgggaatattgggtcgggtttttcgtgtgcgttt

SEQ ID NO: 4942 - DNA, 242 bp, Artificial Sequence
  Description of Artificial Sequence: Synthetic polynucleotide
gttttcgtcggcggcgttgtattattattattattatatattgttcggtttagtgtagtgatttcgcgggtcgggttttcgtcggcgcgttgtagggcgcgggcgcgtagttcgttcgcgcggtttggattttttttgttcggttgttttggattttataaaaaaaaaaaaaagtttagaaattttcgaataaaattaaatattcggacgatttttttcggtgagcggcgaagatagttcgg

SEQ ID NO: 4943 - DNA, 201 bp, Artificial Sequence
  Description of Artificial Sequence: Synthetic polynucleotide
ttttttttcgttttttttttgtttttttttttgttttgtggtttttttttttttttttagagatatttgggagttgtttttaagttttggggcgtttcgcggggttttgttaagggtgcgtgtgagagagggcggcggagtcggcgtcgggtgttaggggtcgagggtgggagcgggagttcgtggttttgcgttttggag

SEQ ID NO: 4944 - DNA, 261 bp, Artificial Sequence
  Description of Artificial Sequence: Synthetic polynucleotide
cgggttgtacgcgtaggcggtttattcggggggcggcggcggcggtttggtcgggatgttggcggcgggcggtggcggcgcggggtcgggtttgtattacgcgttgtacgaggatggttacgaggcgtagttggagtcgtcgtcgtcgtcgtatttgggcgtttacggatacgtatacggatatgtatacgcgggcggtttgtacgcggcggcggcgtatttgtattcgggcgcgggcggcggcggtttatcggtgggcga

SEQ ID NO: 4945 - DNA, 201 bp, Artificial Sequence
  Description of Artificial Sequence: Synthetic polynucleotide
ggggattcgcgtaggttagcgtgtcggttttttttagtttatcgttgtcgtcgtcggggttgttttaagggagttaagcggagtgggagcgggtttgcgcgtttttgttttgcgcgtaggggcgggggggtttaggacggggcgtttttttttatttatatgttgatttaggatttttaagcggttcggtttaggatatcg

SEQ ID NO: 4946 - DNA, 337 bp, Artificial Sequence
  Description of Artificial Sequence: Synthetic polynucleotide
gtaagagcggtgtagtcgagtcggcgttttagaagtcgagaggttatataagtttacgtagagaggcgtatcggatacggtaattaggagtaatttatacgttttcgggcgtacggaaattatttgttaggaaatttttaacgttttttttcgtttatttttttttattttttttttggcgcgttttttttttttttagaggtacgtagtggagtttttggagtttcgaatttttcggatattgtagaatgcggggtttttcgggcgcgggttcggttaattagagcgtcgtttgttttttttggttaatggtaggcgttatattgttgtttaattt

SEQ ID NO: 4947 - DNA, 201 bp, Artificial Sequence
  Description of Artificial Sequence: Synthetic polynucleotide
aagttttgggtggcgcgtaaaggcgtaggcgagggtcgtcgtatagagtcgtttaagttgtggtcggagcgttagggcgatttttgggaattttttaagcggaatttttcgagataagcggtttttgttttttgatattttagtcgaggtcgagttgacgcgtagttatttaattttttttgtttcggggaaataatttta

SEQ ID NO: 4948 - DNA, 201 bp, Artificial Sequence
  Description of Artificial Sequence: Synthetic polynucleotide
atgagtcgagagggttgagcggagagtgtggttttcggcggttggaggtaggagaatatgttgcgttcgttcgtcgcggcgtgagaggttcgaggtgggcgcgtcggggtaggggcggtcgcgggcgtttgttcgtttagtgggcgttgttcggatttggcgaggtggtggtttgtaatattgtgttcgtattgtttattg

SEQ ID NO: 4949 - DNA, 201 bp, Artificial Sequence
  Description of Artificial Sequence: Synthetic polynucleotide
gtagcgtcgcggcggttagtagcgtcgggtagtggattcgcggtggcgcggcgtcgggtcgcggtgtttagggcgggagtagtagtacgaggtttagggcgagcgtttaggatagcgttagtatgttcgtcgtgtggcgtttttggtatagcgtttggtaggtggcgggcgttcgggtgatgagtaggtagcggtttaggg

SEQ ID NO: 4950 - DNA, 201 bp, Artificial Sequence
  Description of Artificial Sequence: Synthetic polynucleotide
gttttaggagggaaggaggcgacggtgtttaaggacgtcggaagtcggggattttcgtttttttcgggtttcggttaggttattagtgttggttcgcggcgcgggtgtttagttgcgtttgggatattgcgggtacggttgtggcggtaacggtagcggtcgtcgcgtcgtcgacgttcggtaggattgagcgtacggagc

SEQ ID NO: 4951 - DNA, 386 bp, Artificial Sequence
  Description of Artificial Sequence: Synthetic polynucleotide
ggtggtatgtacgttttatttaaaaagtagatttttttttgtaattgttagtaagtggaaggatagtaaattttatattatttcgagatttgtgcgtttcgagcggttttaatttcgtttcgtttgttgttgttgttgttggtgttgtttcggttgtagttgttgtcgttttacgatttcggggcgttgaggtaatagggttttttttttttattttttatttttttcggtttttttatagaagcgtcgtttttagtaatttttcgtgtattttttatttttgtcgtcgtttattttattttttttttttttgttttttttttaaatcgtttttaagtatatttttcgtcgttggaagtgattataatgttgttttttaataagta

SEQ ID NO: 4952 - DNA, 201 bp, Artificial Sequence
  Description of Artificial Sequence: Synthetic polynucleotide
tttttcgtttttcgcggcgcgcgtcgttttcgggggtttcgcgttttcgcgtttaggttttttttttttggcgggcgtttataggcggcgcgggtagcgcgagtttcggagtttcggaggtttgtgcgttttgagtcggtatggatttcgagtattgcgcgttttttcgcgtggggtttgtattcggtttttatgtggttt

SEQ ID NO: 4953 - DNA, 201 bp, Artificial Sequence
  Description of Artificial Sequence: Synthetic polynucleotide
ggggcgattcggagttgcgcgtcggcgtacgcgatttcgttcgttttttattttttgttttattattagttttaatttggttttcgttcgtcgcgcgttcggggtttaggggagcggcgcggggatttaggttttacggcggagagagcgcgcgggattgcgaagattggggtcgagtgtcgttttttttgcgttttggta

SEQ ID NO: 4954 - DNA, 309 bp, Artificial Sequence
  Description of Artificial Sequence: Synthetic polynucleotide
aggcgtagacgttggagttggagcggcgttttcggtagtagcggtatttgtttgcgttcgagcgcgagtagttggcgagtttgtttcgttttacgtttacgtaggttaagatttggttttagaattatcgttataagttgaagcgcgttcgcgttttaggggcggcggagtcgtttgatttggtagtattcgtcgagttgtacgtcgcgttcggtttgttgcgtcgcgtggtggtgtcggtgtttgttcgcgacgggtagtcgtgcggcggcggcggcggtggcgaggtgggaatcgtcgcggtttagg

SEQ ID NO: 4955 - DNA, 203 bp, Artificial Sequence
  Description of Artificial Sequence: Synthetic polynucleotide
agcgtatattgtcgttagttagttagtcgtcgtcgtattggtttagtttcgaaaatttttaggcggcgtagaggtgtttaattttggttattacggcgtcgcgtcgtcggtacgtcgcgtgggttttagatagcgttagtcgttcgggtacgaagaatatttggtttggggattatagcgggttatcgatcgagggtagggtg

SEQ ID NO: 4956 - DNA, 388 bp, Artificial Sequence
  Description of Artificial Sequence: Synthetic polynucleotide
ggttcggttcgcggagttagcgtttttttcgcgtcgatttcgggtttcgggcggtcgtcggggggcgtcgggcgtatttttcgttgttaatttttcgttcgtgttttcgttcgcgtttgggtttcgtcgtattttagtagaagttattatagagaataaattatttttttgttttcgagatgggttttcggggaggaaggtaaattgtttgtttcgtgtataataagttaggcgtggagagtagcgcggaggaggtcgcggtagttatcgagcgggtagagtttttcgtttttattcgtcgttcgcgtttgtcgagttttttgtcgagcgggcggcgcgtaggttcggagaattttaaaaggtttggaatatcgggttgtttttcggt

SEQ ID NO: 4957 - DNA, 241 bp, Artificial Sequence
  Description of Artificial Sequence: Synthetic polynucleotide
agttttttatttagatcgcgttagtgcgtttcgggttttattagtttttattaggcgttgtttttttcgtttttatttagtttttttttttcgttttttcgcgagtgtatttaagcgttttcgttttatttatttttagcgtttttttaagtttggaggagcgtttagagtagtagaaatagtaggtattttatatcgttcggcgtggggatttcgcggagcgtcgttgcgcgtcgttttt

SEQ ID NO: 4958 - DNA, 232 bp, Artificial Sequence
  Description of Artificial Sequence: Synthetic polynucleotide
cgtttttttttttagcgtttaggttgggggcggcgtcggtgttagtttagtttagggcgaagtttttagggtcggttcgggtcgggttgcgggattcgtcgtggagcgtaaagtgtttgaagttttcgcgcgtattcggttttgtttttaaaggttttttagaaatgtaagaggttaggcgtagaaatatatacggacggtagttttatgagaaaatgtagataaagagttc

SEQ ID NO: 4959 - DNA, 214 bp, Artificial Sequence
  Description of Artificial Sequence: Synthetic polynucleotide
gtttttttgttttcgcgttttttggattagttttggtggggagttggaaggtatcgagtgcgtttcggttaagaagggcggatagttttgtgcgagtagcgttcggttggcgcggcgcggggtgttttttatgttaaaggaaaggatggattttttgtttgtttagggtttttattttttaaaatttttttaattgcggtattggaagggattt

SEQ ID NO: 4960 - DNA, 250 bp, Artificial Sequence
  Description of Artificial Sequence: Synthetic polynucleotide
cgtagcggggtcgttttattgtcgtatttttatttcgcgttttgcgcgtttatttgtttacgaagttttcgagtatcgagtttttgtcggcgttttggtcgtttattacggcgatttgcggtagttttagtaggtagttttgttttagcgtcgaaaacgcgttttgtagacggtttattagcgggattagtttttttatttttcggttttttattttgttcgaggggtcggcgattagttggtttttgtt

SEQ ID NO: 4961 - DNA, 201 bp, Artificial Sequence
  Description of Artificial Sequence: Synthetic polynucleotide
tggtcggtgaagttttaggattcgttcgtttggggttaaggtaaggggtgcggtacgaggagcgtagggagtttcgagttttaggcgtagatttagttgcggattcgtcgtatagttttggtgttgtaagcgtggatcgtgggcgtaaggtttcggcgggaggtattcggttcggtcgcggtcgggtttgtagggttttgg

SEQ ID NO: 4962 - DNA, 467 bp, Artificial Sequence
  Description of Artificial Sequence: Synthetic polynucleotide
tcgggtatcggcgggagaggggggagaagcggcgtggagaggatttggtaagggtttgtttttaaatttagattatgatttaatattttggacgcgaagcgaagatgggaaacggtcgtttgttgagagggggtatttgtagtttttttagaaaaggttggggtaggagagcgtgcggttagaggggtgggggtatcggagggggggttttattttttgttttatagtcgggtttttttcgcgaggcgttgggaagtatgaggtatgtagtatttaaaatgttttttgaaaaagacggatttgaagtttttttttataaatacgttattgtatttattttttatttagagacgggttgcgcgtttcgagttgtacgggtaggtatttttttcggttttgttttataaggtggggagagcggggttggacgcgggagggggcgggggggggagcgtgagaagaaacga

SEQ ID NO: 4963 - DNA, 201 bp, Artificial Sequence
  Description of Artificial Sequence: Synthetic polynucleotide
cgtatagttagcgaagcgattcgagggttagcgaataagcgttggattttcgtaggtttcggcgattttagattcggtttttcggcgaagataggaaaacgtgtgtcgagagtcgttggagggaatcgttcgtaaatcgaagaagaaattaaattagtagcgaatatttgtaaattagtgttaagttgtgagtttttcgag

SEQ ID NO: 4964 - DNA, 232 bp, Artificial Sequence
  Description of Artificial Sequence: Synthetic polynucleotide
tcgggcgcgggggaggcgtgggtgttggggcgggcgagtttagatttttcgtgggttggtttgtgggtgttttttcggaaataaatgaggttgtaggagcggtgatcggtttgattgtttttgggggtttcgaattcgtgggtggagagggtaaggcggaggtcgtggttagtatttttttagtgataatgtcgtcggggatttttttttttattttttgggagtattttag

SEQ ID NO: 4965 - DNA, 222 bp, Artificial Sequence
  Description of Artificial Sequence: Synthetic polynucleotide
tacgattttaggttcgttgatgatcgttgtggtatgaatgaggttatcgtattcggagaggtggatgtttagatgtggatttaggaaatggttttatttcgaaagtttcgggttagtgggcgtgttttttggttagtgtttttacgttcgcgttagaagggtagtaggttttcgtagggttcggcgttttatttattcgtgttttttttgttgtttttagtt

SEQ ID NO: 4966 - DNA, 239 bp, Artificial Sequence
  Description of Artificial Sequence: Synthetic polynucleotide
tagcgtcgcgttttacgttcgttatcgtcgtcgtcgttttagtatatcgtaggcgtgagtttcgtcgcgatcgggagagtttttttagttgtgcgttttcgaggtatttggtcgggcggggaggcgtcgggtcggggcgtataggggttaggcgggggcgttgttgtttatttttcgtttttcgggcgtgcgtttcgtttcggagttcgtatttcgcgttcgcgtttcgtttggaagtt

SEQ ID NO: 4967 - DNA, 209 bp, Artificial Sequence
  Description of Artificial Sequence: Synthetic polynucleotide
gtttattcgtcgtagtagtttatttttgttcgttagggagtttagggtagtttttgaagttgttagatttttttacgtaggcggcggcgttttgtattgcggagtcgcgttttgggggagtagtatttttagtttcggcgtttcgtagttagatagttttttttagggtggtagtatttttcggttagggtgtagggattttcggggcg

SEQ ID NO: 4968 - DNA, 380 bp, Artificial Sequence
  Description of Artificial Sequence: Synthetic polynucleotide
gtttagatagataaaattattttattaaagtgtaatgggagagaggaagaggagtaatgagaaggtatgtgagcggggagaaagaaaaagttcgggaggcgaaaacgaaatttatttttttgcgtttatttttgttagaggtttgtaggacgtgttttaatttggtatttcgagtttagaataaaagttacgggggttgcggtatgggtagggggaaggcgcgcggtggttgacgcggggtaggggttttggcgagcgcgggaggggcggttagtagtcgttcgcggggttggattgggagtttcgtgcgatttcgggtttggcgtttgggtcgggggtggttttcgggtttttttcgggggtcgtcgaggttcggtttc

SEQ ID NO: 4969 - DNA, 394 bp, Artificial Sequence
  Description of Artificial Sequence: Synthetic polynucleotide
ggtttttttttatgagggtttcgagtagatgaggtttaaaagtcgttttaaggagttttttttaagtttgattcgagtgggcgcgaatttttatagtagcgttaagtagtaggattatagcgttagcgtttggtttcggaggaaagataagttggagtacgtaagggcgattcgttttcgggggtttcggttaggtatttgtcgtatgtatttttttcgtggtggtggtatgagcgcgcgcggggcgcggggggtaggcgaggggattttggtaggcgtcgacgttttaggtcggattcgggggtttttttgtttgtagttttttgttttaatgatcgggttgcggggaggggagggtaggtttttttttaggtttttggtttttgtcgattcg

SEQ ID NO: 4970 - DNA, 201 bp, Artificial Sequence
  Description of Artificial Sequence: Synthetic polynucleotide
ttcggtttttttatttcggttttttatggggttttcgggtttgttcgttgtgagtagttttattttggggtgttggcgggatggttgtttcgtgtagggcgttcgggagtttagatttcgtggaaatgtttggggtttttttttgtttagaggggatagtgagtagttacgttgcgatatgtttgagggattcggacgaag

SEQ ID NO: 4971 - DNA, 557 bp, Artificial Sequence
  Description of Artificial Sequence: Synthetic polynucleotide
cgggggaaaggtcggcgttttagggcggggaggatttgggagtggagttcggagataaaatcggggttaggtagaggagttagagggaaagttagtaaacgcgagttcgggtgagagttatcggaatgcgggaacgtagtttagtcgggaatagggttttcgataggggtcgttcgtggttaggacgcggtcgttgaatagaggtcgcgcggcggtttttgttcgagggatttcgtgggcgggggttatacggaggtcgcgtacggttttcggggttggcgggggtaggtgggaggatttttttcgggttcgcgaatttgatttggtagcggttaggtgtttggaagcgtttttaaatgatagggttataaagatatgttggttaggtttgtagttagcgtagtaacgtggtttgtaggagcgtagaacgaggttagatagggttattcggacgtcgtgttgttagtgggtgggggtcgggagtaagcggtattggtttggagatttcgcggtaggtgattttttttatttgggtagcgaggttgaacgatggcgat

SEQ ID NO: 4972 - DNA, 212 bp, Artificial Sequence
  Description of Artificial Sequence: Synthetic polynucleotide
ttggagggagttgggggattttggagggtgggaagtggttgattttcggtggtcggatatttatttagagtttgattcgtattcgtgtttttttggaagcgttataattgcggggaaggagtttttagaaatcgtgttagttttaatatggcgggttaaggtggtttttaaaaattgaaaataaaggttttgaggtgggaaaaaatttagtt

SEQ ID NO: 4973 - DNA, 201 bp, Artificial Sequence
  Description of Artificial Sequence: Synthetic polynucleotide
aatagtttttttcggtttttttagttttgtttaaggggtttggaaatgttcgtagttttaagaaaggttttatttaagtataggatggggtggggcgggcggggttaagattgttttggggattgaatttattttcgtttttagcgattttcggcggataaagcgtaagtttgtgtatacggtcgattgagttattggaaa

SEQ ID NO: 4974 - DNA, 201 bp, Artificial Sequence
  Description of Artificial Sequence: Synthetic polynucleotide
gggggagttaggggtttttcgtttggggattttcgtgttgggtatttcgtacgttttggacgcgcgtagttttatcgggagcgaattttgtttcgtttgcgggtgttacggagaggggttgggaagtcgagttagttttggcggcgattgggggcgtttttggttttttgggggggcgggggcgcgtattgttgtttagga

SEQ ID NO: 4975 - DNA, 294 bp, Artificial Sequence
  Description of Artificial Sequence: Synthetic polynucleotide
tttgaaagtttttgaagcggttttttttttttttttttttttttcgtaggtagagttgtggtgtggttgggtggtttgcgtgggcgttcgggggattcgcgggtattcgggacgaggcgagggcgtagaaaatttggagtttaattagtacggagttgagttttcgcgttttaatttttaggtgatttcgtgcggcggcggcggtagtagtagtggtagcggcgatcggagttcgtagtagtttcgagcgttttcgggaggataggcggcgagttcggcgaatcgttatttgtt

SEQ ID NO: 4976 - DNA, 244 bp, Artificial Sequence
  Description of Artificial Sequence: Synthetic polynucleotide
ggcgggcgtgagcggcggaggagtcgggcgcggcgatacgcggttatggagcgggagtcggcggggatcgaggagttcgggttttcgggacggcggaggcgtcgagagggtaggacgcgtacggtgcgttttaatttgttgtcgttttcgggcgtcgaggattttgcggttggcgcggttaagggcgagcggcgacggcggcgcgggtgtgtttagtatttggtcgataatcggtttaagatta

SEQ ID NO: 4977 - DNA, 303 bp, Artificial Sequence
  Description of Artificial Sequence: Synthetic polynucleotide
cggggtagtcggggtcgggagagcgggcgtagcgcggcggggatcggagtcgcgggcgtcgggaaaggttttcgttaggaggggagggaatttcgggagcgcgagttagggggaggcgcgtcggaaagcgagagtgataagtagtttataagtcgaaaagtttttcgcgggaggcgcgcgtcgcgtgggtttcgatttagtcgttgcgcgtcgtcgtggtatataggttgaaaagtttgcgaagttatagaagttaggttcggcgtttagggggttttgattttgtttttatggttttagatt

SEQ ID NO: 4978 - DNA, 286 bp, Artificial Sequence
  Description of Artificial Sequence: Synthetic polynucleotide
cgcggaggttggttttggtagtggttagggagtggagaaagtaaattagagtcggttcggttatcgattttgcgaagttttttcgattttagtttagcgcgggagggtggcggaaggtggtgtatcgtagcgtggttttcgtcgttgtcgtcgcggttttgtaaagtgttagcgggggcgaaagcgagagtttaaaggaataggaggtttattgaattttttatcggagtttttaggggttttggttttttagtttgtttttgtttttttagttcggggatttgtt

SEQ ID NO: 4979 - DNA, 261 bp, Artificial Sequence
  Description of Artificial Sequence: Synthetic polynucleotide
gggaatcgagaagaggaagaagcgaacgcgagtaggagcgtagcgtttttcggatttttgaggttttttttgtaatttgttatattcgtagtttttattcgatattgaataataatcgcggggaggagaggttatttgtagtcgaggttcgtaaattgtcggttttattcgggtagcgttaattcggtgttcgcggacggtgattttcgagttttagcgatgcgttttattgggtttaaaatagatttaattttatagtta

SEQ ID NO: 4980 - DNA, 201 bp, Artificial Sequence
  Description of Artificial Sequence: Synthetic polynucleotide
tattgaaaggtagaaatggggagtaggtatttagttcgcggtgggtagggttttaggaggtagttttcgttcggcgatagttttcggggcgtaatttttcgtaggacgcgtatttgttaggatagttattaagaggatgcggaggttgggggttttttcggggataaaattagggtattttaaggaattttttgcgcgttt

SEQ ID NO: 4981 - DNA, 201 bp, Artificial Sequence
  Description of Artificial Sequence: Synthetic polynucleotide
gttggattgggtgcggttgtatttgtggagtgggtggttcggtgattgttattcgggttagtgttgttagtagatgtgtatattttgggcgggggttggcggtcgagtgttattagtaggggcggcggttaggtagttattcgtcgttttttaagttcggcgttgcgcgtagggtttggagtattcggtgttgagacgcga

SEQ ID NO: 4982 - DNA, 201 bp, Artificial Sequence
  Description of Artificial Sequence: Synthetic polynucleotide
taagttgttttttgttttgggtttttgatatttttatagtttttgaaagggttttcggagattttagagagaggcgggtgtcgaggggttacgagttcgcggttgatattcgcgttgcggaagagaatggtattgattgagggttttggggatttgggttttggcgttttggattttaggattatgtatttttcggggcgc

SEQ ID NO: 4983 - DNA, 201 bp, Artificial Sequence
  Description of Artificial Sequence: Synthetic polynucleotide
cgttcggttcgcgggttttaattttatcgtcgtcggtcgaattttgttcgttcgcggcgcgtatagtcggcgttcgcgtatacgcgcgtataaattttacgtaattcgcggtcgtttcgtttcgtcgtcgtcgtagttcgtttgtcgcgcgtttatagttcggttcgagtcgcggggttcgagcgatagcgacggcgtcgg

SEQ ID NO: 4984 - DNA, 201 bp, Artificial Sequence
  Description of Artificial Sequence: Synthetic polynucleotide
cgttcggcgtagagtcgcggtttttttgtttgcgttcgtagtttgcgtcgttcgatatagtgggggtggaggtagttcgtttagttgggcgttttggtgcggtgtcgcgtttaaagttttatttttgcgtcgagggtttgtgatttgtagagagcgatcgtttgattttaagttggttgtagagcgaggttagtcgggata

SEQ ID NO: 4985 - DNA, 201 bp, Artificial Sequence
  Description of Artificial Sequence: Synthetic polynucleotide
tttcgaggtgagtcgtcgttgcgtttatttgttttcgtagttggattgtggagtcgcgttcggaggagcgttggatacggatatttttaatttttttttcgatttcgttttttggttttttgtatatatattttcgttaggaggggaggggaaggtttagtaattgtttggtttggttttgatttatcggttttttcgtag

SEQ ID NO: 4986 - DNA, 201 bp, Artificial Sequence
  Description of Artificial Sequence: Synthetic polynucleotide
gcgtcgtttacgttattcgttatttcgggtcgcggtttcggttcgggtttagtggttgcgtcgtttttcgttagtaacgttcgcgcggaatgagcgcgtcgcgttgttcgcgtttttattcgtagggttcggcgtttttttttcgttcgtcgtttttatagtcgcgcgtttattggttcggttagtttacggggagtcgcg

SEQ ID NO: 4987 - DNA, 201 bp, Artificial Sequence
  Description of Artificial Sequence: Synthetic polynucleotide
gcggaatttcgcggtcgagagtcggtcggtttagttgggcggggatacggcggtttcgggtttgtgttttagttttagtcgggttttttcgcgtcgttgcggttgttgcgcggtgcggtcgtgataagttatagtaaatttgtttttcgcgtcgttttaagttattaggaagcgtaatcggtgtttttggggatcggcgaa

SEQ ID NO: 4988 - DNA, 344 bp, Artificial Sequence
  Description of Artificial Sequence: Synthetic polynucleotide
ttttgattagatgaacggagtggtcggaggtaagtcgcgtgttttcgtaggttcggatttgcgcggttcggaggtggtggatggggtgtagtgggtgtgcgggaatcgtaggagaggattggggttttaggtggacggtgttgattgtattggttttgaagattggaagtgggtgtaggaggaatttgcgatagttgagattagggcgcgcgggtagatgcgttaggtcgttagtaaatcggcgtgcgtgcgtttcggcgcgtttagtttcgggcgagcgtagggatgggggtggaagaggcgttttttcgggtttcgaggtttgcgtaggttttttggtcggt

SEQ ID NO: 4989 - DNA, 201 bp, Artificial Sequence
  Description of Artificial Sequence: Synthetic polynucleotide
ggcgtttgttcgaggcgggagtcgttgggttatgtttttgtttattaggtttttcgaatttttggtagggtagcgtttgttcgtgttttcgatttttttcgtaggtaattcgcgcgaatttggggttcgtagagagcgagcgttcgcggatatcggttgaatagtttggaggttgcgcgagggggcgtcgcggggagggat

SEQ ID NO: 4990 - DNA, 218 bp, Artificial Sequence
  Description of Artificial Sequence: Synthetic polynucleotide
cgggtgtcgtggtgcggggtggggatagttaatttagcggggacggaggaagttgggggtagttgggtgcgtgttttgtatcgtttatttgtcggggttcggtttttggcggtgggcgagagggagtatattcgtttatattttaggaatttgttggggagatgagttcgtggggttagaaagaagggaaaaattttttgggtaagggagagaataat

SEQ ID NO: 4991 - DNA, 234 bp, Artificial Sequence
  Description of Artificial Sequence: Synthetic polynucleotide
cgttgttgttcgttatcgtcgtcgtcgttcggttatcgtatcgtatatattaattatttatcgttcgtttttagtttttcgggcgaagttaattataggcggaggtttcgttaatggggtcgtcgtcgtcgtcgtcgaggaggtagttagtcgcgcgttcgggcgtaagcgatagttttttagggacggggatgggtcgggggcgcgcggggggcgggggcgtacggggcgcgt

SEQ ID NO: 4992 - DNA, 201 bp, Artificial Sequence
  Description of Artificial Sequence: Synthetic polynucleotide
tgaggcggagagaggtcgtttcgcgtttggggttttcgaaagcggttagttgtttttttgttttttttgagcggggagcgttgcgttttttgcgggttgcgggagatttttttagattttcgggtgggaaaattatattgagcgtttcgggaggttgttagatataatattgtatttggtatttttgttcgggtgttttcg

SEQ ID NO: 4993 - DNA, 201 bp, Artificial Sequence
  Description of Artificial Sequence: Synthetic polynucleotide
agttagggtcgggggcgtacgtcggaatatttgggtcgtcgggtatcgagcgtcggggggttgcgcggcgcgtatttggagagggcgtagttatgcgggcggcggcggcgggggggggcgtgcggacggtcgcgttggcgttgttgttgggggcgttgtattgggcgtcggcgcgttgcgaggagtacgattattatggtt

SEQ ID NO: 4994 - DNA, 235 bp, Artificial Sequence
  Description of Artificial Sequence: Synthetic polynucleotide
gtaggggtgttttgttcgtacgtatttacgatagtgagtagtatgttgtttagtagtagcgttaggaatacgatgaataggatgagttttcgcgagcggcggtttttttgtagttagcggattagcgttagttcgtttagggttatggtttcggggtttcgttgcgggcgcggtgcgcggtgaggatttaaggcggtcgtggattttttattttttcgttttttaggtcgcggaa

SEQ ID NO: 4995 - DNA, 201 bp, Artificial Sequence
  Description of Artificial Sequence: Synthetic polynucleotide
ttttttaatagggcgcgttggttcgcgagtcggaggaattttcgtttaggttttgttaagcgtttattcggagtaggtcgggggtagtgaaggatgcggcgggagcggcgcgttgtagtttcgcgacgtggtacgtattttggaagcgatgatttagatatcggtagcggtggatgagttaggggtagaaggtggacggat

SEQ ID NO: 4996 - DNA, 241 bp, Artificial Sequence
  Description of Artificial Sequence: Synthetic polynucleotide
agttttcggttcgaggttgcgttaattcggcgtcggatgttaatgatgaaattaaaatgttatttaagttaaatgcggggagtatacggcgattgggcgcgtataatggtaaatgggattaggtaggcgaaggtttagtcgagtttcggtttcgtagtcgttttcgttatcgtttttttttcgttttttttcggattttggcgttttggtttcgggttataagagttcgttcgttattggt

SEQ ID NO: 4997 - DNA, 201 bp, Artificial Sequence
  Description of Artificial Sequence: Synthetic polynucleotide
gacgatttgggtgatttgggtggaaggtggtgtagtaggtaggtagtggggaggggcggggaggaaatttagggggagggggcgtcgaggttggtgaggcgtttttttcgcgttagggatatgtaggtatcggatggttgcgtaggggtttttgttcgtttggttttgggtgcgttcgtttagtttcggtgtaaatgtttt

SEQ ID NO: 4998 - DNA, 201 bp, Artificial Sequence
  Description of Artificial Sequence: Synthetic polynucleotide
tcgtttcgatttattaggcgcgtagggttcgttttcgaaattcgcgcgggttttcgtagtcggtcgcgcggtttttagtcgcgaagagagcgtcgcgtacggtggcgtcgttatagtcgtgggtcgtcgcgtttaggtagcgttttagttgttcgtaaagtttttgtagcgtcgtttcgtcggggtttacgcgcgtcggtt

SEQ ID NO: 4999 - DNA, 217 bp, Artificial Sequence
  Description of Artificial Sequence: Synthetic polynucleotide
ttaaggttggtttgtgttagaacggcgcgcgcgcgcgtacgtacgtatatatacggggggaaatttttttaaaaatgaaaggttagaagagtttagcggcggcgcgggcgttgcgcgagggtttcggagttgattcgtcgaggtaggaaattttttcggtcgcgacgttcggtttcggttcggcgttcgcgtgggatggtgtagcgttcgtcgtcgg

SEQ ID NO: 5000 - DNA, 201 bp, Artificial Sequence
  Description of Artificial Sequence: Synthetic polynucleotide
ttatattgcgtaagagatcgtaatgaagttcgtagatttttaggttggagtcgtagagcgaggtggcgaggtggagaacgcggggttgggtttggatagcggttttggggtcgtttggagttttcgtttttttaattcggaaggtagcggattgatatttgcgtcgaagtcgcgcgtattttacggagggtcgggattttg

SEQ ID NO: 5001 - DNA, 201 bp, Artificial Sequence
  Description of Artificial Sequence: Synthetic polynucleotide
gaggggtggttttgttttatttagggggtgtcgtgggtaaaggttttggggttatttgtttggtgttttggagggcgtagggtaggagtcgtcgaggttcgcgggttattgtggggcgcggaattttagattaggtattcgcggtttaattttcgggttaggggattcgcgggggttttacgaatttgtttggtttatttg

SEQ ID NO: 5002 - DNA, 201 bp, Artificial Sequence
  Description of Artificial Sequence: Synthetic polynucleotide
attcggggtcggaggtaggcgcgtaattatggggatcggggcgggcgatggcggcgggcgggtttttgtcgtagggtggggatggtttttttagtcgggcggtcgtcgttatattgtagagcgtatttaaagagatatttcgtttcgcgttcgttttttagtattagattttcgttcgaaaacgtcgtcgggcggattgta

SEQ ID NO: 5003 - DNA, 317 bp, Artificial Sequence
  Description of Artificial Sequence: Synthetic polynucleotide
tatcgttcgggttttcgtttggttatagtattaggttatagtgcgttggtttttgattatttttttggttcggtggtcgtttttcgtttttttttagttcgcgtcgttgttttgttttaggtttcggtgcggttttaagttttagtttagggtttttaggtttttttaggcggcggtggcggtatttatttgggtcgcggagtcggggtttggtacggtttcgtaggtggtaaatgaaattttggtagttgtcgtgttttagggttttacgggtatagagttcggttagtagttgtagcgtttggtgatagagcgcg

SEQ ID NO: 5004 - DNA, 221 bp, Artificial Sequence
  Description of Artificial Sequence: Synthetic polynucleotide
atttatagcgacgggtaattacgcgggaggagtaggttaattttcgatagtggaggtgaagatgcgtgcgtttcgcgtattttgtttttcgcgcgacgtcgttcgcgtcgttcgcggttcggtcgggagcggtagttcgtgtttcggtttcggtttcggtttcggttggcgtttgtatttgcgattatcgtgagtagttatggcgtattttatagtgtaga

SEQ ID NO: 5005 - DNA, 201 bp, Artificial Sequence
  Description of Artificial Sequence: Synthetic polynucleotide
gtgggcggttattatttttttagagtatttggtatatcgggttggggttcgtattcgtagggtattgcggggcggcgttcggtgattgggtggggtcgtcgttgttttttttttcgttgggggcggtagttttttgtttgcgcggaggcgatttagaaggtacgttcgttagtaggagggcgggcgtcgtagggttttcgg

SEQ ID NO: 5006 - DNA, 201 bp, Artificial Sequence
  Description of Artificial Sequence: Synthetic polynucleotide
gttttttcgaaacggagatttgttatttttttagagggcggggaagtttatattattttttgttttatagtgttcgtttcgtttcgtttgttggtttttcgtttattcgagatattttaggtacggttcgtattggagagggtcgcgttgttgttgcgatcgtacggcgttcggggtaggaatatgttcgtttttttttgc

SEQ ID NO: 5007 - DNA, 201 bp, Artificial Sequence
  Description of Artificial Sequence: Synthetic polynucleotide
atcgaagttaggtggaagtaaatgagtttggattttgaggcgcgtttggtttggagtcgttaaatttgttagcgggcggcgggggaggtggttcggtagcgtcgggtgttgcgttcgtatatgcgttcgggaaggtagtttcggtcgtttcgtttttagttcgttttttatcgttggcgcggcggcggcggcgtggggttc

SEQ ID NO: 5008 - DNA, 201 bp, Artificial Sequence
  Description of Artificial Sequence: Synthetic polynucleotide
tgcgttttttttttgttatttcgatgttgggagtggcgttttggttttggcgttttttgggtaagtattagtcggcggtatttgcggaggtggttggtacgttgttattttttgaaatgagtgaggagggaggtttagatttaggcggttttacgcgttcgttttggtattagtagattgggaattgtcgtggttatgttc

SEQ ID NO: 5009 - DNA, 230 bp, Artificial Sequence
  Description of Artificial Sequence: Synthetic polynucleotide
tttttcggttgtagaacgtttttcgttgtcggagaaggggtttagtaaaattgatttttttttatttgtttttatttataattgatggggagatgagaacgtaatatattttagtatcgagtttttgtcgtttggcggagattttgtttaagacgttttcgtaaagtatttttagtcggggaataaagtacggaaagttgttgggtagagcggtcgggaggagatatcgg

SEQ ID NO: 5010 - DNA, 201 bp, Artificial Sequence
  Description of Artificial Sequence: Synthetic polynucleotide
gatagtggtagaggcgatcgtttttttttttattatttatattttagttttagatttttttttttttttttcggtgatattaagttttagatcggcggtcgtatttggttttatagtgtaaaatgtgtttggcgaggaagtcgaggcggcgttgtagtagttgagcgtgggggtttgtaagggcggttagttcggggaagc

SEQ ID NO: 5011 - DNA, 201 bp, Artificial Sequence
  Description of Artificial Sequence: Synthetic polynucleotide
cgaaggttatcggttgcgttttgaagcgagattggcgcggtcgtcgtagtcggtttcggtttttgggtagtttggcgggtcgtacgggttgcgggaattcgtcggttaggtatacgaagtgcggtattatcgtttggtaattggagtagatgtttattagttcgtcgggtttggcggttatggcgttttcggcgtttgcgg

SEQ ID NO: 5012 - DNA, 201 bp, Artificial Sequence
  Description of Artificial Sequence: Synthetic polynucleotide
tgttgttgttgttgttgttggcgttggcggcgcgcgcggacggtttggagttcggcggcggtttcgggtagtgggttcgttacgcgcgttgggcgggcgcggcgagtagcggcgagtttagttttagtttgcgtattaacgttacgcgcgcgttgttgttttatttggacgacggcggcgattgcgattttttggagttgt

SEQ ID NO: 5013 - DNA, 201 bp, Artificial Sequence
  Description of Artificial Sequence: Synthetic polynucleotide
agtttcgagtcgttagtttttaggtttgggggtcgtcgttttcggagttgttggcgtttattcgtttcgcgttggagatgtttaatcgcggtcgggttgcggggacgcgggtcgtgttgggttttgtgcgcggtcgcgttcgtcgggtgaggacgcgtcgggggcgggggcgttaggttcgggtttaagggataggagttt

SEQ ID NO: 5014 - DNA, 201 bp, Artificial Sequence
  Description of Artificial Sequence: Synthetic polynucleotide
ttttgacgcggggttggggacgtagatatttttggtttcggtagtttagcgtaatttttgaggtcgggcgtcgtttttcgtttttagaaattcgggtttcgagcgtcgaattttagcgttttcgttcgtgggtatagggcgcgcggtgtagttatagggggttcgagatacgcgtttcggtttggtttaggttggggaatc

SEQ ID NO: 5015 - DNA, 201 bp, Artificial Sequence
  Description of Artificial Sequence: Synthetic polynucleotide
cggcgattatttgttgggtattaagcggttgcggcggttttattgtaacgtgggtatcggtttttatttttaggcgtttttcgacggtcgtatcggcggcgcgtacgcggatattcgcgatagtgagtggcgcggttaggcgcgaaggggcgggggcggggggtaacggtcgtcgggttaattcgtttagttatattttga

SEQ ID NO: 5016 - DNA, 201 bp, Artificial Sequence
  Description of Artificial Sequence: Synthetic polynucleotide
gttgtattaagttataattttatttatatggtgtgagaattttttgggttttttttttttagtaagatttggtattttttgatatttattagtttaatgcgtgggaaatggtgtttttttttaatttgtattttttttgatttatagaaagttgtttttagtttcggtttatcgattatttagttttttattttttgaatg

SEQ ID NO: 5017 - DNA, 201 bp, Artificial Sequence
  Description of Artificial Sequence: Synthetic polynucleotide
gttttttcggtattcgtagtttcgatagtttagttttttttatttgaaagttttatttgaggttttttttaattttgtttttttgtatttttggcgtcgcggggagttaggggttaaatttcgtggttcgcgtggtttttttttttttcgtagttttttcgtttttattcggcgtcgcgtttggagcgttcgtttcggaga

SEQ ID NO: 5018 - DNA, 201 bp, Artificial Sequence
  Description of Artificial Sequence: Synthetic polynucleotide
tttcgggggtgtcgagtcggcggggggtgaggtggttgcgtcggcggtcgggttaggaggtgcgggtattgggggcgcgggaggggacgtggtaggtttcgcgggggttacggcgattttaggggttaggaaggtttcgttgcgggtacgtaatttgttttcgtttttttttacggagtcgtttcgggtaggcggcggcgg

SEQ ID NO: 5019 - DNA, 268 bp, Artificial Sequence
  Description of Artificial Sequence: Synthetic polynucleotide
agttggcgttggataagtcgggtaagtcgaagcggaaggtgaattatcgtaagtatttgtagaagtagattaagcgttgtagcggttttatgggcgtcgcgtttttcggttcgtttttttcgagcgtcgtcgatacgttagttaaacggtcgttggtcgtttttagcgtttcgatagtcgcggtttcggtttacggtaaggttgtttttcggcgggaggcgtcgtaggtcgtcgcggtcgttagtttgtaaagtcgaagtttggtcgc

SEQ ID NO: 5020 - DNA, 614 bp, Artificial Sequence
  Description of Artificial Sequence: Synthetic polynucleotide
atcggtcggggttgttgtcgtcgggggtttgggttttttagttagttgtggattaaacggtttttttttatttaaattaattgcgttacgcgtaggcggcgtacgggttgggtttgggaatggggatcgcgaggttttagtatttcgatgttttgaaagttttttcgtttcggggatttgtttttgtgttgtagttggtaggggtcgtttgaagtgggagtagcgtttggagaaggcgggaggagttcggttcgggggacgggcggcgggatagcgggatttcggcggcgcggtgcgttttagggcgtagcggcggtcgtagatcgagtttcgggcgcggtaagaggcggcgggagtcggtggcggttcggtattatgcgtcgagggcgtttgttggagatcgttttgggatttatcgtgtttttagcgttttatacgagttatggggcggacgttaatttggaggttgggaacgtgaaggaaattagagttagtcgggttaagagaagaggcggtggaggatacgacgcgtttaaagggtaaaggaatcggtttttttttttggtgtgggttttttaagttttaagatttagaataacgggtaggatgatttt

SEQ ID NO: 5021 - DNA, 201 bp, Artificial Sequence
  Description of Artificial Sequence: Synthetic polynucleotide
agatgtattttagtttagcgatttttattggcggaattttcgcgtttatcgcgcgtcgcgttaagatggtttaggttatttttattgttttttcgttagcgttttttagttttttatatttgttttgtatatatattggtttgtagaggggattcgtttcgaatcgttcgggagtggggtttgagttcggagttggtgttt

SEQ ID NO: 5022 - DNA, 201 bp, Artificial Sequence
  Description of Artificial Sequence: Synthetic polynucleotide
gttttgttttttttataagaggttaagtcgatattacgcgagtgtgtacgcgttggggattgagttttcgaagcgaagttttgtcggaggagttttaggcgggagtgggaacggttgggcgtggggttagtaacggcgttattcggtagggtggggggagttaggtttgttagagttagagcgcgttatcgtcgtcgcgag

SEQ ID NO: 5023 - DNA, 201 bp, Artificial Sequence
  Description of Artificial Sequence: Synthetic polynucleotide
gtattgcggagtagcgaggtagcgcgtaagtaagttagggtaggggtcgggggtaggggcgggggttggagttatggttaggggtggttgtttaggtcgcgtgagttgttttttttattcgtatttggtcgttaggttattcggttattagaagtttttatttatattttgttttttatttggatcgtcggttggttgtaa

SEQ ID NO: 5024 - DNA, 201 bp, Artificial Sequence
  Description of Artificial Sequence: Synthetic polynucleotide
ggggatcggtcgtagggcggggttttttttggcggtgagtgagcgagatcgttaggttgaagtatcgggagattgttttggtagtttttggtcgttattcgcgtcgtaataaaagtttttcgcggtttttcgtttagttagtttcgtattgattggtcgtcgtgggagggattcgagttggttggaggcggcggtcgagcg

SEQ ID NO: 5025 - DNA, 201 bp, Artificial Sequence
  Description of Artificial Sequence: Synthetic polynucleotide
aagtttcggcgcgcggcgttcgttgggcggtgcgttttttttcggttttttatttatcgtagtcgagtcgggtattgtggggtgggtgtgcgtgtttgtcggggggtgtgtgtttgtgtcggggaggggtgttgttggggaattgttgtttttcgtattacggcggtagcgatagtatcgttcggtagttcgtagtattcg

SEQ ID NO: 5026 - DNA, 261 bp, Artificial Sequence
  Description of Artificial Sequence: Synthetic polynucleotide
gcgttcggtttaagtacggtgcgagcgtttcggggaggcggcgagcgagtcggtgcggagcgtttcgtgcgttcgggtggtttcgcgggtcggcgggatcgtgcgtattttaagcgcgtgcgggagtgtgcgaggcgttgtgcgagttagcggcgggcgcgttagggtgggaaaggtatttcgaacgtattaggtgtagagatcggtatttatcgagagcggtcgggagcgtacggcgagtttcggtgttatcgtcggttt

SEQ ID NO: 5027 - DNA, 201 bp, Artificial Sequence
  Description of Artificial Sequence: Synthetic polynucleotide
gtttgggttttaggttatcgtagaggacgtgttttcgggcgcgtagatggcgggagatgaggcggtcgaatttcgcgtttttgcgtggtggagtatatacgttttaataagtttagcgttatttgtttagttttttaatttttttttttttcgtttcggggcggtttttttttttttttgttttggttgttgttttggtcg

SEQ ID NO: 5028 - DNA, 201 bp, Artificial Sequence
  Description of Artificial Sequence: Synthetic polynucleotide
ggtttacgtattgttcgtcggtttacgcgggagtttcgaggggcgaggcggaggttgggcgtagtttttgtagttagtagttattttcgcgcgtttcgtcgcggtttagttaattatttgttgcggcggcggtcgtgttttttagggtgtattagtattttcgtcgcgggcgttgttttcgcggcgtcggtatcgatgttc

SEQ ID NO: 5029 - DNA, 201 bp, Artificial Sequence
  Description of Artificial Sequence: Synthetic polynucleotide
taggtagtttcgcgtggcggcggtcgggatagttgggcgcgttggtaggagagtaggtatagcgttttttataggtaggatgacgcgggtttcgtagttcgtttttttacgttgtttcgtattattgtttcggttttgacgtgcgtgcgatagatttatcgtaaatagtttttagcgggagtacgaggtcgggataggagg

SEQ ID NO: 5030 - DNA, 201 bp, Artificial Sequence
  Description of Artificial Sequence: Synthetic polynucleotide
atatagttttaagggattgagcggttcggacgggatttgaaatttttggaggattagttacgttcgtatagttcgtttatgcgcgttggtattaggattcgtaggttgttagcggcgagttttcgtcgcggttttttagggtattttcggagaagggggcggttttgaggaattttttgtatttcggatgttttatttttt

SEQ ID NO: 5031 - DNA, 219 bp, Artificial Sequence
  Description of Artificial Sequence: Synthetic polynucleotide
gtcgtcgttttttcgggagtcggagtcgtcgtttttttagtgggtgtagtcggggtttcgacgggggtcgggcggttatcggggttggagttgcggttacggaggtttttgcgtttgcgtcgcgtcgagggtagggatagggattggggtgaggggttgtttcggaacgtttatagttggcgttggtttttttttgtttgatagttttttggttcgggg

SEQ ID NO: 5032 - DNA, 268 bp, Artificial Sequence
  Description of Artificial Sequence: Synthetic polynucleotide
ttagtcgtcggcgaggttattcgggaggggcgggagtcgtttgttagttattcggtagtttttttggggtttttttcgcgcgttcgtttgtttttttttcgttgcgttttttcgtttgttggcgtttttgttttagcgggattcggtagttaggggttttagggggcggtgtagtaaatttttagcggtttgcgtttagtagattaggttggggagtcggtttggcgttgtagggaggtagagagcgggaggaagaggtagtggtagg

SEQ ID NO: 5033 - DNA, 201 bp, Artificial Sequence
  Description of Artificial Sequence: Synthetic polynucleotide
ggttgttttcgggcgtattttgcggttcgggtatttgtagggcgggtagcggtcggttttttattatgttggtcgtcggtatgggggtcgtcgtttttgcgttttttttgagtttttcgttagcggtttggttcgcgtttttttttggttgttttttattttcggtttcgcggtatattttttaattttggggtcgaagga

SEQ ID NO: 5034 - DNA, 517 bp, Artificial Sequence
  Description of Artificial Sequence: Synthetic polynucleotide
tagcgtttattgtcggggaagattcggacgaaaatcgaggtaaattaattattaaaaagtgtatttaataagaatttttttatttaggtttttcgttgtcgagacgcggtagatttttagagcggtttatttatttatcgaagcggattttgggcggtttcgggttgattcgcgttgttagggcgcggattttatttcgggcgtattgttaggagaaggggtttttcggggcggcgcgtttcgattttgggttttcggtgttcgtagagggcggagattcgcggcgttttaggttatttattcgtattttttcgagttaaatttttagcgtttattcggattcgacggtttaagtattgatttttaggtaagagtcgttttttttggtttttagggaattgatattatcgcgggacgttttttttaggatagttagtaggttttaggagcgtagtacgtaatagcgtagagtagatttagatttttttcggggtgagattcggaggttcgcgttttg

SEQ ID NO: 5035 - DNA, 226 bp, Artificial Sequence
  Description of Artificial Sequence: Synthetic polynucleotide
cgtcggggggttttgtttttcgggaggagaaggaatcggtcgttttcgtttttttttttttttaggcgttttcgggagggggtcgttgggcggcggaatcgcgttttcgttcggggagttattacgcggttttttcgcggaattttgacgttatttatacgtgggggaaggggttgggagagtaagaggaagcggcgggggagggggtcgcggttgggagagcgcg

SEQ ID NO: 5036 - DNA, 201 bp, Artificial Sequence
  Description of Artificial Sequence: Synthetic polynucleotide
atttcggaggtagagatgagagcgttttaaaattttttttttttattttaattttcgaggagtaggtgggtgtatagtgtcggcggcggcggggacgcgcggcgcggagtttggttttgggaggtagtggtcgttttagtagtcgaatttttcgcggttttagttttcgcgtttagtagttcgcggttcgtttttcggaaa

SEQ ID NO: 5037 - DNA, 212 bp, Artificial Sequence
  Description of Artificial Sequence: Synthetic polynucleotide
tgcgtagtggggcggaggaggtggcgatggtcgggggaggcggggggattgttgtttatttgtagttgggttaatttcgcggcgtaggcggcggcggagcgcggggagttcgcggcgggtttagttgtcgtagtattatgttcgagttttttttcgggtagacgtcgcgcgtcgtcggggtttcggtaggggaggatgttagacgttcggga

SEQ ID NO: 5038 - DNA, 388 bp, Artificial Sequence
  Description of Artificial Sequence: Synthetic polynucleotide
ggtagtcgtagttttttcgcgcgttttttttttttttacgtttttcgttttcgttatggggttaacgtggggtttttaagagttgtcggtttttagcggcgtaatttttagttaaagttatcgcgggcggattatggtttagggcgttagaggggttagaggtacgggaagaggaaaagacggttaattgggaaaaaaagagaaaacgaaagaaaagttaaacgatgagtttttataaggaggacggagtgaatagtttgtgttagaaggttttgtatatcgttatcgagttgtgtttcgtcggttaggtggagtgggagaagtgttcgggtattttttttcgggataggggtagttagggcggaagtagtataggtaatcgggaggg

SEQ ID NO: 5039 - DNA, 201 bp, Artificial Sequence
  Description of Artificial Sequence: Synthetic polynucleotide
tttttttttttttgttttttaagatacgcgttcgaaatcgaggggtgagagtaaagatcgtttattaatttagtattttggatttagagtttttaatttcgaaaggaggttggtattgttcgggttatcgagagagggagggagaagagttgaggttgtaacggtttttgggttttttagatcgggtttggtatttaggag

SEQ ID NO: 5040 - DNA, 201 bp, Artificial Sequence
  Description of Artificial Sequence: Synthetic polynucleotide
ttattttttttggaagtttattagttgtttaagtgataattaatatcggagagttagggttcgtttaataggagtacgcggagatattttagacgatagcgcgttttttttatttttatttcgtttttcgggcgttttaggttagcgtttattagattttacgtttgggggattgtttgggttttagcgagagtgttacgg

SEQ ID NO: 5041 - DNA, 212 bp, Artificial Sequence
  Description of Artificial Sequence: Synthetic polynucleotide
aggtgtagagatagtggagatgaggttttgatgttcggttttggttttacgcgggtagcgttagttggtcggtgttacggagttttcgcgtttttcgttcgtttagttttcgcggatttatttattggggttgtttcgtagcgcgatttttttttatttcgggggagggttaagggcggcggtggggggcggggtgggggggaagcggcggg

SEQ ID NO: 5042 - DNA, 250 bp, Artificial Sequence
  Description of Artificial Sequence: Synthetic polynucleotide
tttttcgtgtttttcgtagggtaggttatagttttttagattttcgtttaggtggtaaagaagatggagttgggggtcgcgtttcggcggcgcggggttcgaaggcgaggtcgtttagttcgtattttattttacgtacggtatacgtcgtcgcggtttttgttacgtatattttcgcgttgtttcgtttacgtgggcgtcggggaggaggttcgagagatgggaagaaaggttggtatttatttttttg

SEQ ID NO: 5043 - DNA, 488 bp, Artificial Sequence
  Description of Artificial Sequence: Synthetic polynucleotide
ttgtaaatattggaggaaagttgcgttgttttaattaaatacgtttttttaaaatacggagatgcggggagtgggggttcgggaaagaaatttttaaagcggtagtgtttttttaagaaggggtaaaaaaatttgtttatggttatttttttttcgttttattttttttttttttgatagtttcggttttggttgttcgagtcgggggtgtgttttcggttttttttagatttgggcggggggcgggaggagtgagcgatttgggaagtttcgggggtggagagggggcgtttcggggtttgggggcgacgtggatattttttttggagtacggcggtgcgtttgggatttgaaggaagggtcgaaggaagcggggtgcgggcgggcgagttgttcgttaagttgtttggcgggcgcggcgaggggagatgcgtaagtttgtagatcgggggttcggagttcggcgtttaggttggcggggggcgtgt

SEQ ID NO: 5044 - DNA, 201 bp, Artificial Sequence
  Description of Artificial Sequence: Synthetic polynucleotide
gtagagttgtagtttttgcggttttttttttttcgttgtttagtcgagttttgggtttttagtttaagtttttcgtatcgtcgttgttgttgtcgttatcgtcgtcgtcgtcgcgcgttgttagagtcgttttttcgtttttttttttttttttcggtcgggtttttttttttttttgtttttttttttttttttttagtt

SEQ ID NO: 5045 - DNA, 364 bp, Artificial Sequence
  Description of Artificial Sequence: Synthetic polynucleotide
attgcgtatgtgggtttggggtttgcgcgtatcggaggttgtaggcgttggggagggtgtggggggttgtgcgtggggttgtttttatcggaagttgtacgttttgggaagcgtagaggcgggggtgttgttcgcgttggggagtacgtgaggggatatttagggattgttcgcgcgaatggtttttaacgtatgcgttttattttatattttatagtcgttatgacgatcgggaggttcgtaacggttgcggggataagttcgttgaggttgttaggcgagttaggtttttttggatttcgtttgattcggttgggttgtgtttgaaattgatttagttttattatattttttgattatgaga

SEQ ID NO: 5046 - DNA, 220 bp, Artificial Sequence
  Description of Artificial Sequence: Synthetic polynucleotide
gtgtaattttttggttaaaatgttatagttaagattaaattcgaagaaaagaatgaaattacgggaagttttttagatagtcgtcgtaaggttatgggtcgaagtggtgtaggggcggcgttcggggaagcgattggtagagttgtgcgtattgggggtgttgtaggcgttggggagagtgtggagaggttgcgtggagttgcgcgttcggggtgggggt

SEQ ID NO: 5047 - DNA, 201 bp, Artificial Sequence
  Description of Artificial Sequence: Synthetic polynucleotide
gcggttgagttcgcggagttgggtgagtgtttgcggttgatcggttcgtgggagtagggagcgtatagtcggttggtgttggagggttacggggatttacggggtatcgcgggagtcgtcgagcgtagggaagttagtaggtatttgtagtgcggagtttgtaaggttgaggtaggagatcgttcgaggcggggagggcgg

SEQ ID NO: 5048 - DNA, 201 bp, Artificial Sequence
  Description of Artificial Sequence: Synthetic polynucleotide
tttgagggttcgggtagttattcgtattttttcgttacgcggagaaagtcgagtatataggtcgtagggtgggggttcgcggggagagggtggaagtagcgggtttttcgcgtttggggtggtcgttgttttatttaggttttcgtttgttttttatttttttagattaatcgttttttgtaggtgttaacgcggtgtttc

SEQ ID NO: 5049 - DNA, 201 bp, Artificial Sequence
  Description of Artificial Sequence: Synthetic polynucleotide
gttttagtttttatttgtttaggtgttttcggcgttttggcgaattcggttattttagttttttacgtggtgagtatttagggtagcgggtcgatttttcgaggttttatatttgggtttgaggggcgcggttcgtagcggcgggtgtaggggcgattgttagtttttatttcgtttcggggtgcgttcggaggtcgatat

SEQ ID NO: 5050 - DNA, 358 bp, Artificial Sequence
  Description of Artificial Sequence: Synthetic polynucleotide
atttagggttattgtagtttcggggtatttcggaggttacgattcgcgagtagatgtttcggaagaggttttttatgtaggttgttaggtagatggcggcgtgttcgtggatgcgtagcgttacgcggttgtttattatttagcgatatacgcggtttacggagaaggtgaggtcgtagcgggtcgatttgtcgcggtttaggcggtcgtcgtcggcgttgtttatgttgtagagggatagtgcggttagcgtagtcgtcgtatagtgcgcggttaggttttaggatagtacgatttttatggcgttttggatttcgtatttggtgtatttggcgaagcgtaggtttaggcgttgcgt

SEQ ID NO: 5051 - DNA, 201 bp, Artificial Sequence
  Description of Artificial Sequence: Synthetic polynucleotide
agcgtttttttatggtcgcggtagttaatcgatgattgaatcgaataaagagtagcggcgagattaatttttaatatttatcgatgggtagcgggcggtcgagtttcggcgagtttcggtagtcgtcgttcgtcgttttagggcgttcgtttgttcgttcggggatttttttaatgcgtttagggcgcgttcgggggtttt

SEQ ID NO: 5052 - DNA, 328 bp, Artificial Sequence
  Description of Artificial Sequence: Synthetic polynucleotide
ttttttagtttcgttggtttgggagtcgggagtttcggaggagtttttcgttaagtttttttggttacgagcgcgtttggttttggtttgggagtagatcgtgcgttcgagtggggtatttgttcgaggtcggggattgtgaatcgaaagattttatttagttttgttgtttttttggtattgcgatttgggggcgggttattttatttttttgaatttcgtttttcgttttgtttatggaaggttgtaagtttttttggggttcgggatttttttttatttttatttttcgagtagagaaataggcgatgttttttttttttttgcg

SEQ ID NO: 5053 - DNA, 201 bp, Artificial Sequence
  Description of Artificial Sequence: Synthetic polynucleotide
gaggtgtgtgttggaggtgggtagtcgtcgcggaggttttagcggtaggtgcgttttagtaggtagtagtagtcgttattttgggtaagtagtaaatttcgtataaatttcggagttattatgtttgttttttcgttttatcgtcggtttttttgttaggagtagtagaggatgtggtgaatgtatcggttttatcgaacg

SEQ ID NO: 5054 - DNA, 319 bp, Artificial Sequence
  Description of Artificial Sequence: Synthetic polynucleotide
gggcgtatatatacgtttatttagatatttcgcgcgttttttcgcgtttttgtttgttcgttcgtcgtcgtttgtttttttttttttgttttcgtcggtcgttttttttttttttttttttttttttttttttttttttttttttttttttttttggtattatagagttgttttgaaaatagaagatagagggagtttcggagttcgttatttttagcgatttttatattgggaaaaaatatggagttagtttcggtagttttcgatttcgtcgttagcgagttaggtagtagcggcgcggacgcggtcgtcggtttta

SEQ ID NO: 5055 - DNA, 201 bp, Artificial Sequence
  Description of Artificial Sequence: Synthetic polynucleotide
ttaagtttaattttacgtttttttcggtgttcgattttgcggtcgaatcgtaattgcgagtcgtaggtaatggcggagtttttggtattgttagttgttcgcggttgggggttcgaggttgggagggtttcgttttcggaatatcgtttcggtttggtttttaattttgcgaggagtttttttgcgtttttttttcgcggt

SEQ ID NO: 5056 - DNA, 370 bp, Artificial Sequence
  Description of Artificial Sequence: Synthetic polynucleotide
ttggattttcggggtgcgggtttttttttttgttttgttttttagtatttttggtaattgcgtaaagttgtttgggttgtaatggtggggtgtagggggcgttcggttgttgtatttgttagtgttgggtttaggttgagaggcgatttttagtttttataataatgtttcgggttttttggtttgggttttcgtagcgttcgattgatcgttagcgatacgacgagaacgaggatttgtcggacgtggaggagatcgttagcgttcgcggttttagtttggaggagaagtttcgtagttagttgtattagggggatttcgtgtacgttatggagggtaaaggtgaggcgtttttatttcgggtcgtttt

SEQ ID NO: 5057 - DNA, 201 bp, Artificial Sequence
  Description of Artificial Sequence: Synthetic polynucleotide
ttttttcgttttaggcgtcgttaagttttagtattatgcgtttttttagatgttcgaaagcgtttttttagggtagtttatgtttttttgtgtttttttcgcgacgggtcgggtttattattttatatttttcgggtttttttatgtttattatcgtgtgtttttttagtatttttttttttttttaagttttaatatagt

SEQ ID NO: 5058 - DNA, 201 bp, Artificial Sequence
  Description of Artificial Sequence: Synthetic polynucleotide
gttgggcgtaggggtcgtcgttcgaggattatgggtgggttagcgtttcgtcgggttgttagttggcggggatcgtcggcgtttgtgtcgggtcgcgttcgaggttgcgtcgttcgtgtcgtagcggttaatgcggtagtattcgcgaacgttatcgcggcgggtttcgttggttcgggttgcggcgtgggggcgggggat

SEQ ID NO: 5059 - DNA, 201 bp, Artificial Sequence
  Description of Artificial Sequence: Synthetic polynucleotide
gtgtagcgacgtttagttttcgtgcggttagcgcgtcgcgtcggcggattttgtagtttagagagtttagggagtttagggaggggagcggggcgcgggcggggtagtgtcgtataatcgtaggcgcgtttcgcgtcgttttcgtttcgggtttattttttttcgtcgcgttttttttagtttatttacggacgagcggat

SEQ ID NO: 5060 - DNA, 263 bp, Artificial Sequence
  Description of Artificial Sequence: Synthetic polynucleotide
gcgcggtttcgcggggattttgcgggcgggcgggcggtcgggcgcgcgcggggcgggggcggcgcgcgcgcggggagcgtgtgggtcgggcgggcgcggcggggaaagttgggcgcgcgagtcgaggttgttgtttatttgtagtcgcgtcgtttatttgtcgcggagtgcgcgtttcgcgttttttcggttcgtttcggagttcggtcgttttttttttgttatagcgggtaattgcgtcgatatgcgatacgagtagttta

SEQ ID NO: 5061 - DNA, 201 bp, Artificial Sequence
  Description of Artificial Sequence: Synthetic polynucleotide
ggcgggagaggagtttcggtcgcgtggattttagtttgcgcggtaattatcgcgttttgattttaggttcggttgtttagggaaggatagtttagggcgcgtttagcgagttttagggggtacggaagtggttagggtagattttagggtgaataattaatattttatttattaattcgttaaaaataaagaaaataaaat

SEQ ID NO: 5062 - DNA, 201 bp, Artificial Sequence
  Description of Artificial Sequence: Synthetic polynucleotide
tgtcggggtcgcgttttcgggttcgcgtcgttagtatttttttacgcgcgttcggtttcgggttattcgttttcgtcggttttcgttttttttcgtagtcgtagggaagcgagtttgggaggaagaagagggtaggtggggaggcggatgaggggtgggggattttttgacgttattagaaggaggtgtcggggtaggaag

SEQ ID NO: 5063 - DNA, 201 bp, Artificial Sequence
  Description of Artificial Sequence: Synthetic polynucleotide
aggggttaggagcggcgggatagcgcgggaagagtaggtaaggggagatagtcggattgcgttttagtttttcgtgttaagaatatcgtcgcggaggcgcggttagttttttttggatcggatttttcgtttttagggttaggcggcggagttttagttttgttttttttttagtttcgggcggtttttagagttgagtaa

SEQ ID NO: 5064 - DNA, 201 bp, Artificial Sequence
  Description of Artificial Sequence: Synthetic polynucleotide
cgggcgtcggcgtgaattcgcgtttttcggagtttagcgtcgtgtttttaggtttcggttttgattttagggcgtttaggtggaatggtttcgtagttgcgcgttgttttcgcgttttcgttttgtttcgcggaaatcgttttcgatagttaattcgatcgggcgcgcggcgttttcggtcggttttcgttcgatttcgcg

SEQ ID NO: 5065 - DNA, 215 bp, Artificial Sequence
  Description of Artificial Sequence: Synthetic polynucleotide
gattttttcgcgtatacgtatatgtatacgttgcgcgtttttacgcgtatatatacgttttttttgtcgcgttcgtcgtcgcggttattatcgcggagtcgagttttgcggagcgggaatcgaggtcggagcggggatcggaggtagtcgagtcgggggatgtcggttcggagcggagtcgcgcgcggacggcgcgttcgggacggtgagtgtgg

SEQ ID NO: 5066 - DNA, 201 bp, Artificial Sequence
  Description of Artificial Sequence: Synthetic polynucleotide
tcgcgtaatttttgaagtggtcggttagggcgcggttggtttagtcgtcgtaggcgttttgtaggcgttggggtaggttttagtggtatagggtgattacgggttgtacgtttagttttcgtagtcgttttagtaggcgtcggtagtagcgtagtttttcgcggttggggacgttcgcgttgttattggggagtattcgcg

SEQ ID NO: 5067 - DNA, 201 bp, Artificial Sequence
  Description of Artificial Sequence: Synthetic polynucleotide
ggacgggagttgcggggagggcggtcgggggatttcgtagagttcgtttcgttcgtagtcgcggggcgtcgagggtagggcgggcgtttagtttggtttcgtcgtttcgttcgtagtttttcgaaaggcggtcgttttgttttggttagtttggttcgattcgggggcgttgcgtgcgggcggtttcggggttgttggtat

SEQ ID NO: 5068 - DNA, 201 bp, Artificial Sequence
  Description of Artificial Sequence: Synthetic polynucleotide
aatttaatatttttttttttttttttggagttattttttttttcggaatatgtaagttttgggtggtttagttttgtcgttagatttagtttttaagtgcgggggaaggagatgggcgtttttagtcgcgattttttgggaaggtggttatttatttgcgttttgaaatagaagaatagggcgacgttgtagataatttgg

SEQ ID NO: 5069 - DNA, 217 bp, Artificial Sequence
  Description of Artificial Sequence: Synthetic polynucleotide
attggttgaagtttttttagcgatttgtatgaatcgagagggagtgttttttgtcgttttttttttaagagcgttttgattgtagttttttagggaatgcgcggtcgagggaatgcgcgtagtttataggttttgggagtgagttggtgttcggcgatttggtattcgcgtttggatatggggcgtttatatcgttttaggagtagtattagttata

SEQ ID NO: 5070 - DNA, 317 bp, Artificial Sequence
  Description of Artificial Sequence: Synthetic polynucleotide
agtaaaagtttttatttgtagtatcgggtatgttgttcgtttaacgcgtttcggggatttgttggttcgtgtttttaatttaggggtggttatacgtttcgcgtttttgtttttgggtagatttttttatttgtgtattttggtttttttatttagtaaagagatgtgcgaagtgtgcgtttggagacgagtcgtttcggtgatttttattcgttcgtagcggtggttttggtttttcggattcgcgttcgcgttttgcgggtttttcgcgtcgtttttgttcgtcggattattcgggtttagagggtcgttcgttt

SEQ ID NO: 5071 - DNA, 201 bp, Artificial Sequence
  Description of Artificial Sequence: Synthetic polynucleotide
gaggggaggtacggagcgggaggagggggacgcggagaagattgtttggtttcgtcggtttcgttaacgtgacggttagtttcgtcgagcgttcgtattcgtttatatttatgattattcgtatattcgttttaatacgtgttaaggcgcgatcgcggggtttttggtagttttcgttgtatttttttttttataggggta

SEQ ID NO: 5072 - DNA, 201 bp, Artificial Sequence
  Description of Artificial Sequence: Synthetic polynucleotide
tcgtttaatacggagacgcggagttttatagcggtggtagaaagtgagtattaatttagtaatagggggaaggaaggggacgtcgggcggttagtgggacgtgcggtagtcgagggttgtagtttgtttttgtagcgcgttcgcgtttatttgcgattttttggtaggggatgttcgttaggttgaattttttggtatcgt

SEQ ID NO: 5073 - DNA, 201 bp, Artificial Sequence
  Description of Artificial Sequence: Synthetic polynucleotide
tagtcgggtcgagcgcgttgtttgagttgagtcgtcgtaggtgaggggttcgcgttttcgttcgttttgggcgtcgcgtttggtattgattttgtcggtcgtttattgtcgtcgtcgtcgtcgttcgcgggtattatgatagttttgagcgttggggttataggttggttatcgtcgtcggtgttcgggaggttgcggcgc

SEQ ID NO: 5074 - DNA, 201 bp, Artificial Sequence
  Description of Artificial Sequence: Synthetic polynucleotide
agtgtgattgatgtatttattatttaataatttcggggtgaaatttgaggtgaacggttttatttttttatatttaggaatggaattagttttcggtatcgtgtatagtttgattttacgttcgtacgttgggttttcggttttttggtagtgtatttaagtgtatttcgcgtgtgttcggcggattttcgtgtatatcgt

SEQ ID NO: 5075 - DNA, 201 bp, Artificial Sequence
  Description of Artificial Sequence: Synthetic polynucleotide
gcgtagttttatttcggatggtttttgttttttcgcgggttcgagggcgttggaaatttagcggcggcgaagcggagaggagtttcgcgcgttttcgttcgtacggttttaggtttggggtttgcgttggagtcgcgcggggagaggtcgtttttgcgatcgtcgcgttcgttttcgatcgttcgggttcgcggttagttc

SEQ ID NO: 5076 - DNA, 221 bp, Artificial Sequence
  Description of Artificial Sequence: Synthetic polynucleotide
agtttaggtttgcgtttatacgcgcggcgtttatacgcgcggcgtttatttggttgtagtttcggttagggttagcgcgtcgcggttgaagggggcgttcggatttttttggggcggcgcgtagtcgggatagtttcgtatgacgttcgcgttttagcggtttcgggacgcggttttatttttaatttttggcggttttagtttcggtttttgtgtttcgg

SEQ ID NO: 5077 - DNA, 311 bp, Artificial Sequence
  Description of Artificial Sequence: Synthetic polynucleotide
gtttcgtttcgtattcgtatatatttttttcgtcgttgttttgagcgtagcgataagggtttttatattttcgcggttcgtaatgtttcggggttaagtcgaggtagggaggcgttttcgtagtttttgattttataattcgcgcgcgtgtgtatcgagtcgcgggtatatcgcgaatatatatatatatatatatattcgtgcgttttcgtttttcgttcggttcgggtttttcgaatttattttcgaggcgtttcgggcgtagggttcgtttttttttgcgggtttttagcggttgttcggtagtggtt

SEQ ID NO: 5078 - DNA, 308 bp, Artificial Sequence
  Description of Artificial Sequence: Synthetic polynucleotide
ggtggcgggtagtgtggtgatggtttttgaggaggtttgttcggagcgtatcgatttgatttataaaaattatcggaaattttgtaatttgttgatcgacgtggaggagtggggttaggtggttattattagtatgtttattcgttacgttcgtacgtagtttttgagttttatttagaacgtaagtgggtttagtttaggtagagcgggtcgaagtgtgtttcggggaggcgtttatagattcgtcggttttttcgtttaggaatttttattagaggagaacgcggaaaaagttttttacggtttag

SEQ ID NO: 5079 - DNA, 201 bp, Artificial Sequence
  Description of Artificial Sequence: Synthetic polynucleotide
cgagaattttgcgggtttagaacgttcgcgcggacgttttttttacggcgtcggaagtcggcgtcgagtttgttatcgggtatttttttgttgttttgacgacggcgggcgttgtaagagtggagaagttgtaggtgttgaggcgcggtgaaagaaattttgggagttaagagtacgaggagttggtgtttgtgttatatt

SEQ ID NO: 5080 - DNA, 201 bp, Artificial Sequence
  Description of Artificial Sequence: Synthetic polynucleotide
aggtgatttcggttttggcgaggcgcgattcggttatgcgtgtgtgtgttttttttcggagaggatttcggtcgtcgagggtacgcggggtttagttatcgttcgttttttaattagttgttggttcgtttcgatggtgtaaattgtttttttttgttttttattaaatagtaatagtttggttacgtttaagtggaataa

SEQ ID NO: 5081 - DNA, 201 bp, Artificial Sequence
  Description of Artificial Sequence: Synthetic polynucleotide
gggatttggtgattttagtattattttttttttttttttttttttttttgtttttttatcgtttgttgtaattttgtaaagtttcggagtcggagagcgcgtttcgtttttagagttttcggattcggcgagttagcgatcgtcgagtcggttattatgttcggtagatcgcgttattaggcgtttttcgcggtttttatt

SEQ ID NO: 5082 - DNA, 630 bp, Artificial Sequence
  Description of Artificial Sequence: Synthetic polynucleotide
agtttttttttgttattcggagtagagcgcgttagcgcgaggtcgggtcggtcgtttgcgtagcgtcgggttaattttaattgttgattatatttttagcgtgtttttttataggttttatttgtaattgagacgaatgattatagtggggcgggaaggagtagttgtttattaattaatttttaattaaaagtgtttttcgttttcgggtgattaaagagaaatatcgttcgttgggcgatattgattcggatggaatttatttgttaacgttcggaggaatggttttttcgtttatcgcgcggtcgggattgttttggtttttttcggtttgagtcgtcggcgagtgatcggcgagtttgcggttaggtcgggttgcgcgaggtggggttgacgttagagtttttttcgttttaagtcgcgtatatttgatttgacgggttcgcgcgattcgtttttttttttttttttttcgtaaaatatgtatttttgtcgtcgttgcgaggtcgttcggttttagagttttttcgagttttcggaatgcgaagttaaaggaatcgcggcggttatcgttgtttattttgttattcggttagaaaagtttgcggagcgcggggatggattaatcgg

SEQ ID NO: 5083 - DNA, 201 bp, Artificial Sequence
  Description of Artificial Sequence: Synthetic polynucleotide
gagggcggggcgggcggcggtcgcgtttttaatttcggcgttgcgtgtgggagcggtcggattagggaattagcgttgtaatttcggattagtaacgttcgttaaatgagtgtttaatttcgattttttatgttttttagcgtcgcggttgagttttaggaggttttttggttaggtttttttcgcgttttggttttattt

SEQ ID NO: 5084 - DNA, 239 bp, Artificial Sequence
  Description of Artificial Sequence: Synthetic polynucleotide
ttcgtgaatttcgttcggggatattttatagtagtcgcgtttttatttttttttttttaaatcgtttcgggtttttgtcgtcgttattttttgttaaatcgtttttatttttttagcggagttatagcggggcgcggcgtatataaagggggtcggagggtggagagtatagaaggagggagagatttcgttagggttcgtggtacgggtttgggagtagttatttattcgattttttt

SEQ ID NO: 5085 - DNA, 201 bp, Artificial Sequence
  Description of Artificial Sequence: Synthetic polynucleotide
gacgttagtcgcgcgggtttttcgagttcgcgtcgcgtttagggatttggttcgttttttgcgtttttatttttttattttttttagaaatatagtacgcgggttttttttatgtaggttattttttacggagttttaggttagttttggggcggtgaaacgaaggtgttaaggtatagtattttttcgggaggttggata

SEQ ID NO: 5086 - DNA, 221 bp, Artificial Sequence
  Description of Artificial Sequence: Synthetic polynucleotide
tagttgttaatttcgcgcgcggagtttttcggcggtgtagtttcgtttcggcggcgcgggcggtatgaagattagtcgtcgcggtcgagcgtttttggtcgtggttttgaatttgttggcgttgttgttcgttattatcgttttttttattacgtattggtgttagggtacgtagcgggtttttaagtcgggttgcggttagggcgggcgcgttaattgtt

SEQ ID NO: 5087 - DNA, 201 bp, Artificial Sequence
  Description of Artificial Sequence: Synthetic polynucleotide
gcggggaggggatggggtggcgggagaattgtttttttttttagttataaatttattaggtttttaaattttttttggattttttttttcgcgttttcgcgagttcgggatttaggggatggagaattcggggcggaggagcgtcgagttaggcgggagggaggtcgagtcgtgggcgggaggcggatcggcgtggggttg

SEQ ID NO: 5088 - DNA, 246 bp, Artificial Sequence
  Description of Artificial Sequence: Synthetic polynucleotide
gtttcgggggtttttagttaagtatcgtttggtgttttcggtttagggtcgtgtgagtcggaggttgagtttacgtaaggtttttatttgtatagattacgagttggagaattatagtatgtattgcgtgtaatgtaagatgttcgtgtgttattagtgtttggaggagggtaaatattttagttacgaagttaaggttttgggggttatgtggaaattatataaggtgagttttaagaaaattta

SEQ ID NO: 5089 - DNA, 223 bp, Artificial Sequence
  Description of Artificial Sequence: Synthetic polynucleotide
tcgattatgattatttggatttggataagatgagtttatatagcgaggcggatagcggttatggtttttacggggggttcgttagcgtttttattatttcgtgttagaagttttttaacggcgttcgcgtgtttttttcggttatgtcgttatcggttatttatttgttatcggttttggtttcggtgtttcgtaatttttgtattatttgtttttagtgtta

SEQ ID NO: 5090 - DNA, 201 bp, Artificial Sequence
  Description of Artificial Sequence: Synthetic polynucleotide
ttagggtacggcgttagcggatttacggagaaggagaaaagttttattgtcgtgtagaagtttaggttcgggtgagacgtttgcgaaggttgttagtagcggaagagaaggggcgtttttcgtgttgcgtagtattcgttcgcggtaggtgggcgcggagtttagagttgggagttaaacgtaaacgttggcgagaagttt

SEQ ID NO: 5091 - DNA, 244 bp, Artificial Sequence
  Description of Artificial Sequence: Synthetic polynucleotide
gtttcgttgttttagcggtcgttgttttagaaaagttaacgagaattagatgtggtggttattgtcgaatttttttagagtcggtgattggtttttagtcgagggttttagttaattagtttgttgggtgggtttggagtttcgtttcgtttaggcgttcgcggagatttaggttcgaggttggcgcggcgcggagagtgggttggaggtcggggcgggacgcgttgtgtagcgggtaagcgta

SEQ ID NO: 5092 - DNA, 201 bp, Artificial Sequence
  Description of Artificial Sequence: Synthetic polynucleotide
tttgttcggttcgttgaaggttggttttgggtttgggggtagtgttcgcgaagggttgcgatggtaggtttcgttgttatacggtatcgagggttttttcgtttcggcgttaggcgtacgtttttttgttatatttttcgcggggcgcgtcgttagggttatttgtttttttaagtttcgttaggtagttaagggtgagga

SEQ ID NO: 5093 - DNA, 457 bp, Artificial Sequence
  Description of Artificial Sequence: Synthetic polynucleotide
ttgagggaggggtcgggttttcgggtttgtagattcgttatcgcgcgtgcgtatgcgtcggtcgcgagttttcgggtgtaggtttgggcggtttcggttcgcgtatttgtttaggcgttgcggtttagcgcgttttaatttttagttcgggcggagagcgggggcgggattgaagtatcgtgttttttaaagtattttttcgtcgtcggtagttttggtttcgtaaatgttttagcgcgtttaggcgtacgtagagattggcgcggtagttttcgggttaacggtacgcgagtaaagttggttggcgatttgggatacgtagtagaagttgaggttgtatcgattttcgtcgtttcgggggaggtatgggttcgggtaggtttaggaggaagttgtatagttcgaggttcgggcgggagtggcgggtcgcgggtaagggaacgtatatttggaaggg

SEQ ID NO: 5094 - DNA, 244 bp, Artificial Sequence
  Description of Artificial Sequence: Synthetic polynucleotide
gcgttttttttgcgcgcggcgaggtcgagacgtttttcgcggtgatagcgtgtaaggcggagattcggcgcgtttttagtttagggaaagtttaggcgacgcgatcgtaagttcgagtttaggtttttcggagtcgttagggcgcgtcgggttgtttgtttttttgtttttttttgtaggaatttttcgtcgttcgcggtcgggatttcgggtttttttcgggcgtagattttagttatcgttt

SEQ ID NO: 5095 - DNA, 206 bp, Artificial Sequence
  Description of Artificial Sequence: Synthetic polynucleotide
gagcgtagcggcggggtatggaagaagagggttgggggcgcgcgttatttgtaaaggttttcgaggtttttttttagttttggtggtaatttcgtttagcgtcgcgtttttttttagatttaaatttttgttgggtttttcgggtggcggcggcggcgacggcggcggttgttggagttaagttttgtcgttcgtagcgtcggggc

SEQ ID NO: 5096 - DNA, 203 bp, Artificial Sequence
  Description of Artificial Sequence: Synthetic polynucleotide
agagagatagtatgagaacgcgtagagttgtatttcgcgggggtcgggcgttagtagtatcgcgttgttttatttacggcgcgtttgtttttcgcgttgcgcgtttagcggggcgtcgagttttagaaattttagtatatggtcggttcggcggttacggtggtcgtagttgttttgtttttcgagcgttttttattgttttt

SEQ ID NO: 5097 - DNA, 266 bp, Artificial Sequence
  Description of Artificial Sequence: Synthetic polynucleotide
cgtgattatttttcgttttattttcggggcggggttcgttagaaattttaagcgttcgtaatcgttttttttcgtgggcgggatggggaaattgaggttcgaggtcgtttcgttggttggtgtaagaattagtttgtaatttaagttttgagttgttggcgtttcgtttcgtgtagttgaatttaatttattcggggttgtgggtagcgtttttttggggttgatacgttatttcgagtttgaggattaagatcggagtgatttgg

SEQ ID NO: 5098 - DNA, 242 bp, Artificial Sequence
  Description of Artificial Sequence: Synthetic polynucleotide
ttcgaatttttttaaatttggcggttcggggcgcgtgggggggacgtttcgttatttgcgcggttataaaggagagatttatggtgtcgttgtagttagcgttcgagttttcgttgttgtcgttgtcgttgcgggttagtcgtttgtatagttggcggggatcgggttgagtagcgagcgttcggagatcgtacggcgtattcggttgtttttgggtttttggttttagatttttattaggc

SEQ ID NO: 5099 - DNA, 201 bp, Artificial Sequence
  Description of Artificial Sequence: Synthetic polynucleotide
taaagtaaaataggataaacgatcgcggcgcgtcgacgtttggcgggttacggttataaagcgggttttagagttttttttaggcggcggtaaagggggcgttcgaggttatcggtaagagatagattattggcgtttcgggaaaatagagtggggaagggcgagattgtgtgtttatttacgttcgcgcgggtttgagtt

SEQ ID NO: 5100 - DNA, 201 bp, Artificial Sequence
  Description of Artificial Sequence: Synthetic polynucleotide
acgttggcgaatgattatggaaataatatttaatagtagtgttttttatgttaggtatataatcgttttggcgtgggttgataattatgtttattttatcgcgtggtattgagtcgatcgtatatttagggtttcggtttttagggttcgtttattcgtttattgcgtgaagtatttattttcgtaggagtcggagtagga

SEQ ID NO: 5101 - DNA, 312 bp, Artificial Sequence
  Description of Artificial Sequence: Synthetic polynucleotide
tggtcgtttttttcgcggttaggcgtattttgtagcgtttagatcgtcgcgtttttattcgcgtttttaatcgcgagcgttcgtttgggtcgggtcgggcgttcgagattcgggagagattaggggttcgtaaagtagaagagtagatttagaaagaaaaaaaaaaaagcgagaagtgcgagaaaaatatattgaatttagttaaatatacggtagatgaaaaaaatattttgtttagaagttaaaaacgagttttcgagtcgtgagatattgttgcgttttcgttaggcgtgtaggtcggatgttaggggg

SEQ ID NO: 5102 - DNA, 203 bp, Artificial Sequence
  Description of Artificial Sequence: Synthetic polynucleotide
gcgttggtagggggaggtttcggtaacgtttgggggttttaggttagtttttttcgggttggaaggtatcgtataggggttttcgttaatttcggttttcgcgcggtcgggatacggttatatttgttcgcgggggtttgttttttaggtcgtcgtaggtttttcggagtttaagaggattttataagtagttaaagttagcg

SEQ ID NO: 5103 - DNA, 201 bp, Artificial Sequence
  Description of Artificial Sequence: Synthetic polynucleotide
tttcggggcgggcggcgaggggcgggagtttagagagtgtttcgtttttgtttagtgttgggcggcgcgtggggggggtagggttttcgtttttttacgcggtttcgcgtattttaaggattttaatttgttaggtgagtttttgtttcggggaggggcgttgggggcggcggcgaggatttagttgcgcgcgcgtatgcg

SEQ ID NO: 5104 - DNA, 283 bp, Artificial Sequence
  Description of Artificial Sequence: Synthetic polynucleotide
gtggtaaggtttggggattgagaggttcggtgagtgttagtttcgtaggttgcgtcggtgttcggtttttattttagttcgggggttttaggtttttcgcgggttttggggcgttggtgttcgcgtagttttagtcgttttcgtagttatcgtcgttcggtttcgcggaggcggcgcgtagcgggggcgttcgggcgttgtttttttgaggtttcgggggtttagggtggttcgtagtgttattggttagggtttgcgatttttggggttcgtcgtcgtcgtt

SEQ ID NO: 5105 - DNA, 201 bp, Artificial Sequence
  Description of Artificial Sequence: Synthetic polynucleotide
gaacgttttttagttcggtttggtattggcgtcggtgttttttattttggttattacggtttttagggatttgtgggaggattatagtcgttatcgtttcgattataagattaattatttgggttgtttggtttttagtaggtgagttgggcgggcgggcgagcgagcgcgcggtggcgtagggtagggcgtttcgggaat

SEQ ID NO: 5106 - DNA, 247 bp, Artificial Sequence
  Description of Artificial Sequence: Synthetic polynucleotide
aggcgtagatttacgagttggagcggcgttttcggtagtagcggtatttgtcggcgttcgagcgcgaatatttggttagttttattcgttttacgtttacgtaggttaagatttggttttagaattatcgttataagatgaagcgcgttcgggtcgagaaaggtatggaggtgacgtttttgttttcgtcgcgtcgggtggtcgtgttcgttttggttagggacggtaaattatgttacgcgtttaa

SEQ ID NO: 5107 - DNA, 427 bp, Artificial Sequence
  Description of Artificial Sequence: Synthetic polynucleotide
tagcgcgtttcgggtttcgcgcgtcgttagtttttggttcgttcgtcggtttcgtcgcgttcgttagtttcgtagcggagtttcggttcggtttcgggtcgtcgttattacgtcgcgcgtcgtatttcgcgttaagaatggggcggttaagttgtttaagtcgttcgtcgtcgtcgtcgtcgtcgcggtcgaggcgttcggcgtcggcgcgggtatggagcgttcgtagagtcgttttagtttgttcgtttttttcgaggcgttcgttatttatttttcgtgtatgaattttttcgacgacgaggacgtaggtaagcgcgcggttcgttttttagattttcggggtgtttcgggatttaggttcggtagtttttttttcgattcgtgcgtttttttttttatttttaattttttgggaaggcgtttt

SEQ ID NO: 5108 - DNA, 246 bp, Artificial Sequence
  Description of Artificial Sequence: Synthetic polynucleotide
ttcgggggcggttgtacgtggtcgtggttttgaattttttgcgggggtttcgaaattcgtttgcggggaggttagggcgatagaggattcgggagttatcgttggtgcgtggcggcgtggagcgcgtttgttacggttaaggtgcgggttcggtttcggtttattttaaggggttatcgggatgcgaagttcgggacgttcgtcgtcgcggtgatttcggcgggggcgtatttcggttgtgggtcg

SEQ ID NO: 5109 - DNA, 384 bp, Artificial Sequence
  Description of Artificial Sequence: Synthetic polynucleotide
tggtggcggaattttcggggcggtcggaggcggcggtcggggagtcgagaagtaagtattagcgttttaggatcgcgcgcgtcgtttcgcgtcgtttcgcgtcgtttttcggtttagagtttttattttcggtttgtgagtttgcggcgttggtggagttcggttttaggaagaggagtttattcggttttttttgattggatagtagcgaggttttatcgggcgttttcgcggtttaaaatcgaagcgggggcgagggggaggtagagttcgttttttgcgcgtcgcggttgggagggagaggaggtgggagagaaggaagaggcggaggaggtagcgggcgtcgaggttttgggattcgtaggtaagttagatcgacgcgta

SEQ ID NO: 5110 - DNA, 415 bp, Artificial Sequence
  Description of Artificial Sequence: Synthetic polynucleotide
cggggggggtaggggtttcgggtcgcggggtgcgggggttgcgttaaattttcgcggggcgtttcgggcgtacggagggttcggcgtttattcgttcgacggcgttttatttattggcgtttacggttcgtaggtaaagcgtggaaggagttgaacgcggcggagaagcggtttttcgtggaggaagtcgaacggttgcgcgtgtagtatttgcgcgattattttaattataagtatcggtcgcgtcgtaagaagtaggcgcgtaaggttcggcggttggagttcggttttttgttttcgggattagcgttttcgtagttatcgttcgagttttttttcgcggcgtttggttcggttcgcgtttttcgcgagttgttttcgttgggcgtcgagttcgacggtttggggttgttta

SEQ ID NO: 5111 - DNA, 543 bp, Artificial Sequence
  Description of Artificial Sequence: Synthetic polynucleotide
cgttggaagaaaaatttttcgcgcgtcggtagaattgtagcgtttttttttagtgatttcgggagtttcggttgtagtcggttttgcgcgtttttttaacgaataatagaaattgttaattttaataatttagagtaggttaacgaggttttgttttttcgattcgaattaaaggtttttcgtttcgtgcgttgttacgagcggtgttttttggggttttaatgtagcgagttgtgttcgaggggttcggaaggcgtaagttgggtagcgatatggggaacgcggagcgggtttcggggtttcggagttttgggttagtatttacgttgttgttgttcgtcgcggcgttattggtcgtgtcggacgtattcgggcgttttttcgaggaggacgaggagttagtggtgtcggagttggagcgcgtttcgggatacgggattacgcgttttcgtttgtacgtttttgattagtagttggatttggagttgcggttcgatagtagttttttggcgttcggttttacgttttagaacgtggggcgta

SEQ ID NO: 5112 - DNA, 227 bp, Artificial Sequence
  Description of Artificial Sequence: Synthetic polynucleotide
tttagggcgtagattttttattgtttttcgggtttttttcgggttttttttttgatttttttttttttttttttcgagtttttgtttatatttaggttgcgtttcggtttggttgttaaatagaacgacgtttttgcgtagagttgattaggggtggcggcgggaggtaaggttttcggtatcggaaagtaaagtaaagaaaaaggtattgtagttatcgtttttgg

SEQ ID NO: 5113 - DNA, 323 bp, Artificial Sequence
  Description of Artificial Sequence: Synthetic polynucleotide
ttttgtttcgcgattggcgggagtcggagtttttttgaattcggcgtttatattatgggttgagttcgtcggcgtcgagggagttagtgcgattcggttcggcgcgtacggttaaggtacgcgcgttggtatacgcgggcgcggatacgcgcggatatatacgtgcgggatacgttttttttcgacggcggcgttaatttttcggtaagtttagcgttttacgcgatttgttcggtttttacgttggttatagcggttgcggggacggggaggaaggtagcggggtggttttaggggtttattttgtagggttttttcgacgg

SEQ ID NO: 5114 - DNA, 279 bp, Artificial Sequence
  Description of Artificial Sequence: Synthetic polynucleotide
ggcgtagattatttggaaggggttgtggatgtcgtgcgtggtgtagagtatcgggtatatgtagtgtaaagtgtacgattcggtgttggttttgagtatcgaggtgtaggcggcgcgggcgtttatcgtgagcgtcgtgttgttggcgttcgttgcgtttttcgtgattttggcgggcgcgtagtgtattatttgcgtggtttcgggttcggttaaggcgcgtgtggtttttacgggaggcgtgttttatttgttttgcgggttgttggcgttcgtgtt

SEQ ID NO: 5115 - DNA, 261 bp, Artificial Sequence
  Description of Artificial Sequence: Synthetic polynucleotide
ttttcgtcggtggaggtcgcggttggcggagatcgttaagttagaggaggggattcgaggtttcggttgggcgaaggttttggagggggagaagacggtcgaggcgtggaggggtagtcgcggcggggcgatttttatttgtttattgcggggtttgttcgtggggtcggggtagatttcgtaaaggacgcgtagtttgtaagttcgcggttcgcgcggcgcggggatggggagcgtgtgcgtcgaggagcgcgcgtcgag

SEQ ID NO: 5116 - DNA, 364 bp, Artificial Sequence
  Description of Artificial Sequence: Synthetic polynucleotide
tgtacgcgcgcgtggttcgacgcgaggttcggtcggttcgggttcggggcgagattgggggtttgtcgttgtcgttatcgttcgagcgtaggaaatcgtcgttatttgatttcgttattaagtttaaggtgttttggatttacggtaagtatagcgtcgttgtagttggtcgtgcgtttttattatcgtcgttaggtttcgaggtcgcgtttagttttagtaagaggaaacggacgtttagcgataaatcggcgtatacggtcgaatacggtagttttcggattcgcgatttaacgtcgcgtttttcggggttgttcgaggaggcgatagttttcgttgcgttttcgtcgtttagggttcgagc

SEQ ID NO: 5117 - DNA, 242 bp, Artificial Sequence
  Description of Artificial Sequence: Synthetic polynucleotide
tagggtggaggcggtgtttgattgtttttttgcgtgtgttttgggaggtgggtttgttttggggatagaggtgttggacgtgtaggagtagatatgtcgcgcgtttcgaggaagcgtcggaattattagaagtatagggacgcgggtgtcgagagtttttagtattgaaaacggggatttttttttttgtaagggattttttttttttgttttaatttatttttttagatttaagggacgtt

SEQ ID NO: 5118 - DNA, 285 bp, Artificial Sequence
  Description of Artificial Sequence: Synthetic polynucleotide
tagtttcgggtcggggtggttgttttattttcgtggtttagggaggaggcgttgggtgcgtatgtttaggggtgtgttcgttgttagggttgtagcggtcgttatttttaattagttgtaagtcgagttgtttatttgggatcgggtcggttcggcgggtttggttttcggcgaaggcggcggcgttggtgcgcggcggttggggcgcgggacgtaggtagtgcgtggcgcggttggcgttttcgggcgtcgttatcgagcgagggtgcggtttcgggcggtcgt

SEQ ID NO: 5119 - DNA, 222 bp, Artificial Sequence
  Description of Artificial Sequence: Synthetic polynucleotide
cgttatcgttgtcgtcgttttttcgcggagtgacgcgttttgtagttaatcggggtagtcgggggggaggttcgggaggggttttgggcggagtcgggtcgtttttttattttacgggttcggggttgtttttttcgaaaattttagttttaattgttttgggaatgttcgaggtagagaaagggagcgagggagtaagtaagaagttggaggattagtgtt

SEQ ID NO: 5120 - DNA, 201 bp, Artificial Sequence
  Description of Artificial Sequence: Synthetic polynucleotide
gtagcgttttttggtttcgcgcgtcgttcgggggtcgttggttcggtgcgtgtggtcgtttcgtcgtttggttggagtttgtttcgcggcgtagggttgcgtttcgagggttcgttggttcggtggtttggggtttgttcggtttagcggtttatggttcggttttcgcgttttagttttcgtcgtcgtcgtcgtcgtcgt

SEQ ID NO: 5121 - DNA, 298 bp, Artificial Sequence
  Description of Artificial Sequence: Synthetic polynucleotide
tcggttttgggtggcggcgtcggggtagcgcgttcggtcgagtcggggagaggagcgcgggagattcggagcggagcggtaggagagcgcggagcgaagcggtaggagtagtttatagttaggagcgttttttcgtttttaacgtcgcgtttttttttttaaaacggtttaaaaaaatttattaattgtatggtcgcgtatttttaaaaaggtattcgtcgttatttggtttcggtgaattttaggaggcggaggaagggcgcggggtgggtgcggtgatatcgtgggaggtggtttt

SEQ ID NO: 5122 - DNA, 272 bp, Artificial Sequence
  Description of Artificial Sequence: Synthetic polynucleotide
tatttatttcgattcgaggttgtttattcggtttggtatgtttcggcgtttttggggtttttgtatttcgttggtttttcgttgtggtgtttcgtagttcgattatttttgtgtttttaggagtttattttgggcggtagggaggcgttgcgtggggtttacgagttttacgttgttatttttattagtttttattttttaggcgtttgttttttcgtattgttaggttttgttttcgtagtatttggtagatttgagttcggtttttgtta

SEQ ID NO: 5123 - DNA, 201 bp, Artificial Sequence
  Description of Artificial Sequence: Synthetic polynucleotide
tttagtaatatttgtagggttggtttttcggtcgtttatttcgttagtttgggtttttgtgtggagtgcgtttttgtgtttttggttagtcgtcggttacgtgtattttttgttaggggttggtaggttttttatttgtttaaattagaaatataaggtatagtggtttttagttgagggatggtatttttttttatgttt

SEQ ID NO: 5124 - DNA, 251 bp, Artificial Sequence
  Description of Artificial Sequence: Synthetic polynucleotide
tacgtttttcgcgttcgttcgcgtttgttttaggtttttatcgcggttttttttgttttcggggtcgttttgttttttatagattttattttcgggggtcgtttttaggattttcgttcgtttttttttgattcggtttttgttcgtttcgtttttttttttcgggttttttatttttttttcgtcggtttcgatttcgggggcgtttcggatttgtttttcgaatatttttagtttcgtttttagtttgc

SEQ ID NO: 5125 - DNA, 249 bp, Artificial Sequence
  Description of Artificial Sequence: Synthetic polynucleotide
cggcggtttttatttggagtcgtatttggggcgtcgagtttcggggtcgcggaaagaatgcgcgtcgttcgtgcgtttcgtttgtcgcgtttggttattcgtagtcgtcgcgttcgtatttgattatggagtgcgtttttttgttcgcgtgtgttttttcggttgcgggttcgggttcgtcgaggggtttggcgggattggggcgcgtggttaaggtaggtgtcgtcgagcggagtttcgagagcgggt

SEQ ID NO: 5126 - DNA, 249 bp, Artificial Sequence
  Description of Artificial Sequence: Synthetic polynucleotide
tttttagagttaattttttagatttggaggtttttaaggttttcgtaatttagtgagtttcggggtattaataaattttcgcgggggttatcgcgttcgcgaacgtagagtttatacgtggattttcgcgtttgtgatgtttcgattcgtttcgggttttcgtatagataatgtcgcgcgtttttttcgtagttatttcgggattcgcgtttcgcgtcgttcggacgtttttttgcgtttgtcggggat

SEQ ID NO: 5127 - DNA, 201 bp, Artificial Sequence
  Description of Artificial Sequence: Synthetic polynucleotide
ggtcgcggcggtcggggtcggtgtcggcgtttttttgggcggtagcggcgaggagatgggtttcgtcgtcgtcgtggtgttcgtcgtgatcgtcgcggtcgtcgcgtagagcggcgcgggttcgtattattattattattattattacgtcgtcggttattattattattcgacggtcggcgcgttcggcgtcgcgggtag

SEQ ID NO: 5128 - DNA, 201 bp, Artificial Sequence
  Description of Artificial Sequence: Synthetic polynucleotide
atggtttaggcggtcgtttcgcgcgttttagtttcgtcgcgcgtttgagttcggtgcggcgttagaagatagcgcgtagtcgtttttgagtcgtggaggcggggattaagttggaaggagtagcgattttcggatcgagtcgcgagtgtgcgtcgttcgtcgttcgtcggatttttcggatttttcgatcgtaagtgtcgt

SEQ ID NO: 5129 - DNA, 251 bp, Artificial Sequence
  Description of Artificial Sequence: Synthetic polynucleotide
atcgcgtagttcgcgttttattgtcgatcggattttacgttgttgtttttagcgttgcgcgttttgcgcggattcgcgttgttggacgtcgttatttcgcgtttggggtttacgcgagtcgcgagtttttgtttgtttttgcgttatttcgatttcgcgttttgtattcgtttcgggttcgcgtttcgcgttcgtacgtaacggtattcggttttgtatacgcggttggttttacgcgttgttcggcgtcg

SEQ ID NO: 5130 - DNA, 201 bp, Artificial Sequence
  Description of Artificial Sequence: Synthetic polynucleotide
ggggtttcgttgagttgagttttgcgattcggtttatgtgacgtgagttttattttaatttaagtgtgaggaagcgaatagcgttttgaaacgtagaaacgtgtttattcgaattgttaacgcgagcgtagagtttattgataaagtaaaataagataaatcgggagttagaaaatttagcgatttataggatttatcgtg

SEQ ID NO: 5131 - DNA, 201 bp, Artificial Sequence
  Description of Artificial Sequence: Synthetic polynucleotide
ttttagaattcgcgggttattcgggagtttttttcgtagtattagtcgaaagtttttagtgtcgaggagggcgggtagttgtttttttcgatttcgtttcgttcgcgcggacgttttcggttttacgcggggattatttcgggattttcgtcggatttcgcgcgttcgcggttaatttgcgtgtatttgcgtttcgcgtta

SEQ ID NO: 5132 - DNA, 201 bp, Artificial Sequence
  Description of Artificial Sequence: Synthetic polynucleotide
aggtcgagttcgtacggcgttttcgtgtagttagcggttagtgatcgcgcggttcgggcgtttttcgcgcgttttagttttttagacggggttcggacgcggacgttttttttgtagttttgttttgatcgttagggatgggttttgggtatttagcggttgagggtggggagcggttagcgtttgatgtttagtttttta

SEQ ID NO: 5133 - DNA, 337 bp, Artificial Sequence
  Description of Artificial Sequence: Synthetic polynucleotide
gtggtttcgttttagggtcgcggggaggcgttttcgtgcggggcggagttgttatcgttttttttttaattttcggggattgtggtttttttttaagttcgcggcgtttttagttgttttttattcgtttcgttcgttagtttttttttcgcgcgatggtttcggcgttgagttatgtttttaagtttaagtttttcgtgattttgttcgttatttcgtttttgttgttgttattcgttattttgatgttcgttaaggttagttgtatttttaggtagtttttcggatattcggcgttttgtgtttattaacgggtatcgatttcgggagttttgag

SEQ ID NO: 5134 - DNA, 201 bp, Artificial Sequence
  Description of Artificial Sequence: Synthetic polynucleotide
tgttttcggcgttttacgtgtggcggcggttagcggcggtttaggaggtagtcggtgagcgtttgcgagtagagtggcgggggtcgttgataggtttcgcgtagtttagtttagtttagttacgcggtttataggtggggtttaagagtagtttggagtaattcggcgttacggagaggggtggacggttttgtacgggtt

SEQ ID NO: 5135 - DNA, 201 bp, Artificial Sequence
  Description of Artificial Sequence: Synthetic polynucleotide
ttttttgcggcgaggtcgtttgatgaatttaagggtattagtgtttcgcgagaattttttgtgggttgtgacgagaattaagcggagcgtaatttttatcgtattcggataggatgcgttgcgtaatttgtcgtagtttttttgttttatttcgggtggttcgaagttgtaattttgttaattttttattatacgttatgt

SEQ ID NO: 5136 - DNA, 201 bp, Artificial Sequence
  Description of Artificial Sequence: Synthetic polynucleotide
ttttgtagttttgtttagattcggaagtcgtcgaggaagggaggaaggcgggggtggggagagcgcgattttaagcgttggcgggcggcgaggaggggtcgtagcggttcgaggaagcgtttggaggcgttaggggcgtcgagtttttagggaggtcgcgttttcgggaagttttttatcggttgttcggagtaggatcgg

SEQ ID NO: 5137 - DNA, 2567 bp, Homo sapiens
gcgctgggcgatgagggaccgttgggtaattgggggcataggaccgggcttcgctgggttcggggcagaagcgccgaagctccgacccggaacgcggtgacttcatcaacgcagaagcccgcgcagccgagcagaggagtccctcgtaggcgaccctcggacagacgctcctgcgcggcccgcgtggctcagctccgccccaggaaacttttcgcgcagcccccgctccatgcgcccccacccagtccttcttcggggccgccccctccccaaagtagctctccgggtccactgggcgcccccgtaaccgggtcggaacctcgaacggcttcgcgtgccatccggttaccctggcaacaccatccggcggcgcccggcggtccaatcctagcctgcggcctctctcgagcctttcgcaaggtggggaccgggacgcgaccggggatggggaagggggctgcaggaggccccgcctgcgctgtcgcccctgctgggcacagcgccccccaccacccgcggcgaccccggcccccgcaaggtggggcggcgagcaggagccggggccaggccaggggctcgagctcccgttcgaggggcggggaaggcgggtgacgtgagccgggccgggcgggcggagttgggaccggctccgggaggcgggggcgagcgcgcggagaggcagacgcgaggagggaggcggctgagcagcgcgggcggctctgcggcgggcgcggtgggcgcgggcggcggggccccgggatccccgcgcgcctcctccgcgcggcgccgccgccgcgcgtccccacgccccgcgctccacggcgccctcgccccgcgcgcctctcgtgcccgcctcctgccagtctccgggccgcggccgtctgcagagcgagcgctcagacggagcccccgggcaacttgagtggcgccgatcggcggcggagcctctggcagagccccccgacccggcagcgcggaggggactcgcgtccgtccgcgtcgcgtcaccccaaaccctaagcagcgccgccccatcggcgcggagctccggctggaggcaagagccgcgcgccgggagacacgcaccgtgagcggcagcgccgccggcctccctcctcgccgccccggagggcgaagccgcggctccccagccctttgctgcgccgcgacagcgccggaacacgccccgcctcgctgccgccttcgctgtgccgccggcggagggggccgcgagccccgcgccccggccggaggatgtgcgcccccgcgggccgcccagcctgagccatgcgccccaacggcggcggcgcgccggccggcatggagccccgcgcggccgcgctctgactcgctgtgcgccccgcggccggcgggcggcgggaggcggcggaccgagagccggagaccggcgccgcgggacggaagcgagcgggcgcgggcgccgcgcagatggcctgggcgagccaggtctgaggccccgctccccgaaacgtgaccatgtggattcaacagcttttaggactcaggtgagcgacccggccggcgccgggtgcgtgtgggcgcgtgggtgccaggctgggcggaagcggcgctttcctctatgttgcaaatcaagggacccctcttcgcttcccgcaagcgggcaacggggtgcaccggtagccggaaaggggcgcccgcccggagcctggagcagcaccgcggccctggcggggagcggccgggtctccagggttccgcgcgtccggggtcggggcagcggcgcccgccccagcaacccgggaagtggggccggccaggcgcgcccgcagctctaggagccagcagcgcagtgtcctggccggctgccccggcgcgcctcctccccggggcccggggcgaggcgccggccgctgggcgcggcgggcgcgggggccggggctgccggggaaagctaaagctccgggctcccagcgagagcttcgcaggcggagttggaggaaaccacagccaaacagccactccgctcccccttctcctttctcggggccccggggctgagcaggggcctcccaggctcccagctgccgacccagctgtttgcgggtgacctccgggcccgacgggcgctcacagctggcgggcagctggggcgggagagctggggttcttggggagctccggcggccaccccgctgtaaacacacacgcacatacgcccgccggcgcgcccggggcttgtctgtgtctgggactccagggccagatggaagagggggttcgagcctagagcccgtggtgggggtgtccagaaagacccttctcggcaaactttgccagcccgccggggttctcgggcttctctggcttctgcctggggtggcccagggcccaccagagcacagctgtcgtttttgctgggcaggctgcctctgagccctcgccctcctgccggggcattcaccgagctcgtgcatttgggtcccgggttggaaccgcgagcggggaggacagaggtggaggcggagagcagcgtgcggttctcgagtttgtccactgggatgcactgcgctcccgcgttggggacg

SEQ ID NO: 5138 - DNA, 573 bp, Homo sapiens
gcgcccaagaagtcggggtcctccctggccacgcgcctccgggggcgctcgcgctctccaggccctggctgcctgggcgccgattcccgggacgcgccggccgacagcaggggaggcggcagcagggaccgcagcagcccccgcttccgcacggcccgccgggtcgcggtgagcaaggcgggcaggcgcggcgggaggcgtccgacgcccaccccgggcttggcgtccccttccggccaccacgcggcgccgccccccgggatcctccagtccccggagccccgcgcgcccagagccgctcggagcgcgggcggggtcagcttgggcagccgcgggtcgctgctgcgtcggaagtctccgtcgccagggagccccttgggcgccaggtcctgggcccctgggcgaagtcgacgccagaacatgcttggccccgcactcagctcaccgcaccctcagcgcgcgtgggtggggggcgccggctgaggtggggagggcatagtccagccccaggccatagtgccccgggcggggcagcgcggtgcggggtgaacgccaccggcccggcggacagcg

SEQ ID NO: 5139 - DNA, 383 bp, Homo sapiens
ccggcccccatagcggctccgggccctcggatggcgtgacggcttgtggggcctgcggggtgcgctgcccccggacctgcggggggaggcggctgagctggcggcgctcgcgggcccagtggtgagtgcggcgtcctcacgcccagcccgacgcctccggagcggccgccgcgcaggggtgggcgcgggcttccaggagggagggcggctgtgaacgcgccttgctttccgcgcctccgcagtttcttgcgcagttgatgatctttataatcagcctcgtcagctccatcttctgtggacatctgggcaaggtcgagccggacgctgtcacgctcgccgtcacggtgggtgcctgatttcgcccctgtaggagccgacgggcg

SEQ ID NO: 5140 - DNA, 853 bp, Homo sapiens
ccgccccaggggcactccgtaggcgagatccctgcagatcctagctaggaaacgccagtgaacggcagcgcagggaacggggcggggccgctggcttcgcccaccgccgcggtgttgggggctgggggtggccctcgggactggtgtggagcctgggcctgacccactgacttggctgagtggggagactggagggtcgcatccggagctgggcccggggacgcccgctggtgggaagggtgtgcgcgcgtcggaggccgcggctgaccctgctccggcgctgccaggtacggcatcagcccggacagcatcatcctgtaccggcagagcatcggcacggtgcccaccgtggacctggcctcgcgctacgagtgtgccgcggtggtgctgcactcgccgctcacctcgggcatgcgcgtcgccttccctgacaccaagacgacctactgcttcgacgccttccctaagtgagcggcccgggcggggacggaggcggggcggggacggaggcggggcggggcccgggccgggcgctaagtctcacccgctccacgcccctcccgcagcatcgagaaggtgtcctagatcacgtcgcccgtgctcatcatccacggcacggaggacgaggtgatcgacttctcgcacgggctggcgctctacgagcgctgccccaaggcggtggagccgctgtgggtggagggcgccgggcacaacgacatcgagctctacagccagtacctggagcgcctgcgtcgcttcatctcccaggagctgcccagccagcgcgcctagcggcggccccaaccggccggacctcagcaataaggcggcccccggacctcaccccgcgccg

SEQ ID NO: 5141 - DNA, 1062 bp, Homo sapiens
ccgggatgaatgcagtcacggaacgcgccaatgcaggaggcccccaggacatcctgagcgctcgggagacgccaggcgcggcagcgggcacggatagcggaaaggggcgcgaccccgcggaatcctccggcagggcagggcctttgggtggctccgggtgtccagaggaaggggtgggctcggggacgcggagggaaactggggacgcggagggaaactgaggtcgcggaggacgcggccgttggcagctcgctgcgcctgccggccccgcgtgggccgccccactcgggaggacgcgggctccttttgtctgcagcgtccccgccgccgccgcccccgccgcctccccctctccctcccattttcgccgcggcccccgcccctcccctccccgccccctattgcccctcctccttcccctccccactcttctccttccctcccctcccctcccttcccctccggagcggctggggctgcggcgccgctgctgacacggatcggccgcggccgccaccgggcggaggctgcgcggcgcagacccagacgggcggccccggagggcgcgcggcgatggcggcggcgggcaggcggcgggcgcggcgggcgaggggtccgggctgagctgcgggccggcccggatggcgggcggcgcgggctggtcgggcgcccccgcggctctgctgcgctccgtgcgccgcctgcgcgaggtgttcgaggtgtgcggccgcgaccccgacggcttcctgcgcgtggagcgcgtcgcggcgctcggactgcgcttcggccagggcgaggaggtaagctggcccgaccccagtcccggcccggggaccccagcccagccccgccgcccctcccccagctcccccgccgggtcacccgcgtggcccgaggcggtggcctccctcccaatcccctccctccgccggagcccaggacctcggccccccccgggtatccctggcccagccgggccctcgctttccgccccccggcgcccgtgccccgagcgtcacgcgtcacgcctagggtggcttctgcgcccaccttccttcctcg

SEQ ID NO: 5142 - DNA, 918 bp, Homo sapiens
ccgccgcctccacagcgcgcctccaacaccgctgtctctgccccgcgccccagagcgctcccagctttctttcctacccttcccatgagtggagccgggcctggggcgccttaggcggtgacgatctgcagaagtctttgagaatgcaagatcttttggagccttcggtccgccagggccgggtccagtcaggacgccccgctcagaccccttcccagcctggggtgggcccaggcccgtctgcccccactgccttgtgttccaggagcccccgctcggagcccagacccggtgcccgaagatgagagtgccgcttctctccgtcgggtgagaagccagcccacgtcccgccggccaggcacggtgtctctcggggcgccccacgggaacccctgtgcctccatcggcgccctcggcggcggggcagtcttggcgctctcccctcgcccctggcccaggcccggctcgcgggtgtagctcttcctagggccccctcccctttccgggccgcgcgtccgccccgcatcgcggcggctcctcggcagtgtttgtttttattggacgcacagtgaccgtgacgggcacggggcgcgagctctcatcaccacaatgggtgtgcatggcgcggggcggggggcgctgccggcctcgagcgagggaggggagaggagggggtgcgcccgtgccctgcccgccccgagttcccgagtccgcgccccaccaccgcagcgagccgcccttctgggccgctcctctgttttcctttcccatccgttccctttgcctcggctgctcggagacatgtctggtggcgatcggggacccagagcccggcagccgctcctgtccctgtccctgcgatccctgtcccttccctttgtctccccgcgcagcgctctccgccgcggaaacttcgcg

SEQ ID NO: 5143 - DNA, 865 bp, Homo sapiens
acgtgcgcgcccgccggagaccagggatgaggtcactaaatgactgccccggccaacccccaccccgtctttatccgcaccgccccccccttaattgacctaactttctaaccctagctcttcgcttctggcaccggtcccctcccaagtctccagaccctaaccctggctcccgacccgccccgctacagcttgggaagcgggagaagcagcgcgcgcccttctgcggaccccctcccagggaagattgtggtgttagctgcctagggggaccagggggccaccgggacccagcgcaacctctgtctcgctccccaacccccggaagcgctaacagcacggttcttacgtaatgccgggcttctaagtacccccaacccgcacagcccccggggaggccgcgcagataccggggcccctcacagctcaccaccttggtgcctgaagccactttggagcccctaccgcaggggcggggaccagtgtcaatgggcagcggggcttggttctcccaaccagcaccccagaaagagggcccaggggcgggggcgggtggacagggagggaacgggcctgggtgaaaggggcctgtggagtttaaacccagtgaatagggtcctaagtgccgtgtcaggacgaaaagaaggcggaggtcttgggataggagctggcccgggggccgggggacgcctacctgcgccccgggaagcccctagctccgggcggctccagcgcagccgggcgctcagcgtttattgcttgtcaatcgctagcccggctcttaaagcggcaaggcctctccgcgagggggcggaggtccggaggagaggggaggtgaggagaacgcggaggccggcacaactcg

SEQ ID NO: 5144 - DNA, 408 bp, Homo sapiens
gcgctcggctgtcaggcaatccggtccccggttccccacggcggtctcctcggtgtgccccaccaagagcgacagggctggtgacccgaggggcgcgtgcgcggtcgtcagcctgggatttgcacggacccccttctccctagtacgctcgctcgggggcccctcctctgctacgccgctggggctcgcccgccacccacagccctcgcagagccctccgggcacaccgcggctggccgcccggggccaaggatggggcgggagcgcccacccacccccgcgccggccggggcatccaagaggcgcgctcgcagccacacggcgccccgcctcccgctccgaaaaagctcctgctcccctggcgcggtgtggcgtctccgtcagcccagccggattctccccgcttcg

SEQ ID NO: 5145 - DNA, 2245 bp, Homo sapiens
acggccccggggtctggcggggaggcccaccgctgcccagagggctcggccggccgggagggggcgctgtgtcctccccacgccctgcccgcgggctcctagcagcgttcgccgcgctgcaacgcaatgcgcgcccggctttcccctgggcagcgttcagtgcccgcttgtcctgcagggcaccgccgtctccctttcatcctggggctcccaggtccaaagggttcccagatccagcctcttgcctgaaccaaagtggccaggcactcagtttgtaagatgaacaaatgaaggaaagaaggaacgaatgaataagggctcatcttgcagagcgttcgcgtctcagcgcgcaccaggcacatcagtgccaaaggtgctgggggtcgggcccagcgcccggcgcggctggaatgggggcggcgaggagctcctcctagccagccgcagggcgggaactgcccaaacgcaggtcgcagcctcactgggttccgcggcggctccgctcagtagggaccgccctgttccctagcccccaatagcctcgccctcataaattcacctgagcaccctggcccaagtcaccccagatccctgggacttcccaggccccgacctcggccgggcgggaggctgatcctttaccgcggcccccttcccccattcccggcttctccccgggctgcggcggccgccactgctgccagcgcgccccgaggactgccgcaaaccccgggcgcagggaaaggggatcctggcggcgggacacagagagcgggccgggggaaggggagggaacggaggaggcgaggaggagctgggagggagccgaggggcgaggcgcggaggagggaccgaaggggagcggaggggagagggagggggaggaaggggaggggacgagctgggcgagggggcggggagccgaggcgaggagcggcgcggaccgtgggggaggtggcgggggcgaggccggcaagaggcggccgcgggccgggctgcgtcgggaaacggcggccagacttccccgggaaggggcgagcgagagccgggccgggccgggccgggccgcggggccgggaagcgccgagccgggcatctcctcaccaggcagcgaccgaggagcccggccgcccaccccgtgccgcccgagcccgcagccgcccgccggtccctctgggatgtccgtaggacccgggcattcaggacggtagccgagcgagcccgaggatgggagggcacccgcagctccgtctcgtcaaggtaacagcccgccggccatccctcgagcgctggcgcccccggcccctggcggacgcgggacggggctgggctgtgggtgtgatgggggcgggggcgctgggagagccgtgcttaggtcggggaaggctgggctccggggcagcctaactctctggacctttggagccagggttgggtaggcagggggagactcaggtgagaaaagaaatcgtggcgaagccgccgggatgttggcggaggagggggtccgcccacccgggtagccggctccgcgccaagaatcgctctaggctctcgggcagacgcctaggggaggggaggttccacctcccacgcccttcctgcagacctcggccccgggactggagactctgaagcggggttcccacctcgccccagcgcccccaaacagctccccgactccgcacgcccccgccctagtcttgggagcgcgtcctgccccttcccctccgcggcgagctgcgagtccggagagatgaatgccgcccgcgcctgcgagcccttgatcaatatcgcagtctcgggggaggagacggtgcctctggcggcagttcctgttccccgaccgcggctgggagcgcgacgctcgttctccgagcctgggcacccgcgatccccgcgctgcgcggccgaccctgcgacgcggatcgggcgctggagtttaggaaagtagccagaccgcacgtccagcgtctgcccgctgaagttcgtgggcggtgggggcggcccgcgggttgtgtgagccagggaagggccgggaggccggcagtccggcccgccgctcgtgtcaggcgtcacttgcagccccaagcgctttccagagcgttttggttttgcagggtataggcgcgcccgctgcagccggccggagaggcgggtgggcctctgcgctgctgccgggacaccccgcttcgcgccagtctgggcatcgcctcacccggggctcgggactccgcagggtccg

SEQ ID NO: 5146 - DNA, 2972 bp, Homo sapiens
gcgggccgcagccggagaggaacaggaaccgcagtggggacgccctggtccccgggcccacagcatccgggacggacgcgcagtagcgcgggccgggaactgggtaccagggcgggatgggtgagaggctctaagggacaaggcagggagaagcgcagcggggtgcggggaaccgcacgccctccctttgcctctgcttcccaccccgaggcggcagggcgggcgggcgcggttccgggggtgggcgggctgggcggggcggaggcggggccgcagcactggcttcacccagcctctcccgcccgcagccagagcgagccgagccgcggccagctccggcgggcagggggggcgctggagcgcagcgcagcgcagccccatcagtccgcaaagcggaccgagctggaagtcgagcgctgccgcgggaggcgggcgatgggggcaggtgccaccggccgcgccatggacgggccgcgcctgctgctgttgctgcttctgggggtgagtgttagccggagggggcccgctccctttcccgggatcagaactccgagaagagccgggcgccgccaccaaggaaacagaacagagcattggggtcccagatactgagggtgggtggtgggaaaggacctctgatgccgggaccacgaaggagggtctagggttcccggagcgcagaggcgactctccagggtggagatgagggcaagaccggagcacggatgccggtcctcaggtaccgcagggggcggtgggggagctgggaggggtctttcaagagggggcatggggctctccgatgcccaggttcttcggaagaggacactcgaatgccgggatcccgaagggactttcccctcagcatctcggtctctggagagtcgtgggacagaaccaaggcgagagaaggagggggaactggacggggactagagatgagaggggcgagctgggctggggcggggagcccgggacgacgggatggaacaatggaggaggtcggagggactggaggcagaggggacccggcaaggacaatggggaccggccagacaatgggggggaggggcgtcggagggagaggttggggagcgggagagaggttgagaagtgggttagggagggcagaagaggggcgacggcgagggcggcagagagatggaagcagaaggaaaggagacagagcggggcgcggaccctgaagtggtcggggtcccgcctgcccgctgagggacagtgagacgagaagagagagcagaggcttggacatttccagcgcctgtccccgcgctcctgctcgcggcctctcccagtcccggaattggggctgcggatctaaggctgggaggggagtgcccacttcgccggggcgaacccgctcccggggttcccccacggccggcgggctcctccgacgcgcgtgttctcacggcttgaagcagcgcagcggatcgcgagggacggagcgggtgtgcccctacccgggctggcggtggctacgtctcggggtgcagagcgccggggcgcactaggcggggacccttcctggccgcgcgcagctctggctacgcaggcgggaggcggcaggcagggggcgctgcggggcgaggcaagtgcagtccgccgctgcctgcctgcgagtctggggctgcgcgccgctccccacctagctgcgcgacccgagcgccgcgcccaccgcgctccgtgggctcccgcgcctcgaagggtcgggatccggtctgagcctctcctggctctcggtgcaagccgctgggcacctaacgagacgggggcgcccggacgcctcggattctgtagcgcggtatcccgggccaccgactcggcaaaggtcggcgggtcctccgggtggtccgacgagattgtcagatgtggcctgctttatggccatgaaccgaatgccctggaaggtctggcaacggaggaggcgtcttcactctccccgccagcatctttcatcagagcactgcgccccaaattccggctttacagatacggagactgaggctctgagagtttaaacgacttggccaagatctcacagcaagttgggccagagtcgtggctagactccccgacctgattcccagctcggtactcccccaccttttcagggggcagccgctgtcccagctcggggtcacggctgcgtttcccagcagggcggggggggttgacactgtccccagagtccgtcggcggtagagcctgcgggtgaggtgggcagagattctgtccgggtgcgggccccagcccgaaagctcagccccagttccctggagctgtcaggacctgtggctgcgtccggggatttgggagcgaccgcgggcacgtctgctgactaacgccgctggttagagacgctgctcagacgcgggtgggcgagcgtagaccaggagagcggggaggagggaccggatcccagaggggcaacgacttgggctccgggtctgggcaagagcgagggtccccgcgcgaagacccaaggaaggaggggagctgggcgtggaggacctgggcgcttgggaaggtgtaccccgacaggaacctgccgtctgcagcccctgcggctcccgcctccgcctcggcgcgcggctgctcggtctgggatggctgtgcgcggtccgagtttcttcctgggccgcggtgagagagagagggctgaaaccagagcgcgtcccggcgggtcggctggcgggccgcgccggtaatggaggcactttgtcattcagacgtctgtaaccagagccgccgggctggctaatgcgcctaatagggatggaacgagggcagcaaatgggcgtgcgtgagcggccgggctgagctgggtggatggtggatggggaggcagctccgcgggggacgggcccctaccgcactgttccagcccagtctggctcaagcgcctcgcttcttccctgggggaccgcgtggggaggcgggaataatcg

SEQ ID NO: 5147 - DNA, 1026 bp, Homo sapiens
gcgggcgagtggagtgtcctttagactccgcggactcgacgggagggaccctgcaatgcttaattagaaccggttgccatggcgacagtctctaggcagcgtgggctgagctctccgtaggaataaagggtgggccgccgctggaccctgcgcgcgcccgccaccaactttccctccagatccgagaggggcggcgcgctccgcccccgggccgcgcacgtcggtgctcggcggcgcgcacgcctgcgggagccctctccaggcaacctagtgctgatcgctcgtgccggtgcggccgttaaccgcccttgccggagccctaggctcaaaagcagccccttacccttcctgggcttcccccaacccctttcccggtctgccctggggcatgagcagcgatggccggctgcatccctgaggagaaaacttaccggcgcttcctggagctattcctgggcgagtttcgcggaccgtgcggcggcggcgagccggagccggaacccgaacccgaacccgaacccgaacccgagtccgagcccgagcccgaacctgaactggtagaagctgaggcggccgaggcttcggtagaggaacccggggaggaggcggccacggtagccgcgacggaggagggggaccaggagcaagacccggagcccgaggaggaggcggcggttgagggtgaggaggaggaggagggcgcggcgacggcggcggcagccccggggcactcggccgtgccgccgccgccgccccagctgccgcctttgcccccgctcccgcgaccgctgtcagagcgcatcacccgcgaggaggtggagggcgaaagcctggacctgtgcctgcagcagctctacaaatagttaagtagctgggcttggctggtggtgggcccgcggtccccaccgcgccggcctcggacgcggctccctcggcccctcaaactgctctcttttctgctcctctcccccgcacccgcgcctgccgccgctgaaagcgcccccgctgctcggacccgggcggtcg

SEQ ID NO: 5148 - DNA, 10207 bp, Homo sapiens
gcggaggcggcacagctggagcccggattgtggcacgccgtcaccgtgctgctccggggaatcccgacccgctccctgcgaaagcgtttccgaacgcgaacccagagcctgtgaacgcgccggcaagccccccactcccccaccgccgcccgtcgcaggtgggcccgtcctaggggtccttcctgcgctctaccccgtctctcaagtcactcagtcgatcgccccgttcacgctcccgtgatcccagacatccataaccacgatctcgcctccatgcacatccaacgcacgacggtgcacagacgtgcacctgacttctgcggaccaggtgtctcaagcgtacagcggccacccgcggaaccgcggcccggggccagtgagtcgtctgcagctccccgggttaggggattccccagaactccgggaaagtcacccgaagtccatccgggatgcggccttggttctcggccgcgtgatctcgcccttaggtgcagaacgacgcccttccagggcccacagctgccaggctgggccttgccctcgcatcccccgggaagaccagggacggggccacacaggccgtggctgcggagacgcttccccgggccaccccgcgaccaggagggagtcgagccgcccgctctccccgcgtcccccgccccatcccagccagttggccccaccctgcgcgggataattgggacgggagggaggcgacgggagggcggcggctccagagagactgcgcgcctgtcagcggcaatttgtttaagtggacgggacgggccgggccgctgcgggctggggtcaccgaggccgcggcccccaccccaaccagacctgggaccgcgggggagcccggtccggccgctaaaccgggctggctggcgccagggctccgggaggtgcggtccggcggggaagccgtgatgggaagcgactctgtccagggagtgtccttcaccaccacactcctcacgtccaggcagtgatcgacggcctggcggcaccctcacagcgggcccatagcacggggccacacacgtcccctgagcttagcctgggcacattcgtctgccaccgagggcttaagccagtctgcagcccgcgccccgtcactcggacgcaagtccgtcgtccgctctgccacgcggccgcacagcccgagcttcctgctgcccactgcccgcggggtcacgcaaccccggccctgcacacagaggaggaagcggcggggaccccctgccacctggaggctcaacccggggaaggtcccagcagtgccccttaaccctgcgagaggtgacggggccggaggacggaagggcagccacgccaggctcaggaccgcggccccacccggcccaggccgtccccgctcccgccccatttcactgttgcgggaagcgcggggcgcacagaccgcgcgccaccagcccaagcccgcccgacgccctggccggagaccgcctgcgagagggaggggcggccgagcgcgcgtcccccgcctgtctgcgggacctggccgatgcgaagtgacaggggccggagctttgttgtggagcctcggccgcctggcgccagccgcccccgcccgcgccctccccctccagccccgggcggcccgcgaggcgccccccggggcctcttaaaggaacacgcacactcggcccccggggctccgccaggggagggggttcctgggaagggggagggggccggcctaggtgggggaggggcccagcggaggcctcacggcgccgctccagggcctcccaggcctccccagcgccagctttcggtgagcctcgggcattcctagctggagagtttggctgggggtcgctacagactcttcagagcggctgcagcaggacctcagggtgatcgcgggaccgcggggcggggcgagtggtgggatcctggcccggacagagccccggaaagccagagggaaggtcggtgccactgtaggtggggtcgccgtccccagatgcagccgctgcactgtcgccgccaggtttctcggtcaaataacccaggcctgagtgtttcaaactcttcaggcctcggacccctggaccagctatggatggactaatgaaatggactaatgtctaaaacgcacacatttagatgtacacatactcttacaaggacaaaagtatgtgtctacacacacacacacacacacacacacacacacgcgcgcgcgcgcgcgcgcgactttgcgaatgtattcacggattcctaggccggtacctgggttcccggctaaggaaagctgccctggttattatctggtcacctcaccggctgcgcaaacgtgtccacaacgggtccctccccgagaggccacatctcgcctaaggtggagccagcaggtatttgcctgtggaaaactgcagtggatcctgccccgtctgcgtagactgcgcagctcggagtcaaagattcgttctggccagagaggaggtactaagagaggtgcgacctagccaagaacgaggtcgtggagaaaaccctgtgggggcggcgctcacatatgcggtgatgaggagttgtgagggccctggggtcggccccgaaaagtagggataacggtcgcagaggccatactgcttccgccggtcccgaatccgcactgccaggagagatccggccttcaaacgctgctcccaacgttcaacaacgaagtgccctgcgaccggtgtgcgcagtgggcgggcgcctgcatgggtcaatgttggatgtacgcgcccaccacgcggttgtacgggtgggaatgtcacccgtggctagtgcatgctctgtcttttccttcagaaaacgaccttcaggaatcagcctgagtgttcgcgcccgagcccgattggaagcaggtgcgtggtcgcttcactctccccgtgcacaccttgagttatagctctcgctgcgcacagagggcaccacacggggcccgacacacacacacacacacacacacacacacacacacacacacacaccatcacttcatgggggggaaactgaggctgccggaagacagaaaacgaagactgatcacagaagagggggcttcaatcacaggtgctcgcagacaccccaactccctcacgcgttactcagcactccttaacttaggagacgtgcgcttccgagagatgagaagaaactaaaaaagtggttggcagggcgaagagaggaagccggtatttcggaagaaggagactttcgtctccggtaccggatagggcgaaaattcgttgggtcgcgggtggagaatccggggtccgcccgcgcggtgccgccctgtgctcagcgaaaggtgcgctcaccttcctggccccgaggatccgctcctcccggccgctggaaagctcagggcggggcccgggcctgcggagaactccaggttccttccgagtcttccggtgaaggcgggcgcgggtagggggtccccgcgtttccccagcgcaaggccgcgtcccgctcccgcccgcgccggccccagcagggctcggccatggctccactcaccagctcccgccacctgggatccgctcccggacctcggccgcccgagcctcccgactcgcccgcccaccggcctcgctttccagtgcctgctgtctctttccggggcgcagggacccccaggcggcgccacgacccggagctgggtcggaggccaggctggggctcgggccagagcggccgggcctctgggcgcgggagaaggagggcgccccctctccgctcggggtcgtgtcaatgctttgcacttggggccggcgtgcggctgcgggtccttccccaaggccccgggacccgggctcccctcgcctcaggccctttcggcgggtcaggtcggccctccgcgctctccagtccggcgcaggcagccgcaggcgcgggcgggcggtgggggccggggcaggaggaggggtctcggggcccggcggcccgtcattggttaatattttattctgttgacatgttttcttactgctgaggcttccgacaccttctcccaggccccccctcccggccggagcttggcctgagctgtcaaaaccccgcccccggagacccacaattggtccaaaaagcgtaaaatcagcaatcaaggggggcctggctcgttagcgcaggggatccgagctgggcaggacatgtgagatagtcacagttttccagagatcacgacaagatctaaccagtcgcgcgtggtccccggcgccggagcgggccagctcagcccggcccagcccggccccgcgcagagcccccgccgcccccgcgcacagagccgggtgccccttgcggtgcgccggacgggaagccccgaggagcagctgctgcgcccgccacccgggtcgtccgtccaccgcgcgcgccgccgcccgggccgggggtccgagccgcgcgcccccggccccggccccggcccccgggcgcctgggccggatgtcccgatgagagagccggcgctggcggccagcgccatggcttaccacccgttccacgcgccacggcccgccgacttccccatgtccgcctttctggcggcggcgcagccctccttcttcccggcactcgcgctgccgcccggcgcgctggccaagccgctgcccgacccgggcctggcgggggcggcggccgcggcggcggcggcggcagcagcggccgaggcggggctgcacgtctcggcactgggcccgcacccgcccgccgcgcatctgcgctccctcaagagcctggagcccgaggacgaggtggaggacgaccccaaggtgacgctggaggccaaggagctgtgggaccagttccacaagctaggcacggagatggtcatcaccaagtccgggaggtagggctgccggccggctggaaggcgcgcgggcgggcgggcgggctggggcacgggactgcacggatcagagcagagctggggactcccggctcccggctcccggctccaggttctggccctgacgccacgcttcgctcccacggacaaccaagttgacttttctcgtttggcaccggagcgatttttttttaaaacaaaaacgctaaaatcctccgaatgaaataaaacgaaaacatactgctaaagaatagccccaaccgttctgagtcccagcgcagaggaggccccgcggcttggccctggcggtctcctccgccccgcgctctcgctcttctgcgtccgggtccgtctccgagctcgggggaaattcagcctctctcagactctgctccgaccccgaagcccctagtgggacctgggcccagctaaccccacgctggttgctcggttcctggcagcgagccccgggtcagccgagccctccgcctcaccgggctgggagccctttctccaccgcgggcatccgagccctggacgcatccgccgccccaggccttaaagcctgaagaaagccacagccccggcccctccacccttcgactcagccaccgagaatccaggcctcgggttcaccctcttcccccgaactgcacggccaggatgtcttatcaggctctgtagcccagttcccaatacaaacaccctccagatttatttctgggagcttccgtcccaagtgggtatttcccctgaacgaatttcggggagattaaggagaagcgagaatatttctagagggcctagacttctctcctgggcatcagctttcatctcagatcagggagaaagagggtccccagatctgagcacaaggcctaaaggaggctgtttaggagagggtctgacaggcagaaatgggatctcctgggagcaacaaccacaggtggggtcgtccgggcagtgatgagagggcagagcagccgaccacaggggaaacagccaggcggcagcggtgtgcgcaacgaggagggataaataaaggaggagtggggtcctggaacctagaacagccggttccaatgggatctcctcccttccctccctcccaggcggatgttcccccccttcaaggtgcgagtcagcggcctggacaagaaggccaagtatatcctgctgatggacattgtagccgctgacgattgccgctataagttccacaactcgcgctggatggtggcgggcaaggccgaccctgagatgcccaaacgcatgtacatccacccagacagcccagccacgggggagcagtggatggctaagcctgtggccttccacaagctgaagctgaccaacaacatctctgacaagcacggcttcgtgagtgttggggcagggtggggacggtgcaggagcttgttgacccagcactgcagctgagcaggagagcagggcggcaggatctcccagggggaagcgctgggcaaacccccagagtgcccctgcccgggtcactgccctgtggtctacgtgggctgggcctgggcctgggccccagcgctctcctttgcaagcctgggaaatggtggggtcagtggctggcagctcacaatctcagttcctcaggccgtggagggtcccttgtaccgtcaatagggaggcaggtgctgccaggactgggtctgcagtgctggaccacggaggtcaccctgctcttggcctgtaggtgccgagcttggaagacctgcccatgacctcaacttgtccatcacccttctgccaagacccgcgtccctggccctcccccaagactaggggatttaaaagttaaaccaccctccccacccacccccccagcctccctaagacctttccctcctcccacaggcagatgcccaactaggaggagagggtttgggggttctctccatttatgcctgagcaaggccccagcgaacgggggtggtgtttcatagggtaaaaggaactgcccattctgaggtagggcagttggtgagcccccgaaggttggaatctcctctttgtggggttagggggtttaccagtgccagaaaggaagagagtgttaagagtggaattgtagggctctgttttgttttattttgtttgggtttcttttgtggggaggggttgttttttggttggtttttttgttttgttttttgttttgttttgtttttgctctgtctcatttctgtttccaactgggaaattttttttaatggcaagagaaaaagaagctgtgaaaagagaaaagcgagaggaaaagtagaagaaaaagaaataagggtgagaaaagagcagagacaggagaaaatggggaagaggaagaaccgatagagagagagagagagagagagagagagagagagagagagaaagtggagaggaagaggtcaggtacccaaagaatagaaaagctcgggccggggctggtggctgccggctgacccccaccctccccgcagaccatcctaaactccatgcacaagtaccagccgcgcttccacatagtgcgagccaacgacatcctgaagctgccttacagcaccttccgcacctacgtgttcccggagaccgacttcatcgccgtcactgcctaccagaatgacaaggtgcgcgcggcgggcggtgggctaagcccctgcactgacgcccctcaacacgtgcaggcccaaccgtccgttcatcgcccctcgaagccccctgcacgggatccgcgctcttgcggcccgcccccgagcaccgagcctcgcatccatacgcgcagcactcacggaagtcctcaaggcgccctctcaatcccaccgcgcgcacacacaggctcccctggggcgagcgaacagctgggccgtcgttctgatggagatgtttacttaacaattagctgagactccgggcccgcgctgacatttttacattttattcgtttatttcttggctcaggaatgagaatgtaagtgaagagagggcgcccgaggcaatctgcccaggctctaccgatgctcagaacccggggcccagttttcactctctcggggggagccagagggtgggacaggtgacacagccccccaaagcactcctggctactgctctgggtcagtctaggccccagaccccttgggaggcgcttagagaattaccttccaatcaaagggctttttctgcttgcggcttctccacccttgttctagtggggcagagcatcacccctctaggcctgtgcccttgtgcgccactgtcgagtgaaagagagggtacgagtgtccgtgccggtcgttgtggctttgtgaaccaaggtgtacgctgggctgtgcgtgccccgtttggggtgtgttggatacctgtggaggcatgtgaattcgtttggttccgtaggcgtttgttatgtctgtgcacacttgcgtgtgtgcgagcccgtgagtgtgatttggctttgtgtgtacctgcagccttgcgtgtgaactgcagtctctgttcgcgcctgctcgggtgcggagtcgtttaacttgcgcaagcccgcgggcgggtgtgcatgcttgggctggttccgacactgtggcactgctttaggcctgtgtggggctgtctaggcctgtctagggataattcctcgaatgaagcttttggaggacagaccccgtcgctttccgcgaggccctcccaccggcctcagctcggggcgtcccatcccaggcgggtgggtaccaagtggacgctccccgggtcttccctctgcggccagcacccgctgacctcggggtgccaccgaccacgctggaagagccacggcctgacttagcgccgcccccttggtccccgcagatcacacagctgaagatcgacaacaacccgtttgccaagggcttccgggacaccgggaacggccggcgggagaaaaggtgagaggccgaggacagcagccctgtggcgggtgcccgcgggagcagcgagcaggagggatggagggatgggctccccgctgacctggttcatccgctcatccccaggaagcagctgacgctgccgtctctacgcttgtacgaggagcactgcaaacccgagcgcgatggcgcggagtcagacgcctcgtcgtgcgaccctccccccgcgcgggaaccacccacctccccgggcgcagcgcccagtccgctgcgcctgcaccgggcccgaggtgagggtcggaccggaggagggacagggaggtggcggcggggggtcctcaggtcgctgggctggtcttttgctgagccacccgctaacctgaaaggccaggaaggaaacgtcggcgagtgtctgggatggggtttccgtcccgggactcccctacgagggcggtccccggtagccagaagatccggccggactccgagcctggccccttgggcgccgtgtaattctatagctgtagggtttcctctccagggctgggttccttccactgtaaatctggggtcttggattaggtgacctgcagctgccctttgcccgactccagcagctcctccgactcggcctccccgagagcagcccttcccgagtgtccctgatcctgctcgtcggcctccgcccaggcccctgtaatccgcgcgccctctccccgcagctgaggagaagtcgtgcgccgcggacagcgacccggagcctgagcggttgagcgaggagcgtgcgggggcgccgctaggccgcagcccggctccagacagcgccagccccactcgcttgaccgaacccgagcgcgcccgggagcggcgtagtcccgagaggggcaaggagccggccgagagcggcggggacggcccgttcggcctgaggagcctggagaaggagcgcgccgaagctcggaggaaggacgaggggcgcaaggaggcggccgagggcaaggagcagggcctggcgccgctggtggtgcagacagacagtgcgtcccccctgggcgccggacacctgcccggcctggccttttccagccacttgcacgggcagcagttctttgggccgctgggagccggccagccgctcttcctgcaccctggacagttcaccatgggccctggcgccttctccgccatgggcatgggtcacctactggcctcggtggcaggcggcggcaacggcggaggtggcgggcctgggaccgccgcggggctggacgcaggcgggctgggtcccgcggccagcgcagcaagcaccgccgcgcccttcccgttccacctctcccagcacatgctggcatctcaggtaaggcctgtgaccccgcggcagcgccagcgagggagaaggcccagggagctggcggcgaggccagcg

SEQ ID NO: 5149 - DNA, 2392 bp, Homo sapiens
ccggaccccctgcccttccggtgagccgcccctcctttgccgtcgggtttccctccctcccttttgcccagccaaaacccgaacccaggcgccaggggagaggaccgccgttctagcttgccccactgctgggggcacggagttcttgctcctccaaggctacggcccccgtctccgcggaccccgcccggactccccctggccaccgggacgccccgccccctcccctccgcagcaatctcttacactcgggctgtgaagttcggggtatttttaggccggcgataaataattcatagggaacgtggcatcaggctccccccgcgggaggagggggcgcgagcagcgagagccaccgtcacccgcggctcaaggacactcgcgatgcggcggcggcggcggcggcggcggctccgggcggggacccgcgccacgcctcctggcggccaagctgagcaccacgcacccggcgccccccgccccacgctgccccccgccggcgtccgcggctccggggcccccacccccactcccccaagctgggtcgtgaccccgagtcccgcagtggggggaccaagccagcctggcaggcggccccagtaccatcccaggcccgcccgggggccctgggcgaacccaggtgtcccggacctgcctacctgcccctggcacgctcttattcttcgggagtttagaaacaggctcaaagtcactagcaccgccaagacctggacgggctctgaaatacagccagcggaatggtaccctccccaaataagtgtctttcctcgattttcctgtggcccggggtcagggactgaactaagataacgccaccatccgagggctgggggaccgagccagaagtccccttggacgaccagggctgggaaaccgagtggacgaatggggtgggcatcagggcctggcgggaattcccgtcttgctcacccagcagctccttgcagggtcgcgggacgcacctgggggttcaggttgccgggtgcctttgctccgcgtgtccccgccctgcccgcgtaggcaggaaacaggagactcggggcttcccctccccgccgtcggggatcctgggcgaagcccccagagaccggcgcaggcggctggtgcgcagccagggcccagcgccaggtcttgctcgcccagtgccctctctgcctacccttccctttgcgctctggaagcccgggagccgggcacgggccagcatctgcaagatgccactactctggaagcccactccgattctcccaggtcgcaggaaggagagagctaggctggggcaaaggagatggggcagagctggaaggggaagaagcgggactcgcggcgggggaaggggtctgggcgccgaggcgagtgcgcagcaggtgcccagcagacctagggaaactggggcactgggctggggagccgcacagccccctttcaccttctcgactcctttccaacccctcgctctggtggatcccagccccggcccccactcccggccctgttccccgctctccgccccggcggcttccagcagcaacagtttgggtccgcggcagcccagactcccctggtcccgcggtgctgccgcgccaagcgaaggaggaggagggctcggcgaccctggggacgaacgtcttggacgcttcgcccgcgtccttctctcgcgtccgccgcgcgcctgtctgctcggcctcttcttcgccttctctccggccgcccgggtcaaaacccaaggccaggttcttgagggtccgggtcctccagccgccccctccttgagccccgagagtcctgcgtgggtccaaccccccgggtgtcccgcctctgtctccgccgtccttgctcgcgcgccgcgggaacccagccccaagttggcggcgaagttggtgcccctcgcccgccgctcgccacttaccgaggggaaggggcgctgcgcccgcgacgagagcccgcgccggccgcctccctcgcggtgtctgtcccagagcctcggccccggagggctggcgcgctcagtctcagctccgcgggcgccggagcccgggcgcggcggggcgggggcgggggcgggtggcgcggcctggtccgctggccccgacccgcccctgcgccccgcgaccctcccgaggctcgcacggcgcccggctccgtcccgggctgggctgcgcaccgcgcctcctgctcccagagctcgcagccgactgtgcgggagctctcaccgccgcccgcgagggcccgccccgccggggcccgccacctccgccccggcccggcccggcccgctgcccctcgaggcccctcccgccgcattcccgggcccctctcccctctccggaaccgcgtccccagacctgacactcggggcaagtgcgcctcg

SEQ ID NO: 5150 - DNA, 564 bp, Homo sapiens
ccgaccccctctcgtggtcgccagggtaggggtgggaggaatctggaagccacgtgcgatgctcggagctgcgtcctctgtcctggggcgtgggtccgcgagcgccgcgcagcctcccggaccgccctgagctgctgcgcccggcgctgctcctccttccccagctccgcgccttcccctcgcgatccccctcctgcctcttcggtcctggaagcgtcccaagatggggtgggggcatggagggagagaggggaggagggagctgcccgggggcagtgccgccaggaagtgggacggggactctggcgcccctccaggctgctgcgcgcgggctggggaccgtgcaccgctttgcgcgccagacgatgcatcttctggaacggcagctgaggcaatgcggggtgtgaagtggcggcgggcagaggggctcgcaggggctgggatccgcgtgcccctctctgcctcggtgcggagcacgatgtgcccgggcgggggcgaggacgtccgggaggggctgggctgcgcacgctcgcggggccgtcgcagatgggcggtttggaggcg

SEQ ID NO: 5151 - DNA, 3277 bp, Homo sapiens
gcggctgtactgctgcggggtgcaagggcgggggaaaccacaccgttaggcgaggcgcggggaccgtgctggaaggcccgcggcgcggtcccctctgggcgactgcgggggcggcctggcagggagctggggcgagtggccgccgcggggcctcgcaggcgcggggaggcaccggccgggcacccgcgcggctgaggcgagggcgggggatgcctggccgggtagggaacggggtgggggagggcagaggggcgagcgagccggagggggaaccggagccgagggcgcgcgcggacctcgaggttctccaggcgggttttgagcgattgcaaagtttgcccgagttggctgagcgtctcggcggccggtgtccgggacaggtcgcccatggtgttcttgcccgagccgggctgcttgcggccgccgcccgcccgggcctcgccggctccggggtccagcgtgctctggctctcgcagcggcccagcttggcggtcagctcgcggatggtctccttctggctcaggatggtctccttctgctgcagcaccgtctcgcggagctgcagcacgctgctccggagctcctcggcgccgccggcggccacggacgcggcgcacatgtcggcgtccacgggcaccgaggtgcagatgaagcgcgtcggcccgaaatcctgggccccggcgcccaggaggcagagggcgagcagcgcacaggtgcgcgcggcgcggccggccggcatggctgcgggcaccgggcgctccgggcccggctcggctcggctggggctcggctccggctgggacccggctcgggctgtggctccgcgagcggcccgcgctctgggcgccgcgctcttcggccgcgcggtccacaccgccgcgctatcaggcccccactgccgcctgcgctgcggagcccgcgccttttatgccgccgcgggaggggcctcgagccgccgacgtcagcgggggaggaatcccgctttaattgtccgcggcccgggcccgcggcgcggcgggggtctcacgagcgcgccaccggggctgcctccgctcgcgtcccccccgcccttctgggagctgccgcggccccctcctcccccgcccccgcctgggccggcgctgctgccccgaaggctccgagagctcagggggaaggaagtcgggctccggccccggactcgaggatggaccacctgcgtggtgtccccgaacctccgacggggctccaggcgggcgggaaaccaccgcgtccgggagatagaattcggttcggccctcctggctgcactgaacacccttgggccggggtcgtttggagccgggctgggtgcccaaggacccaggtcgtcaacacccgagtgcccggtggtcaacggctcggagtggggcctcgcggcgccactaagtccagagcgggggtcaccgggccgccccgcgtttcttagatgtccgtgtgctattgagaagccgccgggcagcctgggtacagggacttcccacgggtcggggcccccggcgcctcccctcccccagctcccgggctctgtggacccggccccgtccccgggggactgtcagtccccaccccgtgcgggcggggcgctggggacttctcggaggcagacctagctgatcgagcctttcctgtccgcggcgccggcccgatcgcgggcaggcggcgtcgccggggctggacgttcgcagcggcgcttcggaagggggccccgcgggagcagccgcccgcgtctccagcagcttccccttgccaggcgccgcgcgcgcccggtatccccgggtgtccacctgtgcgtggggggctgtttcccgtctgtccagccgcgcccacttctcaggcccaaaggccagcaggaagggtcccggaggtggctgggggcgtccacctgagaagctccgctctcgctcagacaccccacccggcacccgcgcactcgcgccttcatctggaccgcggggctcggctcccgagatcgcggtccgggttccggcgccgggctgggggctcaggaccagggctggcgcagccgccccgccccgccccgccccggggctatcagagcggtcaaagcctcggaaatccctccgtccacgctcccgtggtacagagaaggaaactgaggctccgagactgcggggccgggctacagccgtggccccccgacccctccccgccgcccccggcttctctggtctctgcgttctgcagcctttccctgcgcgcagccgggggctgggggtccccagccagcagggacccacgggcagtcccgggtgccgggatcgggcgtccgcccctcgggcgggagcagaggccggctcgatggagacctttttgagaaatggcggcctctacccgccccccagcccccgagcgcccgccgtctgcgttcagcatctcagcttttaagcctccctgagccggggctgcgttctcgttgtctccttcggccgccgcttcctggcgccagagggaccccgcggcccgcacgggcctgtcctcggctccgctcggagggtgtgcgggttcccgctccgctggccccgcttgcccaccacggcgcgcccaaacccacgcggcccgcggccccttgcgtgctctgccgaccccgggccgcaggaggggttagcctcgccggtccccacgcggggtctgcgccggcagcgccacgggctggaacgcgcctcgggagaaattacccgcgcggggtcgcggcgtcttctgccccaactcccgtagggagccgctaggcgggtgccctcctggccccagcgctttggcctcgccgccctcccgcacgcgtccagtggggaggccgcgcccgtcaggcctggagccggaccgtgcccagccgagagcgcgcgggcgcgggagaggagccctgccctgcccagggcaggctgtttagacggggcgggaacccttagcctggccccgcgtctctatccccagcagccgtggagccttcctagccgcccaaggccagggaccctgcctggcttttcctccagggcagcagatctcagcggcctggcacctcggcacagaggagcgtgtcccccttccgcagaggaagggagtggacggcgtcagaaagggaggggagcctggggcggtgtctggggctagcgggacctctgggcactgtggggccccaggagaggagaccctcgggtccagcctgcaactgttgtgcaggaggcgctgggcgggacacctgcaggcgctgcacacacacgcgagggccaccatgccgcg

SEQ ID NO: 5152 - DNA, 5692 bp, Homo sapiens
gcgcgtccccgcagcccgccggccacgcaccgcacgcacgcgtcctccccgcgcggggtggcggccggcgggagccacgtggagcagccgcggtgcctccggccacgcctggctcccgatgccgcgaagggggtcttggggcaggccccgctccccgaagctgtcgctgcggctcctgccagccgggagacgacgaggggaaggggtgggccgcgctgggccttccgtccatccgtccttccccagctctgcgggggctaaatccgtcttcaacaaacctcgcgaaaaagccgagggggggacgcgccgttgctggagaataggtcagaagtgacagcagaatgggccgctgagacccccgtccccgccccggtcctccgtcggcctggcgggcggcgacgtggggaggggccgctcagaagccggggtcgcccgggccggggaacttcctcgcgccgacgcccactccccacgggccgcactcgccgaggggccgaaaggggctccagtggaggacgcggtgggagctgggtcccgctctagctgccgacgccggcggtgcccgggtctccgggagcgcagtttttggcacaaagtagcgccgaagaccctgccgggtgtcccgccgcggctgccgctgtgcccgcgcagggccggctcgtgaatgcgtgcgggggctttcgagggcgcttcctctaccctgcgcgcccgggggagctgtccggtcgccgccggcaggcagaggcttcgggccccatgggtgcccccgagaccccggatcgtgcgctgagaatgtcgacgtttcaaacgagccagcagagcgggccggagccttggtcgggaaccggcgccgcgtgcgcactggccggcgaggcctctggcccgccggggaaggagcccagagcgcctgtctccccggtagaaaccaacacacacaaataattatccgtatttcccacactgggggattgggagtaaggagcaaggataggggaggggacaggatccaacccgctggttttttactttaaaaattatatattttatgtcacgatcgcttttcgttaagaccacaaacatccaatttggcttggcgtaataaaatcagccggagctcccttaaacggagccattccggtgaattaagttgtgaaatctaatctattatatccataaaggagaatgctttcattgtaaattcaggttacaaagaaactatacctgggccgccggcctccctttcggatttactacttgaaggcttatcaaattacttcaaaatgctgggctaccccctccatatctcatggcaacaaaaattaaacgtggcaacatttcttttaatagtaggaaaggtcaaaaacaaccgccacaacaaggggatataatttttaaaagacatccttccccaccccgggatgtcttctccgcgtttggaagcgcccttcctattttcccaattaattcgagtttttaaaatatctaaacgcgccacgacttccttcaggttctcccccgctccacgaggcgtctgaggcgcagctcccggatggatcgcacgtggggccgcagaccctgggcgcccggacgtcagccggaggcgcggggatctcgtggctccgctgcgaacctgcgccccaccgcggcccgcacacctgggccgagccggggccgcctcgggagcccctcgctggctcctgggcgccccactcggctcagcaatgtccgggccagacaaaggagtcgccagggaggggttaatccgcccctcacccttctccgtccttccttccgcccccttctcaggcggcgcggaggagagaagatgcggcccctaataatgtgtttggtttaacctgcggggtgtgggtatttgctgcgctttcttgggtgagggttgggccccttcccttccaccttcctccactcctgtgcatgataccctggctggggcctggggcgtcctgcgctggccagaagtcagggtcaccagggactctccgttctcgctcccgaagaggggacttgcgcggacggcgaggaggatcgatgcgttcctgagttcccagggaaacgaggccgcggctgttgtcacgtcgcgaggaagatttatgaggcgcgggccgagcatggcccggcccggcggaggccgcccgcgcacccaggctaatctttgatttccatctgattattttttttttcctgccatctccaagtcggcgtccggaaaggcgaacaaagggaggaggatgggggatgggggcgccaagcggtggcgagggctcggtccggcaaccttcctcctcagtgggggcccttgggcgccccaggctcgcgcccaatgcggggcccaggagggcgcagtttgaaaggtgaccgggctggggctgtcggagacccgctctgcggggtggcccttctagccgctaggcccacgacaggacttctagggaggggtccctgcaaatgcccttgggcgaagagaggacggaaagaatattctcccttaaattgcaattaagggtgtgcggggcgggggtgcttggggggtgctgcggcaggccgggttcgctcaaccggaggcagcagctcagccctgggccgataaggccgagggaaacgggatttctttgcttcccgcacggaaaagatccatccaagcgggtaagagggaagcgaagcttgcattttttatgttgaaaaaaaaattcaaaatggaaaatcattttattggtcaccacccataagtaaactaaaaacagggataattagagtgtggggatttggagggaccataaatctgcggcgccttttccactggaatcaggagcctttatggcttgttgttttattttgagagaaatgagatccctggctttggtgcaggcgggtgtgcgctccgagcgtctttcggcgggggggaggggggagcaggaggggcgaggagacttgcgcagtcagggagccgcgaaccccgagtctcggtcctcgaaggcggcaggagaaaccgcgcgctgtgccccgacctctctcgccctggccaaccgcgacttgggacgagctggaggagcttcccccgggctccggacgcccgcgccgaaaaccgggccatgggtaccaaacccgactctaggcggtcattcactttgtccccacccaaactctgatgagctatttgggagtgcgcggggactgggaagtgagggacttttataacattcttctttcgactccggcttccgagcccaccacccatcttgcctccttcgcctccgccctttgttctaaactggggaggggggaggggggagagaaaaggacacaaaatcaccgcccccccgtcaaatccttaaatttccaatcttccgcaaaatggcctggaatccatttcactccataggggttctatcccccaccgggtggaggccagctttccaatctcccacacaagcaggatcctttcccacttctgaaagtcttcaaacccagtcaccccaaatgcaaacatcgtgtgaaaccccattaatcaggtaagaaagtagggagagctctgactcagctgcctctaattttgggaggagaaagagaaagtgagtttctctttcatcaagtaccccaaaataacagcgctccttcccttcagcccgctccaaccgcagccttgcctttgttgaaagacccctgtccttcctaggaaggggggcggggaggacaggctcacattccgaagagttctgtccccaaaactgttcgaagattcttttgtttgacgtgcacatgggggaggggaaggagcccgctcaggccacccggcctcctcggaccccgctcaggccacccggcctcctcggaccccgctcaggccacccggcctcctcggaccccgcccaggccacccggcctcctcggaccccgcagaatacccccaaagcccatgggcgtctcctaaccgtgtaagtccggggctccgggggctaggaggggctgctccaagacaagggaagctgcccgccagattggggccaatatcgggctttcccaacccaagcttcctccgaaaacaaccccctcaaaactgagcatccctactagaaaaaatccgcattttccaggaggacggggtgggagagcttcggggaacaaagcccggtcctcccagctctgaggccgaggcagggcgcacctcctcctgggcgaattcaatcggagctgcagaagagacaagcatttccaaactggcacccgctccgagcccaaggtgagggtggagaagggtccctggtggaagctgcaggaacactttgggccggggtctaccccgcgttcggcggctccccgaatcccgcagaaagacacgtttgcagcgaaaggctcttacacaccagccgggattttattcgttccctaccgagagtgcgctctgggagcgcgggaaacaaggaaaacgcacgtacctggcggcgctccgagggcggcctcgcgggccctccgctggcgaaggcccccagaagccactccccgcccggctgctcgccccacggccagtccctccctccccggcgacgcaccccgccgagccagctcacaggaagcgccaggagccggagacctggctcgcctttccgggcgctgcgtccgtcttcgaccgccagggcccgcgtcctctccccggccacggcccaccagagggaccccgcggcgggtcctggctcgggcgcgtccttctgcgtccgagttcccaggttcccggccgagctgcggagacggacgcggagccctcggggaagacgaggcggcggcggccgccgtccgggcaggagccccggggcgggaggggtgcagggcggaggagcgggcgggatcccagcgccccgcgccccgcggccgccgccctccggggcgcccagccccacccacgtggaaccgccccgcccccgccgccccgcccccacgagggaaggcacccgagcctcgccgcacacccgcgcctcccggtcccgggcccgaaacaccgcgcccctcccccagcgccgtgctccccgcctctccagcgcgcggctcccgcccgacccgcgcgcccgcccgacccgcccccaaccccgcccaatcaccgccctccgcggctgctccctttgtctgagcccccggcgcaggccaatggaatcacgcggaggcgcgggcggcttggccaatggaaggcccagggggcgtggctggcgggaggggctgcgggcggccgggttctatgcgctgagacccgagactgcgtcgccggcgggtgcgcccaggtcgcccagctagagccggcaggatcccgccgccgggttgtgggtttttgactctccctccgctgtcgggagaagcgcctgagtggggagggaggtgggaggaggtggccccgcgtcgggggtgcggggagcgggacggcggcttggatggacacggtcagccccgggccggagagggttcggctcagagcagcctgggttctgttcagagccctactgtgcacgtttccgcgaggatctgcggagagacgtgcaggcgacgcaggccccgggaaggaaggagggtacctgggctcggacgagcgataacgctgtgttctgtgactccgtacaaacggatcctggagtccagggaaagcgtcccaggcccccagcccgggcagggttcgtgggattggcgtccg

SEQ ID NO: 5153 - DNA, 7937 bp, Homo sapiens
gcgccgtctgcgaggggcgccctgcgtggacccggggcctcggggcgcgtccacttacccgagccaggagagactgggccccacggtgttagccccgcgctcgggctcgcgcgccgcttccagctcgcgcctcctccatccccggagggctccgcgggtccccggcgacgggtccctgcccagggtccgggaaccttcccctcccctcctttctcaagcgccatttctccggagccgggccggccgtcctcggtgtacgcgggaagcgggcagcctccgcctgcacccgcggggccgggacccggaggcacccgcttccccgacacactcgctggggccgctgctcgctgctccagcctcccgaggccacggcaagagcccgggggtcggcgccacacacccccagccggcgaccgcgcccagggacctaattcaatcgcccccagcctaatgaatagccgcgcgctaatcggatctccgcgcgcttcggggatttacgcttcccggctctccccctcgtgccccgcggcccgccagacgtcgcttccgaaggcgccggcctggggcctggccaggggctcggccgcggggggtcccggccgccggagccgggagacgccggagacgggagccgggcccgcgcgaccgccactcccgagccagccggggtgggccccgcgccttgtcctgcgtccccggcccggcccgcggagcgccggtgcttacctgcgagccccgggctctccggagctcccctccgggccgagccgcccgaagcgggcgccggcgtaggccccgactcaggcaggcgggaaatcccggagtccccgcccgcggcccgcagccccccaccccaggtcggcgtggcctgcgggggggaaggccggccggggccggccgcccgcttcccctttctctccagattcctttgatccgcgggctctccgccgcacctcggctcccgggctgccccggtcggcccgcggggatcctggaaacggtccccagcttatctcctttcatcaagcggccttgggccgccttgaaaccgcggagccagtaattgcttttttcaggaggcccagtgcggactggacaacagccaatcagcgccttgtttacactcggtgatggacagtccactggcggagtgccaaccaatcccagcggtcccgcgggagcgggagtgggggcggggaaacagagagacaacaggctttgagtttaactctttcgtgtccctgccggaatgagacggtggagaatttcgaatgcgtgtgaatctgtcagttggctcctagtttaaatatccttttttcccccagagggggaggcagagattcacatggagaaagaggagcaaaaataaatgtatccatcgccactaagacatcacctcgactccctgagaataaatagcatttgggtgggaaaccaaattctaacagaaatatttgtttgcggaatattttagaagtggtttgcatctgattacgataaaaattgttcagtggcttgctttagttggagtgaggatttagcagataggcagacagggagcagcattgagaaatactatacatggtttaccacaccatacccgcttcccccattaccaaactgaaaatattttctaaatctaggtgtagatgaagaaagggcaatccttgtcttctcaataaatccctgattttcattttagtagctgctctgttgcaaagtgtggcagagggagataaaattgagagccagtaatgtagacggctggagactcagaactcacttcccagggtctgatccccaggtcatggggaggagagagccggacgggctattcaaagcttttgctgcccaagcagcgggcgtgcgtgcgtgcatccgcgagctcgggtccgggcaggcagcagcttcagagcggtagatgggccaggcaacctggggaggcctctgggcttggaggtctggcctacctgccacctgccagacagattccagggagaaaaagcagctacttttaaggggtggtggtgtttcttcccttggccttctgtgcggcagaagccaaacgttagacctgctggattaaacatatatgtgtgtgtgtgtgtctgtgtctgtgtctacgcctccccctccgccgggacacgcgcactcgctcgctccagctccctctcccgccctgcgccaccacattcccattcagcagcaatgatctgcgcagaggagctgcgcagtcgccgggcttgaattaggcgccatcgggcttggtagtagccccgctgcttcctgattggcagttccctggcccggcgccagcctattgggaggcctgtttacgccgaatgagtggcacgagctcccggccgtggagggctgcgcggccaatcagcgcgctggctgttccgggctgagtggcacgagcttattagtatgcagggcccgtggctcgccgcgccaggctgcaggtttgagagccgctctggatgggctcgctagagtcgttgttgtggaagcggtgcatttacagtgcaacagtcagcacattgaaaataccaataggaatacaaaacaaagtcacatttactgatttaattgtattgcattcagttgtatccaggaaacagcctccagtaagtaactgaaattgctttcattttttttttgtttttgtatttttattattattttattttttattctggctttggggttttacattttttttagcaaaagaaattcaggattgtgatgttaagaagtatatatcttcccttttaacaaaatccgttaaaatgttgaggcttttttttttcttaaaaaatatggactatgagcgatttttttttctctgaaaaatcttatcgatcggtttaaaattacccccgtaatgcatccttgctttgctctgagcgcttgttgtctcgatcgacacccagcattaaaaacaaatactcgaagacaggacagggaccgccaggctgcgtctggcgcgagccgcgcgggtggcaccgggcggacagtaggcgaagtccgggcgccgccagcgtgcgcccagttctgggtgacccacgaacgaaccccaacattcgctcccctaccctgctcccctccccggaacagtcctgggttggccctgcccggtcggtccgcggcgaggggaactggccgggtcgtggtacccacggccgctgccctgaggggccttccgggccgaagctaggggccggggaggggaatggtcatggcgagtttttcgggtcttcgttcccaattcagaattttttttttccggagaagtgggggtggaggagggggaccgagcaaggccggcgcagcggggcgttttcaccgcgcgcgttcgggacggcgcgcggggctcgggtcacggcccgtgtggcggggtccgcgggctggttttcttcgggcgcgggggtcaggcgcgaccccagttctcatgactctcccagggagcgggtgcggctgtttcgcagggagcgggttctgcggcgacggccgagccactcgcgccccaaggcgcgcctggtcccagcccggcctgcaggccccaccgcgcccgcgctcccggagacgacgccggagggaggcagacgggccagagtcctggtctccggcaggcgggcgaggagagagcgggtttttagatgcaaaagcaggaaacaaagcaaacttgtagaagctccagatcctggagcgcgccagccacgcctggggccgcggcaagagggaccggcggctccagggtcacgccctgccttcccgggagggagccctgtgctcctaggttcagttccttccgaaatgccctcgtcagcgattctccgcccgcccggggccctctgcccgccgccacttttcgctccatttcctcccttacctcagcccgacctggcgctgcggcgccgtcctcgcggtcctccggcgcggcctctcctggagctgggctgggagtgggccccgggcctcggcactcggcgggtggcggcgtcgccgctgcgggactgtgggactcccagctcgggccgtgtggccgcccttcctcgccccacttcctggccgcctcaggctccccaggcccccgaagcccggcgcgggcagacgcggaggcgcggcgcggcctctccccgggaggagagaacacaaagaaaagctctctccaatccggtcagagccgtggcggcgcaggcaggcgacagtaatccacctcctgtttgcttaaaaagtcgagcaggctggtgagaaaggaacaatcgggcctgcgatccgcccgcagggggtgggagattaaaattgttgcttcgtagccgagcccgcgtcccgagaatcgccggcagctcgcgctttctcaactttgaaatttcttattggagagaaaaaaaaaaaaaaaaacaaccacaaaacaaaagcacagcacacacgactccctggaggccgccaggaagcctggcacccccgcgtgcgcagcccccggcccctctccggccttcggcgcctttgaagctgcaggtttctgacctccctccctttccttctttccctttgtcccgcccggcgccctccggggctcgggaggcgccggccggggctgggggcccccacgtccctagtccagcccgggcagcccctcccctgacccctgcgctcgcagccccctcgccagagcactctccgggccctggcggccgggcgctcgctttgcaggccgggatcggggcttgggagccgagctatttgttagacccggggagagagctggcgatccccagagggaagggagccccaaacgcctttgtatgtagttgccagacaaagagaactctttgtgtagacccatttatttacaatgcaaaagctctccgaataaatattaaaaaagcttatcagctgagcaaatatgtattcacttaatacattatgttttcggttatagattaaatcaaacacaaaatagtctgcaaataagacgttttagaacccggaccataaaatatcgcaatttaaaaaggtattcagtagatggaaaacatcttaatcgctttgttgtcatggtggaatggctacaaaaacacaaggttttccgcaaagttcctaattaggaatatcaagcctatccatctcccttttgttggaggtgataaacattaaaacaatacgtatttagaagatgaggagtaatatgtgaagtgcgtccagggagcgccttcggagggacgcctgggagcacggtggtgcacgcagcttctatcactggctccgaccctccgcacccagagtctaaaattgtccccaatttcgcctgagtggatgctccgcgttgggtgggggtggaagaaaatggaggtgagggttattttaggtggccgaggtccgggcagggtctgctggcagaaggttgtgctgggccgggcccaccttccccggctagagggccgagctgggcgccgcagaccccgcgtacccaggccgcccggtactgcccggagcggagaccggcctctgctcgcggtccccggcaggcgctgaaggaagaaatcccagggccgatttgggccgttgagagagagcattctgactctgaaagcaccccccccacacacacccccaagcccccaatccgcagaggaagatcctgggcgaatttgattggggggcggggtgattgttacagcctcaacaggaagctcccggctccgggacagcaggccgggcactgcggcgtggcggcccaggtgatgccggtggcggttgcgggcctccggggctctgaggagccggcctggggtcctagcgcgatgctggggacaggagctggtcccgctggggctggggaggggggaccacggtggattcagaagaatgggccgaaagatgcatgagggggatgggagtggggagaaaaggaaggttattaaaaaaaaaaaaaactcttgagttacaatcaataaaattactcgcttaattagcatggttattcggttaagcggaatgcagtaaaagctggacctcggcatgaggtggggagagggggagagctagtgtggaccccaggccttttcctccgagacacctttgggcagcgggggaggggagagggtgtgcgtgtgagtgtgtgtgtgtgtgtgtgtgtgtgcgagtgtgcgtgatggcttcgcagatttgggtttttatcacccagcagagccagcagcctcttcgccgcggcgccctagctgcagggacccgcggggacgagaacgggaggcggcgagcagtgcggctgggttcccccggctgccccgggccaagcgtggccgggacggtgcgtgcgcgcgcggggccccgggtgctgggctgcgcgcgcgtgcggcggggagacaccgagcgccccggccccgccacccggcctggccgccgctcgctcgggccggcgggggtggggggtggggggagtgggtgagcgggcggggcggggacccccgggcgagccgagccccccagtcacccgtgtctcctctgcttttgcctccacagaccatggacccgcacagcggccgctggctcggtgcgcggccgcccgccgagaagcccagtcctcccgcgtgctgaccggccccgccgccaccaccgcctgtgaccccggacgccgccgcctctgcgccgcccgcgcgccgagccgcccccgggccccggccgcgctgctccgaggaagcggcggcggaccggggccggggcccggcatggatggccgcgactttgcgccgccgccgcatctgctgtcggagcgcgggagcctgggccaccgcagcgccgctgccgccgcgcgtctcgccccggctgggcccgccgcgcagccccccgcacacttccagccgggaaagtacttcccgtcgccgttgcccatggcttcgcacacaggtcagtgctcggccggggcgggcgcgggacgggagcgttcgagagcggaacagggcgcccacccctccgctcccgggagcagagaagctttggtttcatttcccggccccggccgcggtggctgcctgggcgctgagcggggccgcgcgtcccgccagccccccaagctgcgtcgccgcggcttagagaggcccttccctggccaccctcccccgggggtctcggaggggcagccccggagccggctgaaattaaagcctttccgcgcctcgccaccctcccccgccccctcctgcagatctaaattccacggaaacctcttttctgcattctgcattcacctccctaagacgttccggggctgggacaacgaggcgctttctgcggaaacaaaacggctgttgtggcggggggaggggaccagggtacgccgcggcctcgcggattagagtggtgtgtgcgccgggcgagcgttaatagggactgctggtgtaagacgagcaaatcctgtttctatataaagccttaaagtgtcagggcgagaatgggtttgcagggatgcatttgccttaacgagtgcctctggtatcccgctaaagccggacaaagcgtggccagagtgcggcccagcctctcagcctgcggcccggggaggagggcagcgcgggcgcgggctgggggtggcgcggggcggcgctcaggatttcggtgcaggcgagagtgcggcggatttgctccaagaggagagcgaggcggatttgctccaagaggagagcgtggggcgccgtgctgggcctcgcagggacggatcctctcgggcggtcccctctgactccctgcccgagaggatcagtccttggcagagcgggcccaggcctccagggcagccctcttcccggtggctttgatatgagtgtcgagggaggtcagggtaggggcagctaccacgcctgaagccctagaggtcaccaggcggcgcgggtagattcgggggaagcgcgcagggctgcgctagggacccgccg

SEQ ID NO: 5154 - DNA, 1408 bp, Homo sapiens
ccgaggtctcccgacgtggacacctaacgcccttggaaagggagtgaattggtaggatatcatcgctccggttagttccgcgggagctgcccttcagaaaaaaaactttccagagccaaaagttactttccaagcgccttggggcttcccgggcgcctccctcggacggcaaccctagaagtcaaagcgattgcatcgccaggtctgtggcggctggaagcggggtgaccgcggtcagatggcatttcgcacccacgcagggctgtgttatcctagcacagaaccagcaactctcacacgaagccttgtgtaaacaccacgcgggcccattcctgaacgactctttgatgcctccgctgcggttacttatctcatacataaatcaggattccgctgacaaatctccgtgtttccactaaacagaaggctgccctgcagtccttctcgtgcttctttctaaagtacgataacatctgacacttccataaaccggcctgcagaggacaccgcgcagggggcgactaaccagctgaggtgtgtcaccccaaaacaccagtgggcacaccccaaggcgggcacgtggaagggacgcggaaccgagggcaactattttccagtcggtgaatctgatggagaaagatgccaaatgcacttcccgagccagctgaactcctcgggcacctaatcattgccagatgtggcgagggcgcacggagaacatccccagtcccggagaaaacacccggccgccagcgcggggaccgctcgggccgggaaacggctagaggcgggaggagagaggactgggcgagcgtggggagcgctgcggcgtggaaaagcgaccgggagggatggcgatgcctccactctcctcggcaggttttttcaattaaaaagttggaaacgggaatccgtaaacaacgacttagggcttcaaactacttgcaaagacgcgatggggaggggaatacttgcgcgcttcaaaaccccaacctcgaggtctccagccgcgcctgacccgggagccgggtgcgcccccagtgtccgcgcacgaacccggcgccctggcagccccgactccccgggcccgcagcccaagggaaggttcgcgcgggaggcacctccgtggcctcccgcgcgccccgaagcccgttccccccgcccagagccccgcggagctgccgccgccctacctttcatggtgaccgtggggacgcaccgccggccggggagctccgcgcgagcgccgcgcagccgaggaagtcgtcccgagcggctgctcaccgcacgcccatggtagccgcgccgcgcgccggccgtctgcgcccccgtcctccctcgccgccgccggcccgcgctccccgcgctcccggctccgcgctctgctgcctcggggctgccgcgcgcg

SEQ ID NO: 5155 - DNA, 208 bp, Homo sapiens
gcgggcgtgggggggaaggggaagaagtccggcgagattagaggggaaatccgaaaaagcaagcccctgcggcagcagccaggaaacactcgccaggaactggctgcgaccccaactccagcggtccgaagccctagcctccccacccccaccgcggcagagccgccttcgcagacacctcccgaggagaatcgcggccccgagggcg

SEQ ID NO: 5156 - DNA, 805 bp, Homo sapiens
tcgccccctgtcccccgcacctccccgggggaggggccggcccgcgctcgcccccagcccgaggggcaacttaaaacatggcgccccgggcgggggatttgtgcaaattggcggagaagggacgcggggaccgagtcgccccttcggccagggatcccagggaggcccccaggccggaggccggggctcaggctctgcgcgccggcccagccactactgcgccgcggcgggcggagcgggcggggggcgcggcgcgcaggctcggcccggtgggggtcccggcgagcgggagggcggttggggaccccggccgcgccgggcgcggggctcgggattcgggagaccgcgcggcgccgaagccacgcgtcagccccactgtcccgcgcgcctcgccccaggcctcgggctcttcctccgcacctcgtaaagccgagaccccctcgcagtcccccactccgagaggcggaaaagttacctgggatcagcagggagcccgggcgcgccgcggcgtggggactaggctcgggcgcgcgtcctcggcggcggtgcgcaggagactcgggcgtggggaggaagccgcagcccagggctgctcgccgctgttccccccgccccctgttgcaggagacaccgaggctccgcggagctgcggcgggggcccacgcccagagaccgtgcgaggaaagccaacctcgtcctgcctgccctcccagccgcgggggagggggccaccgcagtacttcaggacagttacatgggcacagcctcctccgtcctggcgcagggtcaggctccgcggacgacg

SEQ ID NO: 5157 - DNA, 2462 bp, Homo sapiens
tcgcggcccagtcttaatccatcgcacttcagagggaattacgagggagttgcggactggcgggggcgggggtctgtaactaacaccaggtgcctgtgagagagccccaagggcgggggcagcacctcctggctgggttgggtccgcctggcctcgcctcgcctccgggatccttggcgctcagcgccgccctcccgctactgcgctacccgccagagcccggcgtcttccctttccttgtcttgtggacgccgcccttcgctcccgggaggatttcgcctccagcacctcaggcttttctggcgcaaaggtcgccagcccgagcgagcccaggcggcggcttcacttctgcagagggaaagcgaaagacgcggccggcgggccgagggggcggccgaacgcgccgcgtggttgctgctcccgaatccgcagcggcggcgccagggcggtcaccgagccctgcggaccccggctcaacttccagcgccactcgggtgccccgagcccgccgcagctcccggcgcgccctccagccgcggcacgcagcccctgacgcgcccggggcgccctcccgcagcaccagccaggccaccccacctcccgcgccgcgcttccccgccagccgccggccaggagctccccggcttctgagcaggacgcgccaaagggagttgggaggctcagcagcccccagcgtcgccttctcgggtgacgtgacgctctctctggagcgcgggcccgcctccgccaagcctccaccgcaggtccttacagccgagccacgggaagatgcaacgccgggcgaggggcgcctcccggattttgaaaaacagcctcattcgcctcgggaacgcctcgatcccccacccgcaccctttggccagatgattttaatcctgggattccgcgttggtcgtgggggtaccgggagctggagctggaggagaggagccggcagcgcggagttgccggggtgcagctgcgcgcagctggcggcgaggggaggcggtccctgcggctccgccgggctgggggaactggctcctgcgcctctgcctcccggaggatcgcactcgctcatccttacacaccacacacacacacacacacacacacacacacacactgccgctagcgccccccacgccacaagccggaatgcggaggtcagagccactgtccacttgaaagcaggaaagcaggggctgaaacgctgagatggaggcggaggctctggcctcatctgcgaggttcgcaccttcccggaaggcccccccctcccccgcgtttccccagggcgagcaaggtctagcttctgagactccgctctctgggctagcggttcgagctgcaggggggcggggacggattcggagggagcactagagagagagcccgcgctcactcctgccctcctcgcaaagaactggccagccccactcgcgtccagcccacaactaggctgccgggaccggggagccagaccccaggtcgctccaactccggcgagggcggggaggggagtgacagcagcaactagcgcgcgctggcaaaagcacagagtctcggaataggctaaacggccggcgcggaggggtggaggcaagagggggcggaggaggagttgcccgagcggagagggatgacgtcctccagggccttgggctccgaggaaccgaagactggtgcgctcgccgggccccgcgcactagctctggggttcgcagaggcgccgcgcccggcttccgcggcagctccaacacagcgcgcaggcggtcgatcccggtcagcttaaaccgggcgcaagccctctgtccccctcaaagcacctctctgctcgtccctagtctccaggtgcccgtctgagagtccctgtcgcctccgggcggacccggccaggcagcccccggtcgggccagcctcgccccttcctcgctttctcccccatcgacctcgagccaagggcaggcggcccgcacccgcgcccctgcccacggggctaggcggcgctcccggcctacgcccggctgccaagaagagaaaggcgctcacctgagtcaccgaagccttcctttggggcccctcccggagcttgttcgcagcccgcaggcacaaccttccttggagaaaaaaagtagcgcaagggcagagagaggtagggctgctcacaggtccctccgcaggggctctttccttcgaattctccggggtccagtctcgggctcggcggcgggaaagagctcctggaggctggaaggggccgccagacccgggctcctcccgcagctgcggtggcggcacctccaagttgccacctgcagcgcgcttcgggcgcctgtgacagcccgcgccgctcagccctcgcgggcccgccctccccgtccgctcgttggctgcgcccggtgcccgggcggtccccgcgctctgccccgccctgagcccgcctcccagccgcgcgctcg

SEQ ID NO: 5158 - DNA, 990 bp, Homo sapiens
acgtggtgtgtgtgtgcgcgcgcgagtgtgtgagcgccaggggccgcccgcccgccgcggctccccgtgggctggccgggccaatgagcgcgcggctgtaggggcggcgggcggggagggggcgccgagccctgcggatggaggcgcgggcagcgcggcgcgctcattccgcgcgggcgttgctggcggggggcggcgcagccactggacccggaccggggccgcgacccggggtggcgggtggcgtgggcggcgcccggggctgggatgcgccgggggctcagtggcggcggcggcgttggcggtggcgtcggcggctgcagggggacgagctagcgccgcggcgctgggagccagttgagcccggccggcgagcggaggcggcagcgcaggcagagcggcggcggcagcgggagcccgagcgctgcgcgcccaccatggccgcccagggagagcccggctacctggcggcgcagtcggaccccggctccaacagcgagcgcagcaccgactccccagtgcccggctccgaggacgacttggtcgccggggcgaccctgcacagcccggagtggagcgaggagcgcttccgcgtggacaggaagaaacttgaggccatgttacaaggtaggcatccctcgtgttctcggactctccgactgagcctctaactccttttcggacatccccaccgcgcgctccggcgcccgctactccagcctacggccggccggtttagctccaggcccgctcccccgcggagccggaggacacccagggactggagacttcgcgggactccccacccttccacgcctctcagatttccaggcgctgggggccctgtgcgaacttgactggcttcagaaaagccgaaggccgagtttgtactggcgcgcccaagttgcgttctggactttggagatgccaactttagcccggacacctgggctgtgccatccggaccactcgggccgcacagagtatgcg

SEQ ID NO: 5159 - DNA, 2274 bp, Homo sapiens
ccgccttccgtgtactgcctgcggctcgcttcgggcccacacgggacaccgaggcatgatgaggacgcagaacagcagaagcgcgccctgcttcccgggcgccagtgctcggggccagcggcgtgtacccggcgggcccggccgggagcgggctggcgatcgcggggctcggcgctcccggctcccgcgccatctcccggcgcccgccaacttcgctccgcccgcggcgtagagaagctcgcagccctccggagcctcagcgatctcctggctcgcttttcccgcagccgccgagcagcgcaggcccggcgactccgggtgcagctggccctgtgcggtgacatcgccgtccggcgccaggctcgaagccgcctggccgcgcccgcggggtcgcaggccgctggtcccgcccggccgcgctcacaaactactcgcggctcgtgacccgggacaaacttctggcggcggcgcagcctcttccacagtcaccctccccagagccagctaccaaaatagaagacgcggccggggcgaggaggtgggcggggggagcccggtggccgctcctccccgcgcggctgacgcccgcttcggcggcggtagtggctgtggccgcggggccgcccccagccgagctcccggaggcgctcgggcgcgggccggcggggcacgggcgctcacgccctctagcgggccgcggcggcgccgggcggccgtgacgtgagcgctcccttcagccggcctgcggggcaccgccagtcagtcggggagcaagagccccgcgcgcagccggcgcgggctcggtcatcggcgcgccgccgcccggggctgggcttggggctgcctgtggagaggcggcgggcggaacgcgcgcggccacggccacggccaccgccacggccacggccggcagctcgggtcccgggtcccgggcaggggaaggggagaggcggcgagctcagcaaccggaaccgagggaagattttggctccgcgggctcgccctccgctccctctgccagcggcgccagacgccgagtggggccagggacaggggaggaggacccaggaccctgtgcccgcgcccctggagccgctggagttcggacttctgcaactgttggcactttgggggcttggcttagcgctctgctgtttacccgtctctcctcgctgcctcggaaccaaagctcccggccccctccgccctcgcgcgcccacccaccgccgccggggagcggcccggcccgcactcagcaccatgaggggacttgggacttgcctggcgactttggccggacttttgctaactgcggcgggcgagacgttctcaggtaagcgggaccgcctctgccgcccccgaggcgcgcgggccggcgcgggacgcccgggacgccgacagctccctggtggtagagccctaaggctggcgtcggggccgggcggggggcgcggcgggccggacaccgcttctgcctgtgagccgggcgctgggcgaggggccgtggggctggcaggcacccagtcctcgggcgggcggagcggacggaccccgagggcgagctccccagccgggactgccagctcggccgccgtccttccgcggcctgggctagtgctcaaggttgggcggcttgcactcttgagtccctggccggctgcaaaaggaacagcagaaaactttgcttgaagttcccagttgcagccgccgggccgcctggcgtaggcgctgcgcggtccccgccgaccccgagcagcggccgggcccaggccgctggtgttcggctgcgcccgcagcgatcgccgggaactggcggccgctccggcggcggcgatctcccggtgccctgccctccctgtcgccccctgcccggcgcggctggcgaccccgggaggtccccgcggtcgtgcagcgtctgcggagaggctggggggagttcctcgccggtcccagcggtagggcttggcggccgcggagggaagcgggcaggtccccaggccctggccacggccctgcgccccgctgggctccccctccccaccctcgtccccctagcggagcgccgcggccagctgcaacttgttcatccagcccggctgcccgggggtcccaggtgggaaggagaggcactggcggtgtgcgagcaagcgtgtgagtgtgtgcgcgtgtgtgcctgcacgcgcgcgcgggggcgttctaagcccagaggaacccctcacggagaggatctgtggatcggagtcgggggtccggcgtgggggcgaacccggcacg

SEQ ID NO: 5160 - DNA, 882 bp, Homo sapiens
gcgaagtgaccccctacgcctggacaaagcgctcgaaagcccaggcccgcgggttagctccagccgctgggcttgacaggggtcagggaggcgggccggccccacagccaagtcacagctccagggcctggtcgcacctgagcagcgcggcctcgggctgctgctggcgctgcaggctccgcgcctgaccctccagcctgcgcagcgggcactcggccgggaagaacctctccagcaggcggctcagcactacgttcacgcgcccgcgcccgcgcccgcgcccgtggccgcgcgggccccagctccacgcagcgctcacagaccgtgagcccgcagggcagtgtcaccggcttgtgcagcagccccgggcagccaagcaggtcgcggggcgcgccgggcgccagggccggccctccctagccttgagctcgccgcccggcttcctcgccaacagtggccgttcgcgcaggccgggacacaccaggccgcccgccagctcccccagctcctccggccgcagcgcctccagcctcccggctacacggaacgcgcccagggccaccgggaggcggccggcgcgggtcagagcgtcccccagcctcaggcaccggccgcggtcgggctgcgccagccgggccagcatggagcggaagagcccgactgctttctggtactcgctcgcgcggaaggcctcgtcgccctcctccaagcgctgggcgattggcttcccgcagcagcagcccgtcactggggcggcggcgggaccggctcagtgctgatccccgcggggctgagaccgtgcgggcctggagcgaaggcgcggagcaggggcgatgagctgctgctgggaactggccggcgggagcgcggccacagccttcg

SEQ ID NO: 5161 - DNA, 4359 bp, Homo sapiens
tcgtgtttcacggaaaccaccaccaccgcatccacaggctccgaggggcggatacaaagtcttttgggggaagtggggccgcagatttcccccgacccgaacacagactcgtacagggcgcgcttgggcgcagcctcggatttcacgtcgggcccgacctggctgtctttggggaggatgtaagtgttccccagcgagggcggctgggggcggtggtggtgggagggatgggtgggggggtggtgggagtggtgccgtgccgccccgttcagagcctcggcgtagcagccctgcggggcgggcgagcccagcttggtgccaatgcccgcgatgctgttgagcgtggcgatggagacggcgccgatgcagtggttggtgtaggtcttggagagcttggccgccttggagagcatctgcatccgagtgcctagcaagttcttgccgatggctttgttctcgtaccaggtcacatcgccctcgctgcagtggtcccggggccgctggaagaacgccttgcagagagggttgcgtttcgacaggtacttgacgaagctggcgtaggggcagaactcggtgcccgtctcatacatgcggggcaagttctcctcgtcgctgctctcggcgcgcttcttgctccacgacgacgagcgcgacttgtggtagggcccgagggacttgaagtagacgaacttgcgaccgtcctcgtccatggccagcccaaaagagtcctcctccaactcacgctggttctcgcggccgcgggtacagaagtacatgcacgtctcgaaccagaccttgttgagcagcccgaagggcgtgttggtgctgaagacgctggaggtgtacagcttgcgcaggtcggcgcgcgtgatggcttgcttctgcaccaccggcccggcgccctgctcctcgagcttgcggatgaccgcggccagcgtcaggttggcgctgcgcagctcggggtccttggtgaggtcgagcgtgcggcagtacgggggctcattgaggtagcggttgagggagctgcggatgctgatgagcgacgacttgctgtagagctggccgcttttggagcgggcctcggcatagaaggagcgcagcacgcggcacagcgcccccttgtccatggtctcgaagtccgggctctgcgccttctcgctcaggtactcccggaagatgcgcacggcgtagcgggtggccagccgggtgttctcgctcagccgggcccgctcggggcgctgcagcacgtcggggtccagctcggagccgtccccgggcggcccaccgcgggcccggggcgccagcagtcgcggcggcgcctcgggctccagcgcggcgctctggtccatattgatcatatggaccggctcgggctccagctcctccccggccgagtcctcgggctccaggggctcgtcccagtccagccccatctcctcctcttcctcctcctcctcgtcctcctccagccccccacctccgtcctcctcctcctcctcgtcccccgttatctgcacctcctggatctcgtcctcctcctcctcttcctcctcctcctcgcccgcgctgcagtagtgcggacggctgtggcggcggccgcggccccccgcgccgcgctcgccctcgccccgctccccattgttctcggcggcggcggcggcagcgctggcgctgccgcccgcgctggtgttacagtccccgctgccaggcattctcgccatattgccgtctctctgccagtcctcgggcagggcgcatgcgctatattggaccgcagcgctgagagcttttgtgtttaatgaccttcagctaccgggaggcaaagccgggctcttaaaggagccgcgctccaattgtcattcccgagcgcagctccggaggggcagcggcgcgcaggggatggaggggaggggggagggggggacaagttagaccggagagatagggtaaaggacggaggctgaccagaccttcttcctcccccacccggctcccacttctaagaaaactttgaaggaaaaaaaaaaggaaagggagggagagctgtcggtgggggcgaaacactcccaacttaccctctggcggagaattgcgcgggcccgggcgggagagagggagggccggcgagagggcgggacggtctcgtttctctaagtaatgcccgaggagcagtgccccttccactgccccctcattgccccccggagccggggggtcggggcggcggctgcgccgggcgggccgcgggtgctgccgcgggaaacccgtgtctggggccgcccggagcggagcggagcaggcaggttaatgagcagggtggaggaggcacggcgaggccccgcaccctctcggcgcccgcggccagggcgcagcgggcgaggcttgggagcgggatggggctggcggcggcggcggctcccccacctacttgctggcggcgaggcgcgggggcctggggccagccgcgcggctcccaactccctttccgactcttgcaaaggagcgaaacacgccccacgtcagccacatccctttcgacttttccaacagccacatttaagctgtcattaaagacctggggcgctccccgtaggtctggggcaagtccgcgccggtccagccagccccgggaaggagcgaggcagagaagactgggaggggccggtgggaggggagacgagggaagaggcgcttgggaccccaggggccacagggacccttccccacccgcccagggcgccgccctccctgcccctgagcaaagtgacacaactccctcgggcgaggcgctccaccaagctggagctgaagtctccctaaggcccatcgggcaggcggaaaaagcgaacttgtgtctcggccgaccctgccgcagccacaattcggcaattcggatccggagcgcactctcactcaaagtttgccaaccgccattcgttcgccctccgggctgcgctgcctcaggcgcgcgggggcgggcacctcggaaactggaaaagcagccaaagagctcgccgggtctcgctttcccataggagacactgccccacttccagccaaacgcccgcccccggcgcgcccaggctccgggcgcgtccttgcgtcgccgcctcccgctctcccggcccaggggcagcttcccagagccgccggggacctcggctgttctcttaggaggcacagcccaggccactctcggagctcgtgctgcatcctaactttcaccttctcccgcagcccgtgtgtaccctggcgcgcgggccagctgcgagtccctggggtgaggggacacgagggagtcaggtccccagcagtgcgccccggtgccaggccgtcctgctgggaggcagcctcgcctgctcctcgggtgcgtcctcgaatttacctccaagtccgaattctcggcagttaggctgtgagagttatgtcaactgcctgtttcccccttccctggccctcctgtcttgctctcaagggaagcattttacgcatcaattgaaacccatccatcaatttgcattttttttttttaagaaagaatgaaagaccaggtctcagggcagtgtgggcttctgagtgggagttgacgatgtctttttctgcagcgaacgctgctggtcctccgcgtgcctgcccggccctggacgccacccgagcttcggggaaaccgcgccaggtgtgaaacaagttagagcaagtccctgcctcgcgggccgcctccggctccttagggaaacacaagacacacagacacacacacacacacacacacacacacacacacacacaccacgctctcatccgcccggctctccgcggagaaccgtccgggaatcgtccccgaggtgcggcgcgggaggtggccggctttgttcacaatgcactgcccgccgcacccgccctggacacgtgcagaaaggcgtgctcgtttctccgaggctgcggtgagcagctaagttagttgcacactgggacccccacatacgagctggcacacactagtcacacacggctaattccagagggctggccctttgtcctgggacgctcccaggttttcgggccgcggtgcggagaactcaggtgggtgcccggcaagttacctaccaggggctgttcccccgcgaccctcgccataagcgcagggacccgggggccgcgctggctccgggctgcgctcctggcttggcaggggaccaggcccacgctgcagcctgggagcggagccgccccccaggtctccccacctctgcgggcggcggggtccacccccctcccaccagctcccctccctactgggcgagctgctttgaattgctcgcagtttgccggaggcggtgtgctgggttggacgctccg

SEQ ID NO: 5162 - DNA, 2762 bp, Homo sapiens
acgacccgggaggagagcgtggagccgggcagggacaggcgtgccgcaccatggcgcaccatggacagggctccgcgcggcggcggcccacgaccgtctaggggttgcgggagaaagcgcgagagactgcggaggccagccccgtccagcccctgcccccgccccagcagcactcaccccccggcgggccggagcgcgccaggccctgacccgtgaagaccacggagcggggtaatccacaccacctgtctccacccccggagcaggcacttccgagctgcgtccgcacttttcggggctgccagctggcagtagagcacctctccccttgccccgagggcgacaggcagggggaccctccgtggattttcctgccccgcggcgagggtgggcacgcccctttcccgcaaccttcgagggaccccacggcaggcggagaccgacttgggaccagggcactgcacccgcccagctagagggtcccggccgaggctgtgtgaagtggcctccaggcctgggctggctggtcgggaggagcctgggggcatcctcgggttggaggcggcggaaagttgggctgcccccgggctgggaacccgcagcgtgcagtggcgagggaacctgcgcccggactggagcaggtgcttcctgccgcggaggagcctcttagtagagattaaatgaaaaggctcgctggctctctcccgagggtatgaaaagtacggaaggctccaggcaaaggcgcccccggggcgcatatagggcacaggcagccggacagagaaaggagcagccgcgtaacggaacttctcgcccgggggagatactaggcgtgagaggccagactcgttctacaggcaggcgctgaccggcagagactcctccgggcaagagggccagattttctttccaggtgggacgaacacagaatattgtgagggcaagagaagaagaaaaggaggcaactccagactgggataaagacaataggacagtagagcccttgagcaccgggaggcgcacgggtgcagggtggggtaaggtggaggcaagtcccgtaactaagacaccagagtgagaattcctactgtaaactcgcgacccatccctgcagaaataaacaaaaaaattggagcaaagtactatgcgaggggcgaaaggcacagaaaactgcaaaacctgggagttatcctgcctcaccctcctgctgcctggggacaccccccgcgagcttgctcggccccgaagaaggagcagaggggacccgcaatccagcccctagagccccgccaggaaaggcgcgagagacctactggccccggcaaccctgccccggcgcccggacggagcccgatgcctgcgcagctaccggccgcgcggcgcggcgcggcgcggcgtggcacctcccttcccgggtgcgcagcccggccccgcagcggcgcggggaacaaagggacccggcgccgcccgccccaccccgcccgtggcccggcccgcggggaccgccgcgtacctgaagcagggccgccagcagcggcagcagggtccgcagcgctcccgctatccggcacatggaggcggagaggggccgagcgaagagccggaggaggcggcggcggcggcggcggcggcggaggaggaggaggcagcggcagcaccaacagcggcgcggagaaacggctccaggcagtttccacccccttcccttcccctcccctccccacccccttcttcgctgctctccgctccccgccaatggagagcgagctgatgacaaatagcgggccgcggagtccgcgggactcgcaccaggagtaataaaacagacccagagatcaaggagctggggagggggcgggggaacagggagggagagcgtgtgagcgtctgcgagtgtgtggaggcggctgctgtggcagcgcaggcggctcggctccggcccggagcgcagcggaagccgcgagggatgcagcggcggggaccttggccggtggaggatgtggaggtggaagtggagcggatggcgctccccaagagctccgccacgcgaggtttcgggctcgtggttttgcttcctccgggtccccgctccagggccgctcggcgcgacgaagacgccggggacagcgccgcggggagggcgctccgggtcgtgcgtgctgcacccacaaagagcagcagtcccgccactccgcgcctccgctgcgtgggggccgaggggcgcttctcggctcctctttccggtcccccggcgagttggagactgttctccggcctcggccgcaagggggtgaggcgaggggccggcgcggtctctcccgccgcggctccgtcccgcgcagctgctgccgcagccgcccctgctgcccgcgcaccggcacccgcccgccggtcctcgccctgcgccgctcactcgcgcgcgccgccctccgtcgccgaccgcgcaccccgctcggcctccgctgcgcgacctgggcgagccgccgccgctctccccgcgctcgccccacgcgctgcctggctgcgcggcccgctcccctctcctattcctcccgccgccgccgccgccctcgcccccgcctccctcctccgccgagcctccccgcccgcgtcgtggccaatcggaggccaccaagctgcggctgtagccggccggatccgcggcagccgcccgcccccgccccgccgaagcgccccgtattttgctgcagcccgcggggggtcgccggagggaagcctagagtgcgccgagcaccgccccg

SEQ ID NO: 5163 - DNA, 338 bp, Homo sapiens
ccgcgggagtcgcgcaggcgggcggccagggggagtgggcgccgcccggcagcgccccgcgccgaggcacaagcgcccgcgccgaggcacaagcgcccccgactcaccggctccgcgcgtttccccgcgcgtctcccggacccgcgcctgcccacccctccggctctgctgcggtcgaggccccaagtcggttatcccgtgtccaggcaaccgcgggggcggcggcggcggcgtgaggagcgggcggctgctgctccggggcctcctggctcgagcccttagcccccgactcccggcgtttcggcgcccgatcagcgctccaggccgcccccgctccg

SEQ ID NO: 5164 - DNA, 1435 bp, Homo sapiens
tcgcggcaacgatctctgggagtgatcgaggcattcgggctgccccgtgcctcccgggcagcgatctaacgataaaacctgacagtgtcctggggaaaaccccacatccaccgctagcgctacattcgggctttatgccaataaggagacactgtagactatcgatcagactcgtctgctctcagagcgtgcggccgggcttccagcctggcctttaggcgcggtggcggcggtgggacacgcgccaggcgcccagagaaggacatgggacaatggcccagcccgaggacgccagacgccgccgcccgacccggggaaggaagctcctgcagccggtccgggaacccgaggcggggagggaggccagctctggaggtgcgctgccgctttaaaataaaggaccacaaagactgtacagtggggaaaacgcgcctggctaatgcgagtggggacgacttggggagggggttgaggaaggtagggggcacacgagccaacggcggctcacggctccccctctctcccgcctctctccttcctccctccccgccgggctgctccggcagacaaataacagaggaaggcgagtcactcaccgtggtcttgacaggcacgtagagcacttgcttggcgccgccgcctcccccgcggacctcgtccggctggcccagctggaagcccttcgatttgacccagaatttaaatttggcgttgtccgtggagctcgactcggagccattgaggagctggacgatccgttcgtattttttacgggtcaccgtcttggtcttgcctgagtccccgtaagtcctgaggcaccagtcctggaactggcggtacatgtcgcgctcgctctccatgttccccgcgctcggccgctggccggatgctcccagcgcacttcgcacctgttcaccctaggctcatgaaaaatgcagccccggccacgttgcagggatgcgaggtcccggccgcagcgggagcctgctttgggtgggggaagggatgggaagaggggaggagggtccggttgggcaccagcaatcaatgccccgtgctaccaagtctggtccattcgtaattgcaacggctgtctcggacgtttttcctgttcccttagcggtcggtctctttaatattttgtgaccaggaccatcccaacaccattctggcccagaggagctgggttttcaataattaaaatcccattccttggtttattaaaaatcccaatattgaattggggtggtccctagacgcctcgcccccgggctgcgtccggggctgggcaggtggagcgcagcgccgcctccccgcgcgcgccccagaagcttccccagccactggccccgtggtccaggagtgagggctgcgcctctcccgaaagcagccgcccgcccagcgcctttgagccccgaagggcacacgggtcccg

SEQ ID NO: 5165 - DNA, 510 bp, Homo sapiens
ccgaggcgcgatagtttatcaaagacgagggctggctccttaaataaaccgcggtgatctcacttgcggcgccccctcccacgccggccccctcctcccccactagagcggcccgcgtcgactcgatgggcggactcgatcgcgcacgcggcccgcgggcccggcggaggcagctcccgctccggggacccgggacgcgccgctcccccgccccaggctgcccgcgcaggaacttcacggccacggccaagtggggcccctgtcccggatcccgttgggcccggacggccgagagcccagggatttgggggggcgcgcgggctcccgagctcaggcggggcggcgggcgccctgccgtcctctccccgcgcgccgcgccgccgcccggcctcccgaagtcgccccctgtcggcgcgtcggccgcttgcgccacggcgggcgccacttaccccgggcagagtcttctgctcgtgcagcgcgctctgggccttcagcgctgactcacgctcg

SEQ ID NO: 5166 - DNA, 2722 bp, Homo sapiens
acggcgatggacagcaccctcggtcctcggccggccaggagcccgcgagtccgtccgctcagcgtcctgggctcgaccggtgcagccttccccatccccatctttcaggtcgctgtacccaaaaatccaagccccgtctcctcgatcccctctctctttctcttcatcggcgcccgctgctctctccatggcatcgttcctatcagcacctcgcccaaaacccagtcttgccccagcgaacagctccccacgcaccccagctctggtctccgctgcccgagcgcctccctccaccgcgcccgcccgaggcttcctctcgcttagtccgccgctcgtcagtcgccggccggccggtcggcccgccagcccgctcctgctccccggcaaagttgggagggaaaggtgtactcacctttgtgcatgcctgtgaacctgtccttcagaaccgtaagctcgtagattttgccaaactcctcgaagaggggcttgaggtccttctcatccaggttgcgggggatctgcccaatgaacagcttgatggcatcgtggtccttcatgggaatggtcgacgggttccccgggctgtggcttaatccgttcatgtgcccggcactgcccgggctgctgccgagcccgttggtactgaggcttgcgttgtcagcctgtccgtttgctaacgtggccatctttatatacatagagaaaatcttctttccttttattctttctcgctcacactctctcgctcctctctctcgctcgctcgcgctcacacacgcacacgcatacacacactcgggttctctccccctcggtttctctacacctcgctctccgctcgctctctgctctctctctttctcctcttctctcgctcgctcgcgctcgcgctctctctctgctctcccccctctctctctccctccctccctctcctctctctctccctctctctctccctctctctctccctctctcctctctctctcggtctgatctgattttttttttctttttttcttttttttttttttttttttttttttacattgaacagacaggatctctgtcctttccgtttaaacaggctggaccggttcaagttcccagccagaccaggggtgggggtggcgagtgtgcgcgcgcggaggagggcgcggggggccgggaatgggcgcgctgtgggggcccgcgccacggcgggcggcggccgggggcagggcggcgtggggcggcggccaccgcgcctcccccgtcggcggccccgcgccgtggcgatggtacagtccgagacggcccccggctataaatagcgccaggcgcatggctcttcgggaggcgctgagattccgggcccggcggccgcggggagcgggtgtccgtgaggagccgggcagccggcctcctctctttgccttttgggggttctttttgtaatagcagcaggtgcaactttttgtattttaaaaatagtgatttttattttcgtgtgggtatgtaggggggctttatccaccaagctatgctctattagggcgccaggcgggcgaagcaaaggcagggatggcgggcggggcggcggcggaggtggaatgggcgcttttttcttccatctggctttatttatttatttagactagaaaagcgagccggcttggagggagtccgcccggggatccgagcgcgcattcatcagtgtcgagagaaaaaaagctacataaatatatattatgtggataaatctatagacaagagctctctcgcgcgcgctctctccctgtctctctgtgtgtgtctttctctgtttttttttcctcctcgcacccccaacctgccagagcagccccacatcttcctcccgcccggcatctaccgccacccaagccacctgccaggatggggctgggagctgtcgggccgcgccggggggcagagggacggggagtagagactcggggtccgacccccgccccaacccgcttccgaaggcggaaggtgggggtccccgtcccgggcggcctcccccgccccggagagcgcggctggtcccccggtggctggcgggaggaaggtaggagtcgggcgcccctgcccgctcgcccgccggagggggaggaaggcgctgggcgcggtggccggtgagccagcgcgggggatggcttgatttgccctcgtctgctttacgggttcaaatagaatatatttttttaatcaccatcaaaagaataaagcccctgaatcgctatctgggttgccgccggaccgagactcgcgcggcgtgcgctgcccccgcgggtttcgttttcggcacctacagctcccgaggtgcgaggctgagtcgttcctgccgtggggaccgggggtcgagccgcccggtccggaccccgccggactccccgccaggcccactggggctggcatctcggctgcgcgggaaagggagtggcaggcgcggagccgggagcagggtccgagcggccccgcctgtaggggtgaatactggtggtgaacttggctggggtagcagattttcacgttaatgatatttacctgcaccccgtcctctctcatgtttgctttttcagggcagcctcttcgcttcagaagcctggcaaattgaaataacgcgcccgctcccccgcgggctgcggggctggggagctggggcggcggggctgagcggctggcctaacccccgccggccctcggctagccactttcg

SEQ ID NO: 5167 - DNA, 1133 bp, Homo sapiens
acgacgcggtgcgccaggcagagagcctggggagtgtgcgtgtcttacctgtgtctgcatcgtgtgttccctctgtgtgtctctgagaatgcgttcttggcacgcgtcctgcgttaacaaggcgtttggtgtgtgcatgtctgtgtgacagtgcctgggtcctgtttgcggctgcttgttcgcattccagcttcccttgtgcccgcagtcaggctctacacgtgcgccagcctccgagcgcacgtccccgagtgacccgtgcgcggtgtgcagggacctcagggtcgtgtgcactaagggcgctcgtgcccgtctctctgcactaaggaacgcacctccacatgtctgagtgcacgtccctctccatgtgtgcacgttccgtgttcacgccgcccatgtctgtgcaggggcgcttcacgcgcgccctctccggcccgcgggcggccagggacccgcgctgggctccacgcttcccgtggggctgacccctccctcgcgccccgcagcgggccgcagcgattggccgccggcccccttccagccgtcacccctccctccctccgccacccgcgcgcccgcggtccccgctgtcccccgcggttccggcgaggccgcgccgcgctgcgctccgctcccattggctgcgcgcgcctttgtgtggcggcagctgcggccccagcgcctttgaatgtcgagaggggccgggaagggagcctttccatgggccatctgtctccccgccagccgccgccccaccgccgcccgcgccccgcgctccgcctcccgccccggcggctcccgcagccccgccgccgcccgcgcccgcgccccggagccgcgccacaaagggcccgcgcgcagccgccgccgccgccgccgcgcgaggagccaggatggtcctggtccacgtcggctatctcgtgcttccagtgtttggctctgtgcgaaacagaggtatcgctttttcctttcggggtctgcttcggagcgtggatcgccgcaggcaccggggcgggggcgggcgccgcgggcggccgggggctcagggcacacccgcgaggacgcagggcgagcggtggcttccccccaccccattttagggggacccccgagggtgggggcggccgccctcg

SEQ ID NO: 5168 - DNA, 2401 bp, Homo sapiens
tcgaaggtgtcgccagcctcagtgccggtgggcgtctgcaccaggaatagctaaagccgacgacatctagccacctcgagcgccagggaagacgctccgcgtaaaaccgcggcctcaggcggactcccgctccagctccgcgctgctggtggcatttccggggacccaaagtgggtggcctgggggcaaaggaacagaggccgaagaacttggggtatgttccactagagcacctaagggacggagtgggaggttacatcagatatgcgacctcgacacattccaaaagtggcagccccgtgggctacccccaatagtgggatggatctccccaacttctctcgcccctcgaagtccccctgttatctcgggccatgctcctcccccgggattcccttgtgcaaaattattctctcccttgcccaaaggatttttcccttctttctgaccccacgaactcatctccccaacaggttcctaaagtatgggcggatgtgctccctctcgcccaccgccaggagccgagccccggcaggtgagcggtgcaaaacacgcacccagctgcccccagcttcctccgtccccgctgagttggctgtccccaccccgcaccacggcacccgagcctgtgagtccccgaccccggccccagccgcagccgccaacaaccctacaataaacaagaggacaggattgagcgtccgcgtcccggagcgcactggctgggggcaactcctcacccccggcgcgccgcccgctgccccgatccgagagcaccgggagagccgagggaagggaaggcggcgaggggaaggcaggcggggatggagggaggcacggcgcggcgcggagcgaggaggtgggctgcaggggacgccgagaagcggtggggctggcgcagagggcgggcgcccggggcgcgcgttaccttcgtcttgcccccgcagtggcagcacacggtccacaggtacttgagcgtccgccagagcaagatgatgaagaggcccccgaagaaagtcaccatggaggaggccaggaaagcccaccacatgcgttggccccggctgtcgcacggcacctccatggtcaccgggatgatgagcgcatccatcttgggctcgtggaccgaggacgaggaggaagaggaggaggaagaagaagaagaggaagaggaggaggaggaggaggaggacgcgtctaggctgagatggttcgcgtggatattgctactcattctaagactgctgcctccgccgccgccgccgccgccgctgctgccgccgccgccgccgccaccatttgccatagctagcaacgggcagccggcgcaggggctcgggggagctcctcccgccgccagcgccaccccaaacacccatcaacagccatattgctgctactgctgccgccgccgccgccgccgcggagcgcgggaggggggcggggaggcgcctgggctcggggcgctgtgcgcgacctggcggggtgcgccgagatatatacagcgagccgccgccgcccgcccgggggggagggggatggagtgcgcgggcagctccccctccccggcccgcgccccgctcgccccgggctgcgctggccccgagcgccgagagccagggggcgccgcgggccgcccgcgcccggggtctgcgccgcccccgggcccgccccggctccgcgcgcggtcccgggtgtcctcggcgccgcgccgcccgccgtgcgccacgggtgtgcgctgcgctcggccggtgacccccttccccgagcgcctcccgcgcggctaacgagccgctctccgcttattaggtggtaactcgttaataatggataatcggccccctccgcccgggcgcccctgcgccagccctcctcccccggctgcgctcggctccggctcgccgcgccagtgcgcgcccggccgcggcaggttcaccgcgtccggccgccggcccgtggccgcctgctagcccatgttctcgggaccccctagtcctgtcgccacgccgctgagcccctcggcctccgctcgctcttcctccttgccgcctccgactcctcctcgtccccgtcctcgccgcccaagcctcttcggcgcgcgccccgcgctccccgcagccgccagcagcagcagctgcagcaactggagcgggcgcggactcaggacgacccaggcgggaggggaggaggctcgccgcgctggctcgcctgggctccgggctgggcaggggtgggcagggcccctcggcagcggcccggcaagcgcccctgacccccagggcgcaaggtagagcgcccccagcccaggcgcggggccaggcgcctctctccaaggtgctgcgcccccagccgagagcggtggggtacactgggaggacggcggggcgccccggtcaggccg

SEQ ID NO: 5169 - DNA, 769 bp, Homo sapiens
ccgggaacgaacgtgcgtggggcagttcaaattcctgagctcagatttcgtttcccgcggtcagatggtgcggtcggtggggcccgagggatgcgcacagctgtgcctgagaggtgctgctctcccgccaccgaagtcgctgggaaattctgctgcactgagacattttaatgtcggatgttctaatcctgcgggcaaaaaaaaaaaaaaagtttgaaccaggtactgggcttttgtcacggtgaaccccacccgcgccccgcgccgtcccttcattcactcaggcgaggtggcttggatttgcacctcgttgaagaagcctcccatgcgacatctccgccagcaccccgcgcggacttggctgggcggcggcggggagtcagcttgtcaccgcacggcggccgggaccgcagcccctgggtgcgcagtgcgcctctcgctgcgccctcctagagcgcgggtcccgtgcctgtgcccggcgcgacgcgatctccctgctagtcgggctccgcgtgctccccgcgcttcccgcagcctccgcgcagcccgcagcgccctccagccccgcctcgcggccgcgggaacccggcgcctgcagccccgcccggaaccgaccgccaggcgctgttgccgccggccacgcaacgcggggcctctgcctggcaccagccccaggtgccttgtctcgggtcgtgctgtcgcgcgacactggggacccaacaggccgccggctactcagctggccccgcagcttccctgcggctcagcg

SEQ ID NO: 5170 - DNA, 1169 bp, Homo sapiens
ccgtgctccctccgagtggacttggccccggctccaaacccagccgagggtcggctcgctcctggggacccgcggatgtcgcgagggggcgccgcgccactgaaggctgggacgggggcggtgcgcggggcggcgccggagtccgggatgccggctccagagacgccgcgctccgccccgaggaggccgccggccgggtaagcggagcccggagctcgcggagtctggaccgcaggtaaagttgagcgcgccgtggggccgggggtggggggtccgcggcgaaggagccggggccgcagtgggcggtggggcggggggcgcgggctcctgtctgatggttccgcgcgcagcttcttctccgggtgcgcggtgcgcgcgggcgcgggagggtcgaaggggaccttggaatccccctgttcgggccaagggggcgggggcggctcggggccgggcggggctggtgcctccccctcccgctcagcgcccagagtccgggagtcgaggggggcgtcgggccggaggcgctcgccggtctggccgcgccgcgcgcgtggatggaggtctcggccgcggatcgccccgtctattcgcgctggtcctgcgggagcccgggtgagccgaaggcgaggaaggggcgcgggtctcgggaaaacccgactctcccggcgcccgccccggttcggttgggggcgcacccggctcgcgcggagagcgggcggggtgtgggcgaatgctcggcgcgctgcgcctttcccggtcccccttctccccggagatgaacgccccactcccgctcggacacacggccgcacccctactctgcctcctccgaccagccggggcgcggcccgaattgggggagagaagacccagctcccgcagccgcgaattctgcaaacccggagcccatgcgccccgtcctccggcccggggagctcccagccttgcccgccgagcgcagcccgggtccggactgtggtcactggggacgagaagggtccctcctgcggggctcccgggttcggatggacggagggggcgtccggcaggtgaactgggcccgctccgcgtcccgaacgttcccctaaacccacaagtcccggagaccctggggcattctgcgatttcggagtgaccggtggagcccccgcccgcgcgcctggctcccg

SEQ ID NO: 5171 - DNA, 6036 bp, Homo sapiens
tcgcacagcctgaccatcgtgagcaacgcgtgcggcacgctctggaacctgtcggcccgcagcgcccgtgaccaggagctgctgtgggacctgggcgccgtgggcatgctgcgtaatctggtgcactccaagcacaagatgatcgccatgggcagcgccgccgccctgcgcaacctgctggcccatcggcccgccaagcaccaggcggccgccaccgccgtgtccccaggcagctgcgtgcccagcctgtacgtgcgcaagcagcgggcgctggaggccgagctggacgcacggcacctcgcgcaggcgctggagcacctggagaagcagggcccgccggcagccgaggccgccactaagaagccgctgccgcccctgcgacacctggacggcctggcccaagactatgcttccgattcgggctgctttgacgacgacgatgcaccgtcatccctggctgcggccgcggccaccggggagccagccagccctgccgcgctgtccctcttcctgggcagccccttcctgcaggggcaggcgctggctcgcaccccgcccacccgccgaggcggcaaggaggcagagaaggacaccagtggggaggcagccgtggcggccaaggccaaggccaagctggcgcttgcagtggcgcgcatcgaccagctggtggaggacatctccgccctgcacacctcgtccgacgatagcttcagcctcagctctggagacccgggacaggaggcgccacgggagggccgcgcccagtcctgctcgccatgccgcggcccggagggcgggcggcgagaggcaggaagccgggcgcacccgctgctgcggctcaaggcggcccacgccagcctctccaacgacagcctcaacagcggcagtgccagcgacgggtactgcccacgcgaacatatgctgccctgcccgctggccgcactggcttcgcgccgcgaggaccccaggtgtgggcagcctcggcccagccggcttgaccttgacctgcccggctgccaggccgagcccccggcccgcgaggccacctccgccgacgcccgcgtgcgcaccatcaagctgtcgcctacctatcagcacgtgccactgcttgagggtgcctcaagggcgggtgcagagcccctcgcggggcctggaatctctccaggggcccggaagcaggcctggctgccggcagaccacctgagcaaggttcccgagaagctggcggctgccccgctgtctgtggccagcaaggcactgcagaaactggcggcgcaagaggggccactctcgctgtcccgatgcagctccctttcctcgctgtcctcggccggccgcccaggccccagcgagggtggtgacctggatgacagtgactcctccctggaggggctggaggaggccggccccagcgaggctgagctggacagcacgtggcgggcgcccggggccacctcgctgcccgtagccattccggctccccggcgtaaccgaggccggggcctgggggtggaagacgccacgccgtccagctcgtcggagaactacgtgcaggagacaccgcttgtgctgagccgctgcagctctgtgagctcgctgggcagcttcgagagcccgtccatcgccagctccatccccagtgaaccttgcagcgggcagggcagcggcaccatcagccctagcgagctgcccgacagccccggacagaccatgcctcccagccggagcaagacgccaccgctggcgcccgcgccacagggtccccccgaggccacccagttcagcctgcagtgggagagctacgtgaagcgcttcctggacatcgccgactgccgggagcgctgccggctgccatctgagctggacgcaggcagcgtgcgctttaccgtggagaagccagacgagaacttctcgtgcgcctccagcctcagcgcgctggccttgcacgagcactacgtgcagcaggacgtggagctgcggctgctgccctcggcctgccccgagcgcggcgggggcgccgggggcgccggcctccactttgcagggcaccggcggcgggaggaggggccggcgcccacgggttctcgccctcgcggcgccgcggaccaggagctggaactgctgcgggagtgcctgggagccgccgtgcctgcccggctgcgcaaggtggcctccgcgctggtgccaggtcgccgcgcactccccgtgcccgtctacatgttggtgcccgccccggccccggcccaggaggacgactcctgcactgactccgcggagggcacgccggtcaacttctctagcgccgcctcgctcagcgacgagacgctgcagggaccccccagggaccagcccgggggaccagcgggcaggcaaagacccaccggccgccccacctctgccagacaggccatggggcaccggcacaaggcgggaggcgccggccgcagcgcggagcagtctcggggcgcgggcaagaacagagcagggctggagctgcccctgggccggcccccgagcgcccccgcagacaaggacggctcaaagcccggccggacccgcggggacggggcgctccagtcgctgtgcctcacgacgcccactgaggaggccgtgtactgcttctacggcaacgactcggacgaggagcccccggcggccgcgcccacgccaacccaccggcgcacatcggccatccctcgcgcttttacgcgggagcgtccgcagggccggaaggaggcccctgccccgtccaaggctgcaccagctgccccgccgcccgcccggacccagcccagcctcattgctgacgagaccccgccctgctactccctgagctcctccgccagctccctcagcgagcccgagccctcggagccgccggccgtccatccacgaggccgggagcccgcggtcaccaaggacccgggcccaggaggcggacgcgacagctcgcccagcccgcgggccgcggaggagcttctgcagcggtgcatcagctcggccctgcccaggcgccggccccccgtgtctggcctgcggcgccgcaagccccgagccacccggctggatgagcggcccgcagaggggtcccgggaacgcggcgaggaggcagcgggctcggaccgggcctccgacctggatagcgtggagtggcgcgccatccaggagggcgccaattcaattgtcacgtggctgcaccaggcagcagctgccacgcgggaggcctcgtccgagtccgactccatcctgtccttcgtatccgggctgtcagtgggatccaccctacagccccccaagcacaggaagggacgacaggcggagggagaaatgggcagtgcccggcggccagagaaaaggggcgcagcctcagtcaagaccagcgggagcccccgttcccctgcaggccccgagaagccacgtggcacacagaagaccacgcccggggtgccagctgtgctccggggacgaacagtgatctacgtccccagcccggcaccccgtgcccagcccaaagggacccccggcccccgcgccacaccgcggaaggtggcgcccccttgcctggcacagcccgcggctccagccaaagtcccgagccccgggcagcagcggtcgcggagcctacaccggcctgccaagacctcggagctggcgacgctgagccagccccccagaagcgccacaccgcccgcccgcctcgccaagaccccctcctccagctcctcccagacctcgcccgcctcccagcccctgcccagaaagcgccccccggtcacccaggctgctggggccctgcccggccccggagcctccccggtgcccaaaacgccggcgcgcacccttctggcgaagcagcacaagacgcagagatcgcccgtgcggatcccgttcatgcagaggccggcccggcgtgggccgccaccgctggctcgggcagtcccggagccgggccccaggggccgggcggggaccgaggcgggcccgggggcgcgcgggggccgcctgggcctggtgcgtgtggcctcagccctctccagcggcagcgagtcctccgaccgctcgggcttccggcgacagctaaccttcatcaaggagtcgccgggcttgcggcgccgccgctccgagctgtcctcggccgagtccgcggcctctgccccccagggcgcctcgccccgccgcggccggcccgcgctgcccgccgtcttcctctgctcctcgcgctgcgaagagctccgagcggcaccccggcagggcccggccccggcccggcagcggccccccgcggcccgacccagccctggcgagcgccctgcccggcgcaccacctccgagagcccgtcccgcctgcctgtgcgcgcgcccgccgcccggccggagactgtcaagcgctacgcgtcgctgccgcacatcagcgtggcccgcaggcccgacggcgccgtccccgcggcccctgcctcagccgacgccgcgcgccgcagcagcgacggggagccccggccgctccccagggtggccgcgccgggcacgacctggcggcgcatccgagatgaggacgtgccccacatcctgcgcagcacgcttcccgccacggccctgccactgcggggctccacgcccgaggacgccccggccgggcccccgccgcgcaagaccagcgacgccgtggtccagaccgaggaggtcgccgcccccaagaccaactccagcacgtccccgagcctggagaccagggagccccccggggcccccgccggcggccagctctccctcctcggcagcgacgtggacggtcccagcctcgccaaggctcccatctccgcacccttcgtgcacgagggcctgggggtcgccgtggggggcttccccgccagccggcacggctcccccagccgctcggcccgagtaccccccttcaactatgtgcccagccccatggtggtcgcagccaccaccgactcggccgcggagaaagccccggccactgcctccgccaccctcctggaatagtggcctaggccggccttctggaacgttctctcccggccctgcggcgcggtctggctgccccatgggcctgcgctgtagacgtcccccataggtcgccccagggcctctgcccacccgagccccaccactctcagaacccccgcccagcgcacggcgacctcgcgcctcaccggaagaccttgcctctgtgccgcggaggtccaggaggaaacggggcggccgctaggcctcaagtcccgaccgtggagcgctggcaagggcgtcctggcccagccctgagcgcgcggcccttcccctgtcggaagccgttgcttgaccccgggcgagggaggcggtagcctccgggtccgggtctgggtctgggtccgctgcttcgcagggacagcgctggggaggtgacggcgcccgccgcaggtggggcgaggctgggggagggcggcgccgcggcgggcctgccagctgggggcctttgcggcgcgcaggggcgaagcctgtaatcactgcagccgccggtaattcgctaatgagggctttgcagggattgttttcattctcagccccagctgtgggagtgcgggtgggggtgtggccgagccccggcaggaagccccgcccagacggtgttcagggaacccggagcccaagcgctccggcggagcccaaaagggtgggggtgggaggggcagaggccaacggatccccctgcctgtcgcaccccttggcgggagacgggaaggcagcgggctgcgtacgatgggaccctggtgcagacgccgggccggctgacatttggaccccatcccagaggagatgctggctaccagctggggcgaccccaagggtcgctggagtcagtatcggcccggcgcagccgcggcgggcgaggccaatggaaaggagactgaggggagtcccggcagtgagcccgaggccctgggacctggagcccgcgctggcctctccccagcggagcctgcacgttacggagaccatcacatgtgggcgtggtcagtgcccaggaccgcaccg

SEQ ID NO: 5172 - DNA, 3400 bp, Homo sapiens
gcgtagaaccagtggcgatgggaggaaggggaccggtagagcggggctgggtaagcctccatccagccgggctgagccctggtctccgcagagcctctgcccctcccgagacacccgctacctggtgttagcggtggaccgccctgcgggggcctggcgcggctccgggctggccttgaccctgcagccccgcggagagggtaggtccgcgtggagagggacggggagccgggtcgactgcccccgggcccccagcccctgagccagccgcgtgcccacccaccgcagactcccggctgagtaccgcccggctgcaggcactgctgttcggcgacgaccaccgctgcttcacacggatgaccccggccctgctcctgctgccgcggtccgagcccgcgccgctgcctgcgcacggccagctggacaccgtgcccttcccgccgcccaggtgcgcgcaggcaccgggacacggggcaggagcgggcgggggcggcgtggcctcgtggccgctctcaactcctccaattgcgggttccaggccatccgcggaactcgaggagtcgccacccagcgcagaccccttcctggagacgctcacgcgcctggtgcgggcgctgcgggtccccccggcccgggcctccgcgccgcgcctggccctggatccggacgcgctggccggcttcccgcagggcctagtcaacctgtcggaccccgcggcgctggagcgcctactcgacggcgaggagccgctgctgctgctgctgaggcccactgcggccaccaccggggatcctgcgcccctgcacgaccccacgtcggcgccgtgggccacggccctggcgcgccgcgtggctgctgaactgcaagcggcggctgccgagctgcgaagcctcccgggtctgcctccggccacagccccgctgctggcgcgcctgctcgcgctctgcccaggtggccccggcggcctcggcgatcccctgcgagcgctgctgctcctgaaggcgctgcagggcctgcgcgtggagtggcgcgggcgggatccgcgcgggccgggtcgggcacagcgcagcgcgggggccaccgccgccgacgggccgtgcgcgctgcgcgagctcagcgtagacctccgcgccgagcgctccgtactcatccccgagacctaccaggccaacaattgccagggcgtgtgcggctggcctcagtccgaccgcaacccgcgctacggcaaccacgtggtgctgctgctgaagatgcaggtccgtggggccgccctggcgcgcccaccctgctgcgtgcccaccgcctacgcgggcaagctgctcatcagcctgtcggaggagcgcatcagcgcgcaccacgtgcccaacatggtggccaccgagtgtggctgccggtgacccctgcgccgcgcggactcctgccccgagggtccggacgcgccccagctcgcgccccttcccatatttattcggaccccaagcatcgccccaataaagaccagcaagcaaccggctggggtgtccgtgcgtgttagggggcccgtgggacctcccttgccgtctctcctcgcgcacggcccgggtccgccctgtagcgctcgctgtctctcccctgcctgaagcgccccaccaccgtctttcaggccccggacttggtgccgggtccaggcgtaaaggagcaggtgactctgcggccgcagcactcgctttatttcgccagagtcgcggggcgtccagaaggggcccctggactccggcgcggggccggctcagtcccgccccttgcctgcgcggagcttctggcgactcccaggccgctgctcctcgtcgggacgcctcggggacacccaggcctgcttcttcctgggctcggcgtccctggagtcccgtgcccacggccggtggcccccttcgcgtgactcccagcgctggggtagggcttcccggggctccctggcggcccgtggcctctcctctttccgcggcctctctttcttaggtctctcctccttccgcggcttctccttccgcggcttcccctctctccgaggcctctccttgggtccccggtctgcgagggtcacacggtcctcccggacggcctctccggtggcctcgccgggctcctcttcgtcgttctctgcagcctcccgactcccgggaatcttgggtctgacctctgcctcggcccggggcgcaggcggcgctgatggaggcgcctgggcctcgaacttaggctgcaagacagagtggggtcctggggtaagcgcccaccttccccccggcccgggctccttctttccttggggatgaaggtcccaatgcccgcggtcagtggaaggaagctcttaccaggggcgacgatggctccctcggggctgagcttggcgggacccagggctcgggcacacgtgcttggagtgctgcctccccagggacggcgtctgcagcgacagggtcgggacccgagtcagctgggccgaggcacggtccacactgtccatccctccctcacccctagagcccccctccctggacagttggagtggggctcccccggtacggctgagactaaggatgcccccgagccgtgggaagggactccgggactccgctgccgcggcgccccttctccgaacctcgctctttcaattggtcattcttccccccgaccacgggctgtaggaggcccctagcaagggaggggtcgcaggagtgcccccggggggcgctcacgagctgagcggtccccagagagggcgcaggggaaaggcggcagaacgctacgaggcaggaggggttgcacaaggttcatccggaagccagaacctactcgcggcgaggggaatgggccccgcaaaaggtccacaccgggtgagaggggcgcgcaaggcccgtcacttaaggggagatgcacaaaccaactttgggggcgtgcaagacccagccctggagaggaggctcccagaccccaccctggcggcacagcgcctttccttggaggaataggcgcacaggtggaccccagcctcgccccacctctggggagcctgcgctcaccgcggcacagctggaaagccgagcccagcagcgccaccagcgaggcgagcaccaggcacttgttgagcgacaggtctccccagggcagctcctcgctcagggccgggggcggcggcggcggctgcaggggcggcgcggtctgcgccttcttgcgcgcggggacgctccgagggcctgcgggggcaagtgcgcgctgcgctgtggtcactggctctgtgccgcccccttccccgggcgcaggggacaagagacaggcctgtgccctgaacccggctctctctgcctgcctgtgcggccccgggcgcaggtgaacccagccccgggtgccccgcagctgcacg

SEQ ID NO: 5173 - DNA, 1143 bp, Homo sapiens
ccgaccgctagtggctgggaagtgggcggtgctggggggtgagtctcggcccctccaagatgcgcctcccatgaaatcctccagtcccacgtgtactcacacgcatacggatgcatgcacacgcacagaaacacacagggctcggacacagctgcgcgcagacaagcaaaggaccacgtccacgtggaaacaggtgtgcgcacacgtccccgcgcatccgcgcgcacaagcgctccacacctgggaacgtgcgcacctgtcccccgcccccggcacacacacagccgccccacactggaacacctgggcgccagcgccgggccactcgggcacgcagggcgctacgcagggccgcgcacacgcttttcggccacacgcgcacagccctccacgtggacgcgcgggtacacacgcccggggctcgtagccgcgcacacccgcacccaggaaaccccagccaccaccacgcggggtccgatcgcctctgagcaccctccgccccagccgcgcacccgctgcgcgcccgggacgcgcacactcgcgcacacaccggcccttcctgcgcacgtcccgggcccacccccgcctagagccctcggggtttccccccaccccggcctcggggtctctccacgtctccccgccgacgtgctcacctgctcagggggcgcccccgagccgcgccccgcgcccgcccccaggagggcctccgcgagccggctgcacaccccgaggcggtcccggctgcacaacttggagcgagttgctccgtttcctcattttgggggcgaagaagggtcggggagtgggggaaagcgggaggcgccgcggcctgggaggcccccgcgggtcctagcgccggccgcactgcggtctcctccgcgcgccgccgccgccgccggcccctccccgccccgcctccgcggcccccggcgcctcccgcgcgccccgggcggggtcccggggcgcacgcgggctccacgcctggccctgacctggccctgtcgggcgtgcaccccccacccaccctgggaagcggggttcttggagcgtggaacgggcgccgccagtgcgcgcggcggggaccgggggtgagggagagtgagctgcccgtccggggagataagcaaggcgccaagcccg

SEQ ID NO: 5174 - DNA, 220 bp, Homo sapiens
acgtgccggtgacgcttcgtggagctggcgagcctcgcctgtcccgcgactgagcttgcggtcgccccgattctctagtagaccctggcgtggggcacctgagatctccgccactgaaaaggcgctatagaaatgcaaggaattatgattttaataaaattgtctcatttaggagcgagcttctgcgctgcctctgtcgtcggagcccgggtttgccacg

SEQ ID NO: 5175 - DNA, 1860 bp, Homo sapiens
ccgcgatgtcagccacggcccgcggcggtcacggagccacttcagcacctcgcgatggacagtgacccccggcgtggcgcgagttccctgcggtccccacgcgggcctgggcggcgggtccctccacggctccgtccagacacccggaggcacctgccaaagctgcggaggtggacgaccgggcgtccaagcacgaactttctcgccgaggcacggctgccgggctccgtcctgagggtttggggcggcgaggaccgccggggaggagggcgcgcgagccggaggccagagccgggccgggcagggcgcgcccaggagcaggggagacggcgacccgggccgaggcgggacggggacacgttacctgcccgtggagcgcggggaaggggtgcgcggcggcggcggcggcggagtctggcgcagagggcagcggcagcagcgggagcaccggctcgctcggggccggccagccggggagaccggggagcagcggggccgcgggcggcggggccgaggcgagcagcaccgggggaaccacgacccccgcgctgagccggagcagcccggccgagcccggcaccatccagacccagggcggcggcggcggcggctctgcgtccatcggccagaggagaggctgccgccgccggggctgctgctgctgcagctgccgccgccgccgctggaacctggcgcccgcctgcatcctacatccccgcgctgacggcggcggcgggggcggcgggcgcccgagatgctgggccggcggcggcgcggctccggagcgaactcacttggctccgcggcgcggccgctcgctccgcccctgccccgcgcgggaagctcctcctcctcccgcccgcgccgccgccgcccccggacccggcccccgccccggtccccgcccgcccgcgcccctccccgccggaccccgccccgccctcgcgctccccggccctggccggggtctcctccccgctgcgcccctggacccgggcggccgcggaggacgtgggtgggagagggccgagggcgcgcccggctgggctcccgccgatgccggccccctggtggcctctggccctctgggacccagcgcaccgcgagggaggctccgggctccgcactcaagggcaagcggaagccgaggtggcggcgccggagccaggcatgtcccgctgcccagcgcggggctgagggcgcagacggggaccgcgcgagccgctctctacctggcctcctcggagtccagggcgcggagggtactgggctgcggatccggcgcaggcggccccggacgctgctaggcgcgggcggatttctgttgcacaaatgggccaaacaggttcgtaaggcccccgcgggtcccctggcccggaagttgagccgcgggtgcctggtctgaagttccgcgccccacagtggcccgcgggcctcggcggctcctgccctacgccctccaaggcaccaggcaggtggccccagggcctttgcccacgacaccccctgggtggggcaggaccacccctctgtgaattcgtcctggatgcccccaggcacagtctgtactcctccctcccccagcacacgcggcctctgacgctgcacgccgagcttcctgggacccaggacgaaccgggctccaaggaccctcgctccgcccggaccacacgcaggcagcgccggccgagccgagcctgggtccgcactggccacgcgcagccaccgccagacggcgctagccctcccccgctgtagaccctgcttcggaggccgccagcctcctccccatcccgggtccacagcttcagtgcagcccctggcgacgcgcgctgacagctgggcagagacttccgtgcg

SEQ ID NO: 5176 - DNA, 441 bp, Homo sapiens
gcggggccttaaacgttatccaatcggggacactgggcggggggccgtccaatcaggcccgcagctggagcagacagggcggcttccgggatttggcgcggcctttgtttctcgctgccgccgaagctccaattttcgtctgtctgctttgtgtcctctgcacgtagaagcccagcctgtgtggccctgcgacctgcgggtattgggagatccacagctaagacgccagggccccctggaagcctagaaatggtgagagtgccggtccgacatcccgagagagggaacggggctggttggaaccggtgggaagcggctgtggcgggacccaggcctccccgcagtcagcttcacaatctgcgcccagagttcttgcccagctcggcctcagtccccttcagccatacgatggcggccgcgctgacagccggggccccggcg

SEQ ID NO: 5177 - DNA, 5587 bp, Homo sapiens
gcggtgcctccgggaggctggtagccggggaagcaggcacgtgaatccaccgggctgccccaccccaacctgaggtcagagctgaggcgtaggggccggggtaggggcagaggtgccgaaacgcactagctggggactcccgggggaaggagataggagagacccaaggcgagccttaggactcgcccctatgactatgactacgcgctgcgtccgaaccacatgtccaccccgcatttgccttcggggaccagaccgcgctccctcagatggctggggagggagcagactccgggtgaaggctgggggaggtaccgggatgccgagtacgccagagcaggcgggggatgggttccggcttcctgccgcctcggcatctcgctttgcaccgggcaaagaaggggccacgaccggcgaagagcgcgtggagacacagggacccgcgatccaggggcaggaaccccgccccctcccggaaacctcccgggccctgagtcgtgcccggcgctccccaccccaccccacccccgccgcccctgccgtcactcacggccgctgcgggctggctagcgtgtgcgctctccgcgccgcaggcacctgctcgctgggcgctgtgcgctcacttctccctcgcgcactgcagactcccggcgctgccgccgccacccagcgtagtctccggctgggcacagcgttccgcccttctcgcggccccgggcgcccacccatccgtcatggcccaggcctgggccaaacagcggggcagctggttgcccaaactggggtaaggagttgagggctgggagctgcagagaggaccgagggacacacggggagcagggatgagcggccgtctcgagccgtgcagactgggaagaagccagggagagtttgggtgggaggactcccaacccaagcgggtgcggggcggggctgtactccaaccagaaagacggtggtccctccgagcgacccccgaggagagagggggagcgctctggggcgggggcggggcgggctgtggcaggagaggggagggcgggggcgatgcagcggtggaggcggcttggcgcccagccactgaccgccccctcccttcccctcccctccccctctccccgcctctctccggctccgggtccgccacgccggacccgctctccccgcgctgcgctgggtcggacgccaggtctgcgcgccgcggctgagcgcccactcgccctgcggaaagagccgcggaggaaccggcgggggcggctgcgggagccgaaggaggtggcaatcgggagcagaaccagaaggagacagggaggcagaagctcgcggctccgtggcacgcactccctcggccagggatgggtcccggcgcggcccagcccctgcccggcccgccgggcagagactgaaccgcggatccccaccgtcctgtggacgaccggacagagagaggcactgaccgatcgccagcagcctcccggtgggaccgcgtctcctgcacaccccgcgcagcgccccccgccggagccgcaccgggcaagccggcgagggagcggggctgattggcggccgccggcggccaggggagggggcgccgcgcggggccatggcaggctcggaggcgtcctagcccgagccggagccgatccgagcccacgcggccgccgcctctccgctcccgggcccccgccgccaccgcgccccccgcgggagatggaacagcggaaccggctcggtgccctcggatacctgccgcctctgctgctgcatgccctgctgctcttcgtggccgacggtgagcgcgggaactttgctgccgctgtggactcgggggggtctttgctggggccgccaccgagaagaagaagaaagagaacgaaccgggaagcttcgcggtctccagcaatcccgctgtgcagcctgggcccggaggggtagggagaggcgagcggcgaagggtcgccgcagcagcagcgccgcgcccgagtcgttcccagtcccgccggggccccggctgcggaaaggatgcctgcggggagcgggagtaggcgcgccccagccaggctctggcggtgcggccaggggcgggggagaagcacgagtcgcccctgccgccccgccccatccggagggaagcagtaggcagccgatggccggtccctgcctcggccctgcagccgcttccccgaactttgctagcccctccggccgtgcgccagggagcagctgcggggtggggggcacaaggccagccagccagagaccgactgcctcgctttaggttgccccaggcccccgacctacagctggtcacgcctctctctctctccccacccccagctgcattcacagaagtccccaaagatgtgacagtacgggagggagacgacatcgaaatgccctgcgcgttccgggccagcggagccacctcgtattcgctggagattcagtggtggtacctcaaggagccaccccgggagctgctgcacgagctggcgctcagcgtgccgggcgcccggagcaaggtaacccgccgcccacgcggtaccggcgcgcgcccggctcgcgcccggggcggcgaaggctaacccagggagggaagcagcgggcttcactcgcgcagggcgccgccctgtggcgcagcccatcttccaccttcgcatcccaaagcatcttcaaagtcagcagtggttacccccaaacctgtcaattattttgacagcatcgctgttcccaccacctcccagaactccattcacgcccagcccctaaagagccacacctcagcctggtcgcttgctcgtgctcgctggctgcggccctctgatgggtgctgggtagtgaaggaagcccccttggtcccatcaggctctccccgccctctgccactttgaggaccccagggctcccacggctgcgttccagaggccaccagaaaaccgagtaccggaaagccggcaggacctccagccctcaggggcacagaggggccacttctctgtggccgaaaacaggcccacgctgcctgtctgcctcaaaacccacactctcttacacactctagtgtgctcgcgtgcacacacacctacacacacacctacacctacacacacctacattctcccagggtcccacccagagttactcccactgagcctcccgctgggtgctgtccagacacagcggccctccctccagttcttcacggctcccagtgagctgggggaggattttgagccacgcggcagggcctaaggatgcccagagggaaggagaggggctttccttcccaccctggtgtccatccagtctccccagttcagccggcaggtgtgcaccagggcagccacccgttggtcaggcaccatgctagctccaaagcccgcttcctcctgggaaactcttggaaagccggacgtcctttgtgccctcaacccccatcccccgggcggtttcggtcctagcctgccggaggagggtgcccttgcctaaaggcggatccgagttcccctagccagaaggccgcgagcctcacgtctctctctccctctttgcattttaggtaacaaataaggatgcaactaaaatcagcgtaagtgtggagcccagcgcgggccgcgggagaccccttctggccgcctcgggtcccgcagctccctcccttagcaagccgcggcggccgcgcatgtggggccgcgcaagtagggcagcgatcgcagccttgcatcggtggctgctcggcgtgtccgggcgccatctgtcgccggttgcagggtcgggttctcttttgtgtaaatcaagggtccaaggcttgagtcccctaattcggctcggcgctgacctgtaaaactccccttggtcggactgcgcgcttagggcctctcgcgcctgccagcctccgctctgcgggcattcctcctagcaccgggagcgcgcggctgctcgccctcgccgcgaccgtggcgccagcttcccgccccctctgccccgccctgagcatctgctctgcgccctccgctgcaaccctttatcctccgcctggattgcgggtctgggtgcggggtgttgcaggcttgcaggggacggggtagggggtggttgtgccaggctgcgaggggcccgggtcatggggttgctaactctgggaggagatgcgcccaagcttcccacctggagcgtagaaaggcctggagatgacgaagcctcctcgtgggctcggttcagaggtgagggctccctgggtgtttgttgagagccgtagagcagtacttcccgaagtccccaccggggcgcaggggaggagcacttcgctggggggcttctggagatcccgcggaaaggcgggttggtagcaggtggccagggagccaggcagcagcctcagcgttgcttgccttcttaagaaagcacagtgttagctgtaaagggcggggtccggtgacagggtggctttccttaggaagcgattcgggcaggccctccgtgctccgggaggtgaggagggccggctggggcgggactgtcggttggagcgcgtcggggcgggaaagacgtggggaagttaaggaacaaggaatccagcctggggtttcctgaaggtgcaggagggaggaaggagaggtggactctgcccttctgaagcgccagctacgggaagacaagcagtgttggtttgtatgggcggggcagatgcaaggtgggcgtttggttaacgtgatggggacgtggggacacagtccaaagagctggctgcctggcgtccacgcagagttggaagccctatgccactgggtagacgcgggtgaaagggaagccggatcgtgatggtgggcaaaccaggatccgggaagtgttggggtgcgcggatgagggggcgcgacggccagggtggccagaagagtaggtttgggagctgcccagcccggcctctaaccctgctctcttgcagaccgtacgcgtccagggcaatgacatctcacaccggcttcggctgtctgccgtgcggctgcaggacgagggcgtgtacgagtgccgcgtgtcggactacagcgacgacgacacgcaggagcacaaggcccaggcgatgctgcgcgtgctctcgcgcttcgcgccgcccaacatgcaggccgccgaggccgtgtcccacatccagagcagcggcccgcgtcgccacggcccagccagcgccgccaacgccaacaacgcgggcgccgcgagccgtaccacctccgagcccggccgcggcgacaagagcccgccgcccgggagccctcccgccgccatcgatcccgcagtccccgaggccgcggcagcctcggcggcccacacgcccaccaccacagtcgcggcagctgctgctgcctcgtcagcgtcgccgccatcgggacaggcggtcctgctgcgccagaggcacggctcgggtaagggatcgcggagagggggcgcacgcgcggggatggcgcagggctagggctgcgccgggacgccccggggggctccggacccaggacccgccccctgggcgcatttgcatatgcatactccttcctagttaggtcgggagcgccccccccagggccttcttcccgcg

SEQ ID NO: 5178 - DNA, 3643 bp, Homo sapiens
acggggcgattctgaaaagaggctgatgaaaatcgagcccgccctgccccggctgggctgggaacagttcgcagggctctgccgagtgggcgagtgaggcgcgcgagcagggcgcccgtcccccctcagccccggaaaatgatcaagtcaatcgtgtgggcatgtttcattattcattgaacacaatcttttacaacgctccgtttacgtgcccgagtttgctcctgacgcccgcgtttcaatgtttaaggtaaggaaaacaaaggtgggggggggatcgcggggcgcggcgcggtgcggggggcgcggcgcgggggggcggcggcgggtgggggggcagcttcggcgtccgggaggtggcaaagtgagtttggactcttggcgcggcccccccgtcccctccccctccccatctcggcgaggcctgccgcccggttccttctcgccccatcgcgattaaaaaatacggtctaattaaatatccgtggctgtgacgttggcgagagaagctgtcagcgggtggggggtggggggaaagaagaggaaaaccgagccggcggctgcggccgggcatcgtatggcgctagagaacttcggcggcgagcgggacctgcgcctgggccgccgcctccccgcccgcggtcccgggaccgttactttgaaaaggagtcccgaggcctggcgcccggcgcgcgatcgggaccccgcgtccagctccggggacccggccggcgccccccacccgcgagcggcccgcgagccactctcaggccccgggaaactttcaagagggtctggggggtggggggagtaaaaaggggagggggtaggctggggccgcggaaacttctgctcaagtgactttccccattttctcctctgcctgggacgggggttcgccttgcgctctttctctggtccgcgctcactgcggggttccggcccctccgcccgtggagagagggtaatttgcaaccttttttttttttcaattaaagttagctgatgcttacaatgtgtcaaacttgcgggcgccgagagccgctgagatctgccattttgtgattgcatcggcctcctgtgccccgggagcctggccaggctgaggccggagagttggtttcagggctgaggtgccagggtccgaacccgcgaccccaggaaaggccgtggcgcctgcaagcgcaggcggcgcccgcagcacctgccccagccgggcctcggcctgggggcccagccgggggccaaagaggaaataaataaataaataagtaacaggttatggagggaaaagagccggccagtcccaggctggagaaatgaggccaatcagagcgaggaagtgcgggcgtgggggctctggaaggcagaggagaggcagggcttgcgcggcgtctgggaagagtgcaatctggggggacgcctcccgtccccccagcgcagatgcatgactggggtaggaatgatctttgctgataagcctttttctgtttgcttcaagacattatttttcgaagatgaattgaggaaaacagtcgtaggcgagactcggggtgtattttaggcaaaaaaaaaaaagttagggttgggggagagctttcctttgatgagtaggaaagtgtccagatctcgacgcgcccatctgttgcagttttgcaaataatttaaaatatagatatctccatatagacggatgtatgtgaagtggaggaaggtcgaaacgcggggaagttagggaaaaagaaagaaaaagggctgggcagagagagacctgtgttgctcactcttcactctgcggagtgaactccggcagggctttctttggggacaggtggaaagttaagtcccccccttttcacttctgtattgtgagtggttcctactgtgtgcctgttggagaacatgtccaccgttcccgagttaggtggaggattggaatgttggggggcggggagcgttggagttgaggacgcagtggccaggggctgggggccgagaaagagcagggcggggtctcagccccgcgtgcgggtggcagcggcggccgggttttgtttgccagatattgttatgtctaacgggtgcctcgccggagacgtgatttgtcagccgccttcgttttcactttagcagaaaatacggcagctgcgaggtgtcccggcctgcggggctcgggcacccggtgcgtcctgggggctgggtcgtgtgcgcgggtgggagccggcggccggcggggccggggcgaggggcgagcgggaggggcggagtgagcgagcgcgcggtacggccctccggttcctcctgcgccttctcccggcagccgccgccgccgccgccgccgctgtgcaatttagcagaaatccgacaggggccgcgtttgctgagcgcatccggcggccgggcagcccgagcgggccgccgggcctggtcggccggtgtagaggcgcggagggggccggcggaggggaccggcggggatgggcgcgggaagcacgcctgaccagagcacgcgccgttccccaaccctggtgtccccggcgagttgggcagccccgcgcgccctgaccttgacgccccagtctccagccagggcttaggtgaacttggggtggggtgtgcgtgcgtgcgtgtgtatgtgcgtgcgtgtgtgtgtgtggaaggggtggtgagactgggaacgcgctgttttctttcccagtttgatactagcaactggatttttactttaagaccggctttgctctctgctggggttgggagggggggcgatcttttcccatcactcacatctttgttcattgttcactgagtggaaggcaggcgacttaaagagacgaaagagaggaaaaaggggtgagagacggagagaggaaaaagaggggggcggccagaagagggaaggagaggcgtggggacagggcccccgcccccgccggggtcgggtttgatggtgaaatagtaaacccacgcacggagggtcgccaggaaagtggacattaccgctttaattaacttcgagatgctccggcggcgggacctggcgtagccgtgacgcgcccccataaatctgcccggcccggggctgctccgagaactcgtacagtagcggcgtcagatccatcccgcgcctcccagtccggagtccatttgcataattggattttttttttttgcctccttctttctccctgaaacttgtttgaaaacccaagtgaaaaccgcgacgatctgcacactcaaaagcaagtgccaagtaagtgccctgcggtggcctcggcgcgccccggggtgagcgcgcaaagccgggagcgaggtgccgcgagctgcgcgccgccccgggccggcctcgcgtgtgggcggctgggcggctgggcggcgggaggacggcctccgcgggctccgggactgcccggctggctgctcgcacaactttttttttttcccccgtctgctgacttttcgggccaggtgaagtgtttgggccacgcgtgtacctgtggcgagactcgggaggcgatcttggggggcgcgcggtcgcagttgggcatcttgcctgggtcgggggcgggcagtcggtcccagtggccgccgctgagggcagagctgcgagcgagcggggccggctgctggtcgcgccgcgccg

SEQ ID NO: 5179 - DNA, 808 bp, Homo sapiens
ccgggggagctgcgaggccacccccagccggcgcccgggcggattgcgagcccccgcgggtccggccgggggagcggagactggccccccgcccgggctggggcgcctgccgcccgcgagccggaagagcgccccattcacgagcaggcagccctggcagagggttaattgaggatcattgttgttggttccaggaggagcgaagcgcctggagatcgggcgcgcgggcgcggctctgggagcgggggaaggtgaggggaaatgggacatgatggcattaataatcgttaccaaagacggtgggagtaacaaaggaatgcgtctccgagacgccgcccagccccggggtgttttctggcgcggtcgcggtgcaggaacgcgagccccgccgccgagcctcccgccgcctgcgttcgttggcgcggcgcccggcggtagtgccaccccgaggccgagcgctgcccccgccggcccgcggctgccagccggccctgcccgcgcccgggccccgcgagcggccgcacttcaccttacggaggggagataatgagatcaattagaggcgccgtcaccgcgccggagacagctgccgccgcatagtaatcacccgcgggctgggtgcgcgggggctccccgctacctgcgcgcctgctgctcccaccacgcggcaccgacccgggcgcgcccccggcccctgtccgcagcccacagccacaccgcgcaccctacaccctccttgcgcctctgctggggagctcaccccctccactcgcacagtgcgctgcggcccggggtgtgggaggtcccg

SEQ ID NO: 5180 - DNA, 3415 bp, Homo sapiens
ccgaggggaccggctcgctcactcgttcgcgctccctggctcggcggacaccaggcagtcccccggcggtcggccgctcggaggacgcggaagatgtcccggggaactcaggtgaccccgcccgccacccacagaaagagccaggccggggttgcttcccattccctctgcagccggagagctgaggaggtagggacctggcgcggctcagcgcgctccgcgagcggctccccaaatgggtgcgagagggaagagggcagagcgcggcggggcgtccggggggcgcccggtacccgaggcgggcgcacgcacccaaacaggagagcggcgcccggagttactcagtgcgggcagaagagcggggcgaggagcggggtcgcgcccgctggaggcgcggggcgagcggaggaagaggaggaggagagcagaaggaaggggaagcggctcgtacctgctgcgcgccggggcgcctgctgcttcctcctcggcatgatgcttctccggcgactgccactgccgccgccgccgccgctgccgggctgaggacagggagggagggggcggcgggcccgcgggggggcgaggcgggcctgctctcagcctcccccccggagagcggccgcccgcaggatgctgctgcgcccaggctctccgcgtcccccccgcgccgcgctccgccgcgaaccccgaacgtgcggagggaagaaggagggcgggcgagggaggctcggggagggaggagcacgggggggaggaggaggcagaggaggaggaggtggaggaggaggaggaggaccgcgctgccggcggaatgggaagtttgacaaatcgctccagaggccagaggaggagggggcggggaggagcggcggccctgcccccccccgccccgtccccagacgaggtgcgcggggttcggggctggggggcggggagagggcgggcagagcggtgggaggaggagcgcgggagcggcccggaccggtactgccccggcccccgcccctaggccgggggtcacggcatccggggggacgcgcagccgccgccgcggcccggggctcggcggtccagtcttctgcccgtggcgcggctggagcggcggcgtcggcaacaggcaagcttaaaggaaaaggagatgatcgtgtcaatcgcccgcccgcgggggcgccgcgcccccgcccccggccccaggcccgcgtgggacccccgccccgccagcgaaaggggtgccgcccctccgcctccgccccgtgcgcacacgcgggggcgcggcgccagccccgccgagcccgtcccggggcgctcgttaccccccacccctattcccacccagcgttcgtccccagccaccccccagctgccccacccggctcgcactcctctccacccgccgactccggagcccccagcgtggtccccgggccggggctggcgtcccccggggaagccagagcccacgggcaggccccctccagggaggaggcgggcgcgggccggggcgggtgggggcagccctcagaccccgcgccacccagctcctcccccaggacccgccgtagccacttcccccaattttttttccccggacaaactttcctgggcccgtcccgggggtcggtgtgggagggggttccttcaagtttcctctcctgactttgggatgatcagggtccctccaccccgcccctcgcccccgggagccgggccgcgccccccatccacggcgcgggccgatcctagggcgggacgggggcgggagaaggaaaccgggctcccctgcccatcccccgccaggggctccccccgagagcctagggggccgccgcgccgtgtcccgcgcccggcctgccggggctgctggactagagggattgattattgattggtgatcggggtcgctgaggctccgggccggcccggccgactggccgcggcaagaaggagctggctgggcggcgtgggcggcggggcgacgcgggctcacttacgggcggcggtgagggcgcgggtgggccggagctcatgcgggcgacccccgggcggcggcggctgagcgggagccggagcccgagcggcgcgggcggcggcgcatcgatgcgctgcgggctcgattgcgtctccctgggccagctctcaggccgggaatggggcggccgcgccggggccggctccgggcgctgccgggcggcggctgctggagcgcgggggcggcctccgggcccactatccccgaggcggccctgcgcccgggcgcgccggctggggctctggcgctctcgcaggccccgaggccgacagtcccggcgagggcgggcgccccgcgctccagcaccggctgcctgagcgctcctggagcagcaaaccccagacttcttcctccttctctccttccttccttccccctccccttatctttttctttttttagtctctttctccctctttttctgccctgtgtcctttttattttttctctacgactgtttttgcaagtttgtttcaaaagttcacagcatgctttcttttcttttagaccgggagacagtgatctcacccacacggtaagatcaaaagtctccgctcgcccagcctgcgggcttgggctgggtccagacgtctcccaggatgcagatgcgccgccgctggcctccccggctataaagccgcctccagcgcctttccgcgcgcaggagcgctcggagttgtggggtacggaccccaggcggggcagggagtccgaggcgggctgcggcggggctctcgggctggcggactcgggggctgaggcgccgtgcgcgttgggtgcccgcggccgcagaggccagaaccgctactcctccaggccggggagacgcggccgtggagcgtgaaacgcttcttgcaagcgaggaaacggtgagttggccgacaccgccggcggcctcaccattctggtggccgcgctgagctcctgtcgcctggaggcgggttgcgccgcacggggtcagctcccgccggctcccagctcaccttcgaagctcccacttaggcgcgcccggtgcggcgtgtgcacagcgcggggcgccgcacacggaagcgtgtagttctccctggtcgcgcttttctcctcctttccatcccctcgctgttcttgcaaacctctgttccttcggccccctcccactgcgggccgcggcctgaactcgggtctccgcgtagccggccgccgccgctgggtcgctgcctggccctcccccgctcaggcgccgagcgctgtgcgatccgccctaacatctgtccgtccaaccattggcgcatccatcagtgtcaatgggctgcacattgcagcgacagcccgccacgcacaacacgggctatgcggagtgcacgcagcaaccatactgccatgtcgggacacgcaaaaaggcccccg

SEQ ID NO: 5181 - DNA, 3415 bp, Homo sapiens; identical to SEQ ID NO: 5180

SEQ ID NO: 5182 - DNA, 1592 bp, Homo sapiens
gcgaagcgacccagcgcgaggaccagtccccaaccaacccgctcctagttctgggcgccttccccagcagtcagatgggggcttcagaggccggtgcgcggccacatggccccgggccaggcagggggtcgtggggacgcatctgcgctaggcgcacagtattcctgggcgcgggacgggcgaagcgccgtgggttccaagctgagctgggtcggccctgcagcgccggagagcaaggcggcgcagggaagggagatggggcgggatgtggggaaagctgtcgactgcttggatctctccggcccggatggcgccagctgcctccagctcagcctgcggaaatccgagctcttcccagcggcccgacggcccgggcgccccgcagaccctgggctctccccgcggtgcctccgccgcccgcccctgcgtcctggcccggcctccacgcccctccgaggtcccggcgcagcgcggccgccgccactccccccacattccagaggccgcagcgccgtctccttcctcgcattcctgcccccgcaaaggagtccctccgccccgcgcgaggccgcggcgaggagggggcgcggcccggcgcctgggagcttacattcctccgccgcgcgcgccgccgagcagggcgccgcgtcccccggcccgcgcgtggccgccggaacgaccccggcccggcgccggccccgccccgccccgcgcccaggggtcccggggcgggctccgggcttcgggcggacgatgcggcggcccggccggagcggcggcgggaagcggaggcggaggtgacgcgccagggccggcgggccgggccatgcagcgctccagggcgggcgcggacgaggcggccctactcctggccgggctggccctgcgggagctggagcccgggtgcggctctcccggtcgggggcggcgggggccgcggcctgggcctggagacgaggcggcgcccgcgctgggccgcagagggaagggcagcggcggccccgaggccggggcggacggactgagccgcggggagcggggtccccggcgcgcggcggttccggagctcagcgcgcagcctgcgggcagcccacgggccagcctggcggggtccgacggcggcggcggtggcggcagcgcccgatccagcggcatcagcctgggctacgaccagcgccacggcagcccgcgctccggtcgctcggacccgcgtcccggtcccgggccgccttcggtgggcagcgcccgctccagcgtttccagcctcggctcccggggctcggccggcgcctacgctgacttcctcccgcccggcgcctgccccgcgcccgctcgctccccggagcctgcggggccggctcccttcccgctgcctgcactcccgctgccccctggccgggagggcggcccaagcgcggccgagcggcggctggaggcgctcacccgggagctggagcgggcgctcgaggcgcgcacggcgcgggactacttcggtgagctcgctcggcccggcagttccctgcgcgcatggctggggtccggggttccgagactgcctcgggtaggcggccggatcagcggaggagagcacg

SEQ ID NO: 5183 - DNA, 903 bp, Homo sapiens
gcgatcccagaactcgttccccaccccgagcccgtttcccgccgcctcctcgcccctgggagggcggccccattaaccctcgcgacccgggccgctcctggcggtcctgaccccgccaccccgtcccgcggcgggggtttgggggtgaggggcgcgccctggggcagaggattgcgcggcagggtctgccacagggcagaggccagggctctccgggaaaaaggcaggcgcatatatgcccccctttctgggaaaagacggggaggggggcttctcctgggagactccaggcttcgaaattcctcgttccctatcctccggcccccgcacccctcctcctccccgccacgcaccctctcccctccccagccatctgttccactccgcagcgccgcgacaaacacggctccagctcgcttccgcccctgcccagccccctccccaagccccggggagtgggggagtgagcagacgcccttctcctaggaggccggaatttctgcctccatctcccaccggggtccggctggccagaggcaagcttcgagaccccccaccaaccaccaccaccgttgcgagggccggtgaggctgcagataacgcttgcaaggacgggagtcggggagggtgtagggcgagtttaaaggacgggcagagcaagccccgggaagaggcaggggttttccctcccgggtcgccgccccccgcaccctcggagccagccgcagccacgcagcgccgcctgccgggcacaccaaggacctggcgcgcacgtggcgcttacccccacccccgggtccgctcctggctcgcgctcagcctccccagactattcgcaaattgaggatcccggacacagagtgcagagaccccggcaagcctactgaaagccagccgaacccg

SEQ ID NO: 5184 - DNA, 1592 bp, Homo sapiens; identical to SEQ ID NO: 5182

SEQ ID NO: 5185 - DNA, 382 bp, Homo sapiens
acggactgttcgcctagtaacatctgatcacgtttcccattggtcaccgtttccggaagcccgctctcccgtttccggaatccccgcaggcgctgggtctgcagatggcgtccaggtacacagtggcgagtgtgattccgcagtcttgggctgtttggccaagcgcccgccggacatggtacgccgaagggtcatcggcgtggagtcctcgctttcagcgtccgcggctgggaaatcggccatcgctacggcgggaactgggactcgggctgcgtcccggcccttccacatcggtccaccgcactcgtgggcgcccgcattggtgctgacataatttcctgacctctgacccgtattgtctcgcgattaaaggtaaaaaacg

SEQ ID NO: 5186 - DNA, 665 bp, Homo sapiens
gcgcctccacgaaatccgcttacggacacgatcccggggccacactcagccagacgaatgtctggcaaatgacagtcacttcacgccagactctcacagtccttcacacgccactcccactgcctcagggaaccacaagcacaggcatcgccccgcccggcgtcctcctccaaagattggggcaccaggaccgcgggcccccactcccacccagcacaaagagtccggcgctcagagctagcggtttcccgaggactcaccaccaagcccgcggacacaggccccgattccacacttaacgctgccaaagtggcagagccggcgcgggctgggacagaggcggcactgaggccggcgctgtcggtggctgagagcgccacaagtctcggtccgttacaccaggggcgacgcttcccagaggcccccgcggctcacccgggcgggactggcttcactgtttgcgcgtcctgagaagcagaccacggtgttccagggctcacagctccgcgcaggggagctcagcctaggttttgcacgagcggcctcccgcgagcccagctctgagagattgggagcgcaacttggtgctgagaagaatcgaatcgttccgctgcttcctgcgccgaactacatttcccagaggccttcgcggccctacttccccg

SEQ ID NO: 5187 - DNA, 764 bp, Homo sapiens
acgcgccactagcgcgttcccacgcacaaaccttttccctgcggccaacctgcgattctcaactccccgccctggttgctaagggaggcgcgcagagcgcttgtgcctgcgcacttccacaccagcccgtgtagtgtgacgctgggccccgtccctgtgaccgggccaggctcggagctgcagggaatccggactttcgggctctctggaaggccggggagaggccagtgtgggaggacctggtggggaggaggccgtgttacaaaccctgcgcggagctgcaccgctgctgccagacactgcgacgccgcgaccttttctactccggactacgtttcccagcggaccccgcgggagttgggccggcggcccctttgtgtcctccgggggcggaggcagctgaggcgcttctttccgggcccgtaagggctgggttccatccaactaagggtagcggtgagacccgagtgcagattccccgagccttcggggcaggaaggagatcttccaccagttctgttctgcaggtcgggagtgggctgaggagtggcgtgtgggtctccggaagctcgtcgcaggccatctgtgtgactccggtgcgagtggaggttggtaccgttcagtgcgaggctgtcaccccgtgtgcctgtccacgtcctgtgtgactgggtgcgaggaagtcaatggcaccgtggaatgtgaggctgtgagttgaggcgggagcgggcgactgttcgctgcaccttgttgggccgatacccgcg

SEQ ID NO: 5188 - DNA, 1394 bp, Homo sapiens
ccgcgtctgggttcgcagctccgggtacgctgtagttccgcacccggttgcccacgcccgggaccacccactgtgtcttttcggaactgtccagcgtgtcctcctagaccccagacacccaccccaaatctaggtcccagcgttttgcaggggaccttcatcctggggcgttcacctctgacttccctcttgggccttttcgctacggccgagcctaagtggctgaagcgcggacgaggatgcgcggggcctcggtctccaactgcaccacaggccgcacccacgaacctggtccggcacagttactaccgcccgggcctccaggcctcagggctgcagaagctcagtcccgggaaaaaaagcacaccggcctgaggctccacaggaaccttttctccaccttggcccggcctgcaaaacctggcccactccgcgctcttttccctcagaaaagcagcggccacagtggcgcccggctcccagccccagcctcacccgactcagaggatagcccagccctgggagtcagcggcgccagaatacgggagagcgcctgtctccgtcgcgaatgcgctagcgcgcgggggggcggaggcaagtcccgcagctgctccgggccgggaggggcgcgtggggccgggtctcggcggggatagtcgggccggggagacggagccagaggggccgcagtgtccctcgcctcaggcctctacctgtaatggccgccccgtgactgaccagtgccattaaagataatccaggcctgctcccctgtggacactgcggtccaaaatttaaaaaaacaatattccgcctttttatttttcatttggttctcggctcggagacaggcggaggctgcgagccccgccccgcccccagcgacgcctcaccggaacctttggaaatcggcttctgcctcgagtgcgcaagcgcgcggggggcgaacgctggggcccttcagggagcaagggagaagtgtggggccgcacctgccgaggggtcgggaggtttggaggagggtggaggttggctacaggatcccgatggggatggagtgttcaaatctaggcctgtagccgtgaccctggcgtgagttggatggaggaaaccccagtatcgcgagcctggaccaaggcgcggcgcgtgctgcctgtggtgtttgctgagtgacggccgccgcgcccccgcgtacctggaccgagtgcctggccgctggcggagtagtgtttccgtgcacggggctgctgcgtgcgcgtgtgccgttctctagcgggggattaggatggtgccgcagagaaggctgcgcggtggtgcctgactctgacgctggctgtagcgggtctctggggtctttgcggtttgtgtctgcgtttgtgacgtacctgacatcg

SEQ ID NO: 5189 - DNA, 949 bp, Homo sapiens
acgtcgtgtttcgttactttaaaaaagaaaagtcacttccgtcaggcccccctttctcctcaccctcgtgtgtgcttcgaggccgagatgcagagagcaagaaaaaggagcgaaggggatccctgcgcgtcccaagcacccaccagcgcctacggtgtgagatgaaggcgcaccccctgggcgcgaagcttttaaagcacctgcccagggagacatttttgaagttgtcagggcccctcctctgtcccctcccagacccgggtcctgcacaaatcctggagggttagcgggcgaggcggccaccgcagcggccgccaacgagcagctgcacggaggtgcagaagaaggaggccactgccattctcctgacaagctgggggcgtgggaggcctcgggagctcgaagtcgcctcgagcgggggtgggcggtgagcggacccccgggtgttgaccaggtgtttggtggtagagcagggaaggggggaacggacgtcgaccctagggatccctcacccgctcacgctccttggcgttggccacacgccgccgctccagcaccaactggaggttttcagtggacgagtagccgcccgagggcagccgcttgagccggcagacagcggccagctggggcagcggcccgaactgctcccgcaacacgtcctccagcacctcggcttgcggggtgcccaggagcgcgggcggcgcggcgcggggatctaggacgccgggcgcggggtccatggcagggccgaggccgctgaggccgggctttcacctgcgcacccggggccgcacgaggcccgggcgggggcggggcgggggcgggagctggaccacctgcaaccattccccggctgcgtattccaatcccggcctcctctctggaggctgcgtccaggcatcgcgttgaataagccgcacaggtgtgactcgggagcgctggagcg

SEQ ID NO: 5190 - DNA, 1365 bp, Homo sapiens
ccgcgcggtcctaggtgaatctggccgaggcttctgcgtcaaggacggcgcgggtcagctgaggccaagaccgcaggcactgccctaccgctctccagatcacagctccgcctctgcaaggccccggggaaacgggcatcccttcttcagtgagcaaaggagaaagacggagcccggtggctgggtgtttcgcccaggatcaccagcgagctcagagtcctccccacgaccgccccagggtgggcatttttaaaagcggaggaagggagggaacacactctttggtgctgtgcccaccttgcctcgcacagagcgggcgctcacaggctttgggggccccgcccggaccgcagtggggagaggccgccccatgccccgccccgccaaatttaagagccttcgccgagcgccaggaggttcccagacaaccggtcttgctcgctgccttttgcagaatcttctcacttctcccgagctcccttccttgcgtccgtccgggcaacggccgcgtcatgcctagccccaggccgcgaggcagcccgccacccgctccctcgggctctcgggtccgacctccgcgctctggccgctctccggcgcccaggtcccctactggcccgaacacgccccgcgctcccggacgcttcgagtcccctttctcggtcgaggccatcctggcgaggcccgacccctgcgcgccggcggcctcccagccgtcgggctccgcctgcgtccacccggccttctggaccgctgcttccctgtgcgccaccgggggtctgccctgggcttgcccgacatcgtggctgcccgcctacctgagcgtaggtttttaccctgtgccagggccgcgcgtggctcccgtctgcggcctgctgggcttcggcgtcacaggtactgcggtcccggcgcccgcacgcgggggactgggcgggggctggagagcctaggtcgccactgccggcgccccagtgcaggagagggcactgagtgtgagaatcacacacggctggagtgggaaggggctctgccaccgtttaccttgcagttgaagccgaggaccgcgacagtcttgctgaaaaagaccccggcgcgaggcttcccccgcacgctgctgaggtgggagagggtgggtgtgagggcggcgcagcgcctgaatgcggtgggcaggaggccagcgctggggctgcaaggggacccagccctgctcccggtctccgcgtcccttgactccctcgcacaccccggggtagcgcttagtgacagagacgcttcccaaagcggctctcgacccgaaccaatggccctgttttttttttttacggggtagggggaagtggacgctccgggcggtgctgttgagcg

SEQ ID NO: 5191 - DNA, 2638 bp, Homo sapiens
ccgggggtcgcgttggaaccccacaggaaaaaggcgcggaaagccgccgggcattttccggggttccatagatgtccccagtgtcctagtccgtgcatcagctcgcgcactcggagggactctaggcagggggagggccccgcggccagtatgtgcgtccgaggctttcccgcagggggcagtgccgcccgcccgcgcgccgatacggtgggagggggtgggaacctgcgcggagttctggaggttctttgggagaaagttaggggatgcggaggggtgggcgcaagacttccaggactccagggaggccgtggggagggccgccgagggtgcagtgtgaggcgcaggagggggttgggggcggtgcacgttgcagggagacgcagcccctggaagatgcgagtgtgaacgtgtgagtgtgagtgcgtgtgtatgtgtgtgtgtgcgcgcgcaccgcagctctccgggttccgcgaggcgcgcgggtgtcagcttgcagccggggctcctccctccggcccccctgcccagcccggcggtccctcctccctccctccccgctcgcccctccccggcgggccaggggctgggacgccccggcggagcaggcggcggcggtggcgagttggggagccctaggctcggcgctgccggaggggcccgagccgagccgcctgcgccccggccgggcagcgccgggcccgcttcccgcggggccacgccctgtcaaactttgttgcggcggctagcgcagcgggcccgcaagcgggcgggaggggcgccgggccgggccgggcagggcgcgggcggctaggggctccgagagcggcggccccggcccgcggccccaccatgccccagctcggcggcgggggcggcggcggcggcggcggcagcgggggaggcggcggctccagcgccggggcggccggcggaggggacgacctcggggcgaacgacgagctgatccccttccaggacgaggggggcgaggagcaggagccgagcagcgatagcgcctcggcgcagcgggacctagacgaggtcaagtcgtccctggtcaacgagtcggagaaccagagcagcagctcggactcggaggtaaggaagcaccgcggccacccccgggggatcccggccctgcgtccgctcacccgctcttgcctttgtgtctcctccgcaggcggagaggcgcccgcagcccgtccgggacactttccagaagccgcgggactatttcgccgaaggtatgtgcccgctgggacagccccccactctcgattcccgctgcgctccgctgctcagcccgggcggcccaccgtcccccttgcttgggtggacgcacccttgccctccgcctttattggcggcagcccccgtggggcgcgcgtggggggcgctggggtccccagctcccgcctcgagccccctgccgcggcgctgtcagtcccgggggcctgggcctcacctcgccttggtcttgttcgcagtgagaaggcctcaggacagcgcgttctttaaaggacccccgtaccctgggtaccccttcctgatgatcccggacctgagcagcccgtacctctccaacggacccctgtctcccggaggagcgcgcaccgtgagtgcccgtcgggcgcgccggggagggtgggaggccgcggcccgcaggatgcgcccccgggcttggccatggagtgggggatggggccttctgcgccgatcccaagcagaacttgtttgcggagttgaactactctctggcggccgagcgcgaggctgcgctggccagtgcctggatgaaagtaaagttactttaacttttcccctcttgcgggttgaggttttggagtccacctctgggatcttccttggcctccagaattcttcgcctgcaccgaaggaaacttggatttgtgcccgctttgggggggtctcgctttccttcttggaaatcggtcagctttctctggcagtggggcaaggggcctagggagctgggttggcgacgttgtcctccgactccgggttcactgggcggctgcaggctggttcctaagaaacccagttttcgtggcgggttattcacagcccccgttcccacccccagccctcgcaccggggcctcagcttttctgcggagctagctccgaattttaaactcgcgtagatgatttcgaggcgacccaaggcattcttcaagttgaggaacttggctttttcccccttttgtcgcctgcttttctcatttaaagcgagcgctgcgacactttaaacctgttaatgggcgcgtattgtgtgctgcccgctggcatttagagcggtgattaagcaaattgaccgggccccagacgacgtgcaaatgagggcggattccttcgccccctctctctggctctaaactcccgccccccgcgttgcgaggggcgcagctgggggctggcgaggcctttgtgtcccccaagccgccactccacccctaggctccctgcccaggtgctgggtccgatgacagatgttgggtgaacgcctacctactgtgtgccaggttcccgcgtgctgctgcttgggcgcgatgtgaatcgtagtagttctttgcttcccgcccagattcccattgcctgccacttcgctgtcgacg

SEQ ID NO: 5192 - DNA, 1531 bp, Homo sapiens
ccgcacaccgacccctgcgccggcccttgcgacccgcgtccgccctccccggctgggaagcacctgccagcggccctcacctgggtcgtcctcgtcgcggggcaccttcttgaagcagtcgttgagcgacaggttgtggcggatggagttctgccagccggccttgctgcgctggtagaaggggaagctatcggcgacgaactggtagatgtggctgagagtgagtttgcgctcgggcgcgctctgaatggccatggcgatgagcgccgaatacgagtagggcggccgcaccatcttcatcaggtcctcgcggctggccatggacagccagcccagctccccgggccccgcgggcgcggcgggcgaggcgggcgcggcgggcgcgggctgcgcgaagggccgctgagagcagccgaagtgccggcggcaggcggtggctgcagaaagggcccggccgcggccccggggggcggcggcggcggcggagcgcccaggtacgcggcggcggctgcggcggcggcggagggcgggcctcccacgccgggcccgttgagccacaggtaggggttggcggcggcggccggcggcgcggcgtagtcggccagcccgtaaggcgccctggctgccgggggggcgcccggggcggcggcggtggcggcgggcgggggcaggccgggctgcgaatacactccgaagttgtcgccgcagtagagggccatgtcggcggccgtgggcggctgcggcgcggccgcggcgaggggcgagcggggctggtctcgccgctcgggcgagagcatccctttgggggccaaccctgcggctccgccttcacccgcgctgggcgcccggtgctccgggccggggtcgggcgggtgctagcggagcgcctgctagccggcctcttataaccgagcccggcgcggctcctcctgggccggcccggagcggggcggtggccgcgggcctgggctctccacgcccccgccacgccccacctgcccgcgcgcccaaacccggagcccgcccgccccgcccctaccgcccctctgcccgggcccgggagcgtctgggaggccggcgcctccaggtttcgggcaaaaagcagcaccccattcctagcccacgtttcttaacatcataataagtaaagccacgaatattaaagagaagataacccgaacagtacgaatgatttctaaaaagttaacttggggtggccgctcgggccacctgcctagtcatccttttggcttttctacctctttcctcctaaccttttgtgatcgagtcgcggaattcacgtccagtctcaaccgatcggcttccagtcgaaaataatcgatgtgatttacaacgctttggggtatacggtagaggttattaacaggcccgcttggcgtgtccccttctcctcggggattctgtgattggaggaacggaaatcagtgttgagtttttctaaccaaactgtaggttcgctcacattcgggaagcatttattcgttttctgtgcggtttgtacgggctttcg

SEQ ID NO: 5193 - DNA, 2045 bp, Homo sapiens
gcgaaacggcagaggccggcagcccgcggcccacgtgcacttgctcagggaaccgttccagcgaaacctgacccggatcggaatcctcccgcagcacagcggccgtgtttatcggaatggaacgctacaagttgtcacctgcatccctctcccagctttgacagggaacacgcgctgcccccacgcccacaccgacacccggatccctatccagcccggccagagtcccaggggccagggaccagtgcagggagaaggtcccccacctcagccctcaggacccccaaccacagcccacccgcccccaccctgctcggttctaggcccagccgaacctacatgtccccgtagtgtcgagcgttatcatccacagtcgcccctcaaactgtgacccccacctgggagacccggaatcatccaggaccctggtgtggggggcagtactccccatatctgccccccgaaaactgctatggagcagccgcgcctcggcgggcaggtgagggggccgagcccaccagcgccgcagccccgctgcctaccttcttcagcgccggctgccgctcccgggcagacatcgccggccctgactttggggctgacaccgccaaagggcagtcagtgctcgcccaggccacttcgggaggcccaggggcacggcgaggggtcggggaaaggcgatcgcccactacagcccgcgcgcctagactgagggaggagccgggctgcagaaccggcggcggatggagacgggagggaggctgcgaggtcgctcgaggagagactaaggctctagaaacggagaagcgggcgctctgcgggaggcggcggcgctgccgctggccgtcaagggcgggaagtgttctgggactctcattaggggccgcgagcctcgagcgtcaaattcccgcggcgtccgcctagcgcgctgctgtggcgggcgcggagggcgcgcgccggcagtgggggctgcggcggcggagggcacgggcccccgctcagcgtcctcaccttcttggtgcagctgcctcccgcgagccgagacactcctgtcagggaagaggagcgccccggctgtccccctagagtctcctgctggggggacatcgcttccatgaagaaaatcttcaaacaaatcccagcccaggaggaggctacacgatcatgtccgcgggctgccggccggaggggcgaggacgcgcgggcggaggcgcggctgccgtgctcaggcagggagccgagctccgggtgctcgccgcgcgcctcccgtcggggccatgtacctccgcctgcgctcgacaccgcgggctggaggcgagtgcagcggcgacagcccgtcagcgccgcggcccgccccgcctcgggcccgccccctccgctccgggcgccctgcgccggggcccgcccccgcagccctcctcagccctcctccagcctgggccctcctagcctcgtcccagcctgcggcgcgcctggcgggcgtctctctatatatgttagcacaccggccaccggctgaccttttcggtctgtgactccgcgtgggtgcagcccgcaggagctcatcggcctgtgtcacgcacgggggcctctagtgcacggacacgcgcctctcccgccacctgcccactcccaccagaccccatcccttcccgcgccgtgcccgcggcggaaggcgcccctgcagcgcgtgcatccgcggagcggtggcgacctcagcctgagcagaggagttgcagtgattcctgcctcgctttcagcggactgcggagggaatcccccaccccaccccactggggatagggtggcacgtcgcagagtgtcgcagctgtacaaatttggaagcccacagcatcgcctgacctcttgtgcaatcccgaacgctagcctgttcgggtaaccctgagtgggcttctgcagccggtcatgtcagcggcccctgcacatttgcacccgcggtttccgctgtctgcaggctgcagagacgggggcattccaaacgtgaaagagcaatgaaggaaaatgcagacagagcgaggacgccg

SEQ ID NO: 5194 - DNA, 476 bp, Homo sapiens
tcggcccgcgcgggaggagtgtgacccaggtgccgcttcctctcgccgccgagggtcaggagcccgggagcgcgaccctcccccggcccggcctggcccggcctggccagtccccgcggtctctgcccgggctgacgcccaggaatgtggtcgacgagaagccccaacagcacggcgtggcctctcagcctcggtgagtacccgccgtggggaagggtcctggggacccactggaggccgcggcccgcagcagccaggggccgagccacggccacggacgccctggtgtcccggtccgtgccgggcctccaggcggaggaggcgtccgctgggctcagatccccgactccagccccggttccccggcgcctgggctgcgcggagtccctgtcccgcgtcccggacccctacgcgcagcctccacgcgctccgagctggagaagccgccagcccgccctcccagggcgtgtcgcccg

SEQ ID NO: 5195 - DNA, 455 bp, Homo sapiens
acgcgggcggcgcccggggtctgcgggtaggcaggcggcctggccgcggaggcttccccgagtcctgcgccttcctagagagggaggggctcatatcggctggcacagccaccacgggtaccgaaacttggggacgtgcccgaccatgcctcctccggtggcccgggggccaccccgcattgcttagaagtctcgcttcccgttcctcctctctggttcagctcattactcttccggtgaccctgggtatgccacgcttattctccaggcctcagtttccccatctgtgctgtgaggagtggaaggaacgggatgactaggagccttttaagaccgagtattcgaggttctttccggccccgcggagccaggaggtgccagccgagatgcgcgtgccgcgcgcgccctccagtgcccggttcccgcttctgcacggtcctcgctgggcaagggcg

SEQ ID NO: 5196 - DNA, 749 bp, Homo sapiens
tcgggcggcgcgcccaggtgcaggctcgctctgcggaggagggcgggggccgggcaagcagagggcgcccagtccgggggcgccggtctgggctgggcgcccagagcttacctcggcgcgcgggccgcgggcgcgtggggcagtggctcctccagccgggaagctgttgctcacgctccggtggttgctgcggtcccgccagggctgcaccggggcttcgcgcagacgttctcccgcgatctgctgcagcccaggcggtggcggtggcggtagcagcggcggcggtggaggtggcgcgggcgacagctcggcccggcgcggcccctgaactgtccaactcttgcccgcgccgggcttaagcgcccggccgctgcccccgcgctgagcgcctgcgcaccgggcctcgcccaggtgaggggcgtgtgcccggagcccgctgggcgcgcccggcccggcccggccccgccgcacgcccgcccccctggcctggccgaggaccccggggtttggacgtgccaacgccactctcgcgcgccgaagctgtgacggtttactaagcagagacttgcgaggcacacagagagggaatgaggcggaaccgttcgggggctcgttgacactgcagagcctcccgcagcatcgctgccttaaatcccgcctttccaggcgtgcgcgcacagcgagccagaggaggctccgtcccgacctggggtcccccgcggtcctcagcccgggggctcgggtccccg

SEQ ID NO: 5197 - DNA, 1134 bp, Homo sapiens
ccgaaaaacacgttctaggcgccgggattccagatacctgggaaatagagtgcacgcagctgttgagaggcctcgcgcttggcttctcctatcactgaggcgcagaggtgctgtggacagcccagacccacacggcgcccgaggtgaaacagaaccctcagtctccctatgaggccactggcactctcggctgtccccagagctctccgacttagagctgaatgcaaagtaagcgctcgaaatgcagaagtagccggggccgcccacggcacctgcctcgctcggggcgagagaagacgccaggctgaggtcccagcgacctcaggcaccagctccgaaggagggcggggagaccgcaaaggggaagtgcccggagggccaacggcccccgcgcaccctgcgcccctctgaagcgcgccgcctccccgcgccggggactgggacctgcctctggggaatccgcctagaagacggcggcggactggggtcgggcactctccagggctgtcaggccctccccagccctgcacctgccgcgccgccccacctcgccaggaagtctcagagaccccggggatggggtgggagcgccttcccatcgcgggctcaaaaagaaggaaggacgcccccaggggtcgtagaaggaggactagctccaagccacaactttcttcggacccaaggcaggccggctggggctccgcgcctacacggcccctggcgggggtccgcgcgccccgggagccccgcggctcggggaggaaagaggagacaagagacaggcgaggattacggggctgacccagccggggtagggaccatcgtggaaaaactttggcgaggtggggggacgcggaaagagagcggcccgcgccctgcaccttgcgccgggcatcccgcgccagtgcctcgctcccagtgccccgcgccccgcgccccgcgccttgccttcaccccgggccagctgcatcgcgcccgcgccgcaggaaccgtggagttggaaagtgggggcgccgcggctggggggctgcttcagctgcgcctcggccagcgatcggcgggccgggctcaaatccagccaggctgggcaggcggtggccgcgcgactggggaccgggcgccccgccctcctcg

SEQ ID NO: 5198 - DNA, 1645 bp, Homo sapiens
tcgcgcaccgaacccgagccaggtctggctccagggcagatctaaccacctactccgaccgagcttccgaggccggcgctctagccttcatgcccacctcccggagacgccccgtggagaccctggcgcctaaaactgcgggagcccatctactgcgctcaggtggccagctcttgagccttccctatccgtggctccttgccggcatgcaggcatgcacaagcataccgccgagcaggaggatctaacgaatccagcttgtggacatgccctaatttccatttccgcctcctccaggtctgttcaggtgaggatgatgggagggaaaagcggtgtacagccgtaacattggcaccctgcaagagccgccggggcactgacacagagggacaccgcattggagatgcggtgtctacggagatttattgcgcgcggtgaaacactctaagcaccgcgcggaacaactgggttcagctccctcatcccggaccttccccaggaccacacgtcaccctttatccccgaacccaggggcccctccacgctgcgctcacctgccctgtttcgtaatgatcatctcagtttggtggcggtggaatttgagccacagaggccggttgcacaggtagacgtgggcacggaagccagaacctggaacccccaggccccccagtcctccgcaagatcccgccgctgcggctccagggtacggcccgtagagcggagccccctggctgtactgataggtgcccgggccgccgcccccgccgctgctaccgcccgcgccactgcccgcaccggctcctgggccgaactgcgccctcccgggtgggcacacagccgcggggaagccgccggggggcagcatggagccgtaggggtagcgcgccccgttaggagccgggtacacaggtccgtggggcgccccagccgccgcctggtacgggaagagtgagcagggcgcagccagctccgacccctgaggaccgggggactggaggtagtaccgctcggagctcaggctgtccatggagtagcgcgcagtggccgcagccgcggcggcggcggcggcggcggctgcagcggcggagggcagctcctcctccccgcagggggagcccttgcggccgtccgggggccccggcttggccactgccgcagcgctggcaaatgcgtccccggcgtcggtgtcactaagcatggccgcgggggcccctgcgctggcggctgcgggctccccgctcaccgcctcgcaggagagactgccggaaaacttcttggacgctttgtctaagtccaacttctgaggagagggggccgcgctggggaggtggccagcgctcccgccgctgccgcctcgcgcactctccagcgggtagaagtgcgcgccaggcaggttcactgagctcaccaagagctgctcccctaactgcatgctttgcaaagcgcagacggcagctggctgcttcctctcctccggtggccttattataaaggcaggatgggggagccagcgccctcttccgaggggaaggtaacttccccttcctcccgcgccggggctacccacctgccgactcgcgggccgctactgcgcgtactggcgcgccctgaatccagcgtcctttccggaaggaaagcgccg

SEQ ID NO: 5199 - DNA, 4698 bp, Homo sapiens
gcgcctcgggaacgccctcccgctgcaccctacaggaggtcgtgggcggtggcttaacagccccagtgcagagcttgaaccccaccgtccagaaggaaaggtgagtgggggacccgggcgggaggtgaggcctgccggcagcggccctcaggcgtgctgggcagcacggctagcagaggcggcgcctggtcttggatgctgcagcggagacgccaaggagactgaatgcagggagcgaggcgtagcggccgcggagggtggggccgcccggaaatccaggcggcgccagccttgtagcatctgcaggccgggggcgcgcacacgaggggcacgtgggtgtggaggaaccggcgcggcggggcctccttcctgcagcgccgcggcggtcgagtgcccgtgctggaggaacggcgagtggggtgcctgccccgcgcaggcggtacccgccgccccagctccgcacacagcaggcacggccagggaccgggaccgtggcccagcgcctggaggcgctctccacgcgcatctttcccgatgccggggcgggaagccgagtggctttgtccggagatgccaggggatgtgggcaggggacgaagaggtttcccaactggccaaaccctggcttgaggaaagactgaggtggtcattgacccgtgggagcgccctggggcttcgagggaacggcagccgagcccgggagactggtgttgggtacccgcgggggccggcgggttccacgtgggtggaccccgagctgagggcagggtagggtcgcggatcgctgacctatgagctcccctactcccgcacaaggacacctgcacatggacccgggcttccacccgcttctggctgggttggcgccgggagcgcgcaggggagggacggcggcggagtgcggggtttggcgggtgaggtgggtgaggtgtggccgcgggggagggggcgaaggcactagaaggctgcggtcgcgctgtcgctgctgttcccaccgtcggcgcggggcgcggagggggcgaagaggtgcctgccagtcgcactgcggtctaggggtgaaaggaaaagggtccatgtaaaggagaaagggcaggcagagactcttgctggtgccagcaggcacggaaggatgtggccgcggggacttggagtttagagggcaacgctgggtgtcataatgccggagatgaccccgggtgcagaggcgattccagttgggtagagctacagagaacgtggcccgagaaggggagcttccttaaattagacatatcctgtgttgtcctaaacctagcatttaccctctcccaccccgctcccacaacctccagggtcctagcggagtcatttaagcgctcagtactaccagcttcattttaggtaaaaatcaagactaattctgcactttattaacctcctcgtacccaagtcaccacggggcagcttttcacagccctaaggcgtggtcacttcaagcccacagcgagttgctcgtgtcctcggcttctgctccgcaaatctcggacgatgccaccggaggacgctgaaggcaaaggctggtggggccaggcgccggcgagactgccgcgctagcacagcttccgcgggagccgagtgctgacgggcctcgcgaccccctcccgagggcaaacggctcggccctccagggacacttggtcagtgtcactctctccctaccgggtgtcgcgcattttctcaacagaacgtgaccccgtagacggatgaactcggaatcggcaaaacccgcctgcccttgtctagtctctctgccccaccacaccactgcccttcactgcggactgcgccgtgtgcgctccgggaccgcccctgcacctttgcccacagcttcccattaccaaggcagccggaggaagacctttccgagttacctgtctcacgtcagcagccacaccgaggcggtccccctcgcaccactccccaagtgcagagcccctgaaagtccgaggctcctgtgccacgcaccctcccccctgcggggcgaccccgcgtatgcgtgtgtgtgtcacgcgtttaatcgcacagagtaattcccagacgtgcaagacaaagcatttcaagcaaagatggtccagagttcaaattggaaagcacatctcgaggcgctgaatctgttctcgccgtctgcctcggtctctggggcgtcgcatccaggagaagggttttaactccctgccagatccgctcggaattagctcttctggcggtgcagcaacaagtggccccgccgcctcccttgtgcactcggagggactacatcctcctcctctcccagcccctagtccaaacgggagtaggtaatggcggggaaagggggaggtgacgagagcggggagaaggaagtacatattttttaattgtgaaattgtctgtctgcgtgctgtgctctgggattctcttgtctcaatcaacttcaattttaacgtggccgtaacgttaagattaagacctagaaatgaaaacgtacccacctttcttattacaaaggtcgtttgttgttgttgtttttttaaaacaccaagtaaccccccccccccccccccacggacttatactttgtttatgagatttctccaaccttggtggtttggagaaatgaggtgggggaggggaggaccaagggcagcaagacgtccactacgaaaataagatacttactaatttaatagggccgttcctttttacataagatgctcccccaccccccaccaatttacaataggtaaactttgagcttcctcaaagtttcgctatctagcgtttatgcccgaagctttacgaataaactccctttccaggtaaacctgcccaacccttgtcctatgcccagcgaagcccaggtacgatgggtcaaggacccctggcttccacattgtctgagtcacgttccagttggaaaggccatcttgggcgagggacgtgttgcccgactggtctaaataaggaaagaaagtggagtaccaaagaatcaagggcctctgttcctccccatcccgccaccaccaccaccggtccccgggctctgctgagcgctgcggcggtcttggctgaaaactgcgtccccgcccaaatcgagcgcaaaactcccttggacagaagtttgaaagaatccagtgtagaaacagacttctccgtccaatttggttttaatcagtaatcatataagtatacccacataaccacctaagtggagagcagacgcccagattcacggtccccacgtgttgctggagttggcgcagacgcgtgtgcgggcatagcggcggacgtgacaccgcattttctccgaattcctgccatctagggtggtgccgccccaagagggggccgtggggaggtggggtaataggctgcgcaatccacttgctctgggggagcttagggttcagagcagagcgcaactccggggggctgtcgcacagccccattctcccacaccagaagagcaatgctccttatggatgattaatagccgggcttctcctgaccatgcggcgcgtccctgccggcaccacttagttgttttaatttgacctttattagcaacgtgctcccagaggctgcgagttggattcgcaccacgataacggccctctccccttccacccggccggcttcctgggaaggatcggggactgcagctcccgcgacgcctcctcctcctgcgcagggagcaggcctgagttcctccacgtaatgacctgggagacctcaggcatcccggggcctggtcggagggtcttcgggccctggagctgggcggtgtctgcagtgcaccgccgtgagtttctctcgggtacaatgtgctggtgtgcagagaggaggaaaggaaaaaaaaaaaacccaacaccactcttaagtggcactggcatctatgaagtggcagtggtctacactgagcgtgcccttgcctggaggtgtagggggcggttactgcagccgaggggagggtactgcggccaagggcagggcgagaggacagtcaaggccggctggccgcgtgggagcctttcctctccgggttcagcggccggaatcaccagcactgcggctaaaggggctggtaggctctcctgcaccccgcgtgctcctccgccttctctgtgtcccccggcttttccaggaggaagatggggtgcccatcgcgaatggggcgcgccgggccgcctggccgggcggtcacgtgtcccccctcccccgccactgcggcgggagttccaatcagagcgcgccagggggctcctcccgggcaggaaccacccggctcggcggcggagggtgggccgccgtcacctgaccgcccgcccccgccccccgcgagtaaggggcggtggtagcgtctgctcggttacaaatggcccctcccgcccggctcgcccgctcgctcgggctcggcgcggacccgcctgggcgtgctcctcccgccggctccaggcgtcccaccgccctgcccggcgccagcccgcggtcccagccactcctgagggcgcgccgggcacccagcgcgtaggctcgcccacggaggtcgacacggaagtctggaccgccgaggcgtgtggctcgtctaccggcaggtgagcgtgcaccgcgggcgtgggatgctgtggggacagtgcgggggacgtgtggggtcttcggatgcgaacgcgagtccgtgcg

SEQ ID NO: 5200 - DNA, 462 bp, Homo sapiens
tcgctgggatcctgtgcgcggggcacgccagcgattacaaacgtgtctcaattctgttgagtcaaagccctggtgccaggcgctgcctccttcctgctcgctcgagtcccgcaccccctggcccccctctagttggtgctgtgctcagtccctcctgggtaattcactcaggaacccgctgcggccaccctccgtcctctccccaacctgggccgagcaacaagtggagccagaattaattccatgggcgagaggagcacggaggcgagtggagcgcgctgccgccagaggctgccaaggaggcggggtggccagcgcggggggtggaggatgggggcaggacgcgggagggaagggcagggggtggggggcgaggccccggggaccagcgcgcgagagtgcccagctgggaaatgcagctccgaattaacatcgtatgtttcataatcagtttacgagccg

SEQ ID NO: 5201 - DNA, 300 bp, Homo sapiens
tcgaactggcttgcccgtggcgggcttgtccaaagcacaggggcctccgccttcggtgcgcgttgttctcaggattagtgctgttgggagacaaagagccccagatacccgaggctgggagcgccggagagctcccaggtttcgggtaccctcccggagcacgcaagcacagtcccaggcctttagggacagatgggccagagccgtctgcatctgcccgcatcctttgggaggctgcgatgatcgcagccagggtggccgagcgcccggcccactgcacccggcggctgttttgcagcg

SEQ ID NO: 5202 - DNA, 554 bp, Homo sapiens
ccgagacaccccgggcgcgagcggcagtgctgcttgcttgctcctcctctcccccagcccttcccctccgtgacctacccactccttgcagccctcgcccgcaccttctccaacaccccggcatccctgcaccacctgctcgggcagccccggcgggctctgggacttgctgtgcgcgccgagaggaaggcaagctccaaacccctgcctggaagacgggctgtcgcggctgcaccaccagcaggaggaggaggagaagaaactatttcgcgataccccattctgcgggtgctttgccgctgccgcttctgctgccgccgatccgagtccgcgggttcgaacaccgcagcggtggggacggtgggtccggcgggcgccgggaggaggacaccagcggagccctgcactctcgtgccccgctcaccagcatctacttgccccctcgttccttccccagccctttagagaagggaccatgatttggaaacgcagcgccgttctccgcttctacagtgtctgcgggctcctgctacaaggtaatccccgccccggcg

SEQ ID NO: 5203 - DNA, 1153 bp, Homo sapiens
ccgccccctccgtagagaccgctagctgaggctgcaacacctgccccggcaaagcgtctccgcagccttcccggcttgcccgactcggcttcctccgcctctgccccggctgcggcaccacttcttggagccacgtctcggcgagcgggggccgcggagcgagggggccgctgtgccgctactcacccgagccgctcgggctggccgcgagccgggatccgcgagggctggcgggctctggcccccgaggacgcagacatgtggcttgaacctccgctcccctagccgttgcctctgtgcatctttctgggcgcccccagcgaatgcgagcggcgaggcgagggcgagcgcgccgaggaagggcgggagaggcgcggagcttggccgcgccgcgctgcgccgagcgccgggctctccccgcgagctccccgggcccgcgcgcgcgccccccactgcccccgccccccgcgcggcgcgtgccccccaccccccgccgcgcgccctcgcacccgcccggctccacgcggcgcgcgcctgccctggcggcagcggcggcggcggcggcgcgtcctcccccgaacgccgtctccagggctgctggctgcgctctccattgttccgcggctgctgcccggggtgggcggcgaggcgggggggaggtgtcggcttggccgccggggagggcttaccgctcgggcggaccctcactgcgagagcgatgcgggcccaggcgcggcgcgcgggggctgcagggcgcctagcactgggggttgccggcgcgcgggggcctcctcctggctcccaggcactcgctgctgctgggcgcccctcgcatcctcggttactatggatatctcgctcctccgccgccccctccgcgcactccgggaggccgccggggcggtagcagcggcgcggctccgcgggtgcccaggtgaccggctcggcagcggcagagcagtggcagcagccgccactgccgctgttactgcggtcgccgccgctggagagaggaggacgaggagggcaaggggcagaagcaggtcctgctctgtctgccccagaggccacctcgggtttcttctcactaaccaagcgacttcgtgtttacctcgcaggagacgcctcggcagtcctcaacttgtgtgcgccg

SEQ ID NO: 5204 - DNA, 1603 bp, Homo sapiens
gcgatacggtttccttgacgcgcccttaaccaaggcgttaagtttagcctgacagcatccctccctcctttcggttcctggcctgatgagccgcctccacctgcgagcggtgcaggcatttttgttgtcgactaaccccctctagcgccgaactggcggcatccgagccgcggctgccaggccgggagaaggctgggcttggccgggctctgcagcgctccgggctccgtccctgccctgggcgcccgcctccgccgcggggcgaggtggtggagaccgcggacgccgagggtcctcccagtcagcacgccgcgttgccccggccctggggcgggggccgcggagtcccaccaagtggcccgcgcctcggcttccgggagacccgagcgcggggagggagtgggtgccgcgagggggcggctcgcgcggggagagccgtcagcccacggcgcccctgcgctgctgtggatgtggccacgcgccactcggcccttggactgctaggagagcgcggcccgacgccaccacgccgtggacgctcggggacccctgaatcccagcgtcaaggctgcgacgatgctcgtgacctccaccgcgaagtcacctccgcaaggcgacgcaaggacctcggcgatcccgggcgccgtacacccgccactttccagcctcatgtaaccccccctctgctgcttcctcccggcgctttgcttttctacaactggaagccgcgaaggcggctactgcgctgagccgctcgctctgctggtcaagtttgggcgacccgcgcggaggagggtcgggctgactgccgccgctgagctgtccccggacgggagcgcctgtccacggcactcaccccctccagcggtggaaatgtggagaagtaagtgggaggcggtgtcgggaactgactcctcttaaaacggtcggcgccgctgctctgaaatgggcggctaagtgcttgtgggactaagggcggcctcagagatgcccggaaaatcgctgccacggccagagtgcggcgcagacgcggcagagttggaggtgtccgcggtgcaggctgctgcccacgccgctcaggccaggtgctgagggctcagcccgcgcctcggccgaaccactctcagccccgttgagccacctcgtccgcccggctttcatcgcaccggccagaggaaagttcccgcggcccccacgcctcttcacagctgcagcgcctcccctgcttttggctccgcaagtgcccacttgagtcgggagaggtcctcgggccgccccaactgcccgccccacctggcagtccgtccccgcccccgtcctcgcggtgaggcgctccccgccccctcgctcccctcccccaaaccacagcccgagctcgctcttgcgcgcgcgcgctctctccggcccaagtgaatagtcctcgcgcaagcgggacactgtggtggatgcaattcccctcgcctccagccgcgaggagctccccggcgccgcaggcagcgtcctcctccgaagcagctgcacctgcaactgggcagcctggaccctcgtgccctgttcccgggacctcgcgcagggggcgccccgggacaccccctgcgggccg

SEQ ID NO: 5205 - DNA, 1411 bp, Homo sapiens
acgatcagcgctttcggtgcgaggatggaaagaaacttcagaaaaactctcgccagacaacccggcagcacttggccccggaacagagaggagagaaagacctgaccgccgcactcagggccacccgccgcactaagtttgagggttccctctgcctccaggcctctgtcgcccgagctcaggctctcctaggtgcttcagggccgggctgcactcgagccccgaggaggccctgctagcgctagcgcggcggtgataaccgagggaggtgggtgagaggtgcggctgtcgaggcaaacgcagagcacccgcccagtcctccaagggccgagagccgggagtcccgaacgccgcttaagcagctccttgcttcccgcagcccgtccacatccctgcgggatttctggacgccccgcccggggacctagggaggagggagagaggagggagggagtgggcagcctgggcgcacgccaccggtccccgtacgcccggcaccccccgtggcgcggcgagtcaatgggatttgcacactcgaggtgtaacagcattactgcattaattaccatttccatttcacgtccagattgtttacttatctgcgggaaacatatgtcgggagaagttcacattccggattctgctccgctgcccaaggtgcaattccggggaggcggcgaggggggaggggagggcttcagattttttattacaccctctagccttatctgccgctgtaaattatgaggatcctccattgagcggcatatggagattatatacttttttgaatatcgtttcccaaagcctgcagattttcactttgaaatgaaacaatcctccgctggttcccccggggacaggcgtctcctgcgttcccccgcgcggcctgggggacccttctcgcagagcaggcgcgcaccccaatgccgtggccggcgcccagtggagacttctttcacagggtctagaataatcttccgcggaacacccatccatatgcagtgtttgagaactaaggcagctcccttgctctgttttcctgcgcctagcccccggacttttgtgccgtttgcagctctttttcatttcgaatacccgcatagacgcgagcccacttctgccctcttcctacgctgggcggctccaaacccgccgcgagggctgaggtgttcacacctgcccacggcagcctgcctcgccctcaagcgcctcaaagcttcctaagcgcttacattggtcttgggacagccgactttggcttctttgtttgtttgagggaccgcggaagtggcggggaatgtgcccccgcttgagaccgcttattgtgagccctcaacggaaatcctgcacggaaggcaaccgcctccccgctcgcggtaagcaggatccacccgagtagcggggaccg

SEQ ID NO: 5206 - DNA, 2629 bp, Homo sapiens
ccgccggggcccggaggtgcccgaagcgacgggactgatagcggaggaaacgcagcctccctccgcgcccgcccgcggtgtaaaccgagtacaggccgtggagccaggctgccccggctcccgctgggtcccaacccccgccccgcctagtgggccccgcggcaagcggcttctgaacagcttcaagagggttcgcggagcaaacacacgtattggtccgtccctttctcgggcagcgcggtcccgccatcagtcctgtccggcgcgtctagccatggactgcacggcagtcgggcggggaacgcggagagcgagcgcaccgacctgtgagagaaggccaagaggtctgcgctgccgacgcccggtcgcacctccgccccgggccctttccgcggtgaatttgggcaggagacgctggggctccggaaagagacgagcccagtagaaagcgcgcagagaggcagcttcaggccaggggagtgcaaggtcacagaggtcagggaggtgagcacaggaggacataaactgaggggacaaagaggagcgacaggagcttaggaaagcgaaaaagcacagagggaccctgggcgctggctccagaggcgggcccagagggtgtgaggtcaggctggcggcggcgtcgtcggctgcgaccggggccggcgtcgcgcgtccctgcatcctcgcatccgtctgcaccggcatgcggtgggctctcagagatcgaggcgcgaatgcagcgcgccggtcttgctgtcgtggtcccagtaagagcaatgcatcatggcgagctcgggctgccgggcacaagcgaactgcaggcccggcgcactggtgggcgcgggcgccgggggcgcggcggtggctgggctggcagggctgagctggcccggcggcggcgcggcggccccgtggtgcggtggggcaggcggcggtgcggcggccgcgtgcagatggtgtgcgtgcggatgcgggtgggggtgcggcggaggcgggggtgcggccggcgggcctcccaggccattgtacgagttcactacgccggggggcagcgccatgctctgcacgcgtgtgtacggcccgtacgaggcggccgggcccgccagccccttgaccacagcggccgcgccagggctaccggggcccgcggctgcagccgcagctgctgcagccgctgcggctgccgccatctggcaggaggcatagggcatgggtgagggaggctgcggtagcggccacgagttgttgaggaagccagactgcaggtacttggggggcgccaggtagccgtagccgtcggccccggcgcccgccacgccgcacccgcctgcggcgcctccggccccgaagagccccttgccgggctggaagtgcgcgggcggcggccggaagggcctcttcatgcggcggcggcgccggtagttgcccttctcgaacatgtcttcgcaggccgggtccagcgtccagtagttgcccttgcgctcgccgccgccctcgcgcggcaccttgatgaagcactcgttgaggctgaggttgtggcggatgctattttgccagcccttcttattcttctcgtagaacgggaacttcgcgatgatgtactggtagatgccggacagcgtgagcctcttctccgcgctctcgcggatcgccatggcgatgagcgccacgtacgagtacgggggcttctgcgccgggtccggcttctccggggctgtcccgccgccacccccaccgcccttgcctgggctcggcggcggcccttctggctccttgactgtgcgaccggtctctggggccagcagggcccccgccgcgtcctcgggctcggggtagctggccatcatgacaaagccggcgcgccgcggccgggccgcctctgctctccgctccaggcgctggcgcggcaaagagttggggcgcacgagtccgcttacggccaagtctcaaacttctggagactgcggatgccgcccgcgcttgcttgctggaggcctgtcgctgctctcccctctccttccccttcccctagggagcggccggcgggagtggagctcagcctctggccatggggagtccgcccaacagagaggggctccggcctcgccgcccctccccgctcaggccagtccccgccttggtgggttttcttttctgcgctcttcccctccccccgccccccggtttcccgaagcacgacccgcgtctctggcggagctgcctcctggagtccctagtgcgccaggagcctcgctctgttctgattcgtatgggctccaccgagttccgcttgcgtcaggcgccttcgcccctatagcggggcggccagccgcgcacgggcgagttcatctccaagtcactttttgtaaacgccccgcacagcctggaccggcctgcccccgcccagcgagcctcaggggcccagccgacagccaggctcacgcgcccttgaaatctgccggtactcgctctgcgggctgggctgggagatgacgaggaccccggtggggtctgcccgcacccggccaaagcccaggaagctcgggccccagcgaggaaaggcgctccaagcctcctcgcggctttcaggtgaaagaaaacgactcctttgctctgccgtttgctgccg

SEQ ID NO: 5207 - DNA, 1686 bp, Homo sapiens
ccgcggctgcccctgcttctcggagatgacgcggagccctgccattgccatccaggtccaaggctatctactctgcccgacaacccctagcaccactaggcgctgctctagtgtgcgcctggcgccctccccagaccagtcgacgcagaacgcccagagacccagccaagggcaagacccttagcgacgcccgtcagtcctctccgcccagatatcagttcaaagggcatggcaggtcagggtccctcgcgccaccccagatgaccctcaggcctcgggtggccactttctgggggagccctccatcccttgcggcagcttttccgagagtcggagtggaggcgcggggctggagggctctccggagccgcccaccagggtcctctgggggcccggtcccgactgggcagggggacctggacagggccccggagcgtggagacggctgaggaaagttgggggtcggggccttggggcggggagcgcggaacccggcgccgatgcccgcgttcatgaatatgcacgagccacctccctccctccgtgacgtcacgggccgtcccggggtgagcgcctgagccgctccgggtccgcgccagtgagcgcggctgctgccggcgagctagcggcgcagcggcgggaacccgaggccgagcgccgcggcggcagcgctagaagcgcacccatcgggcacggcgaggcggcccacggtgcggcaggcaccgggaggcgagagccggcgcggacagtaggcggcggctgcagctcgttggcggctgctgcgaggatgctgcctgggcggctgtgctgggtgccgctcctgctggcgctgggcgtggggagcggcagcggcggtggcggggacagccggcagcgccgcctcctcgcggctaaaggtgggtgctggggaagtttgctcttctcccaggagggaggcagggcaggcttgagggtgaaagcggcaaggacctaggctcaagctggatttgcccaccctcccttgccgcagcttctttggcctctgtgcgccctggattcccgaagtcagttccctgcgcagcggaccagagaggtccacccgcggacgtcaactcaacccctgggcggggtccgggggctgagcagaaggcgaggtctggggagtacggacaactttgagggctgtctgtgccggggtgggagcgcagtgggtgagtttcgagctctggcccagggacggctagagcagggcgctggcgcgccgtggggacaagcaggtgtctgctcctgcctgggggaaggatcagcggcggtgctttcaaggagggagccgagctgtgacttgtctcccagctcggggatggagtggaaacttgtaggctccagggaaggccccgctgacactcctcaagctcccccagggcgtctctgactccccggggaacgtgtaccctccgggtaggcggcggggtccggaagaagcgcgggatgtgaggctccccgctgcctttcctactccgctctgactaccgaggaccgaggagcctaacctggcaccactcccctgcccaccctgttcctttgaagagcttgacctccccgcgcctcccgcccggaaggaagctagatccaagcgaacgcctggctctgtcaggcgagcctggaagccggcgaaccccggactttgacagctgcctgggagcgtcg

SEQ ID NO: 5208 - DNA, 1686 bp, Homo sapiens; identical to SEQ ID NO: 5207

SEQ ID NO: 5209 - DNA, 2132 bp, Homo sapiens
ccgagaaagtgggtgcggcaggcggcgcctggaggaactggcgcaggccctcttctacgtagtacacctggtcgtagatgctgaggaaggtgaagatgtggaagagctggtggctgtggccgataatgtcgaaaagacccggctggatgcgctcggggatcttgctcacgttgaagaaggcggccaccaccagccagaagtagcggcggtagaagtgcacgaagagtgtggggttctccccacgcaggtcgaagagccagctctcgagcataatggggcaggccatgctgagcggcatgacgaagacgaaggtgcgcagcgcgaacgggtaggtacaccagtcggtacggctcttgcagcaggccacagtgcaagccaccgccagcacgaaggccacaggcagcaccagggcgcggtaggcggcgataaggcgcgtgcagtccacgtgccagcccaggcgctgctgcaagtatggagtcatgactctggcatccagcaagctgaggcctggcaacaggtagtagtagtaggccaccgtgctgccgaagccgtagtagctgatggacgcgtagtccaggtagaagaaggcggcgcgcagacgcagcgacaggcagctgaacacgtgcgccgtgcagctcatggcgaaggtcagcagcactcccgacgcgtagcaccacaacggtagcagccacgggtggtggaagggcacgtcgccgccgctcaggaagaacagacggcagaacttgctcaggaacagcagcagcgggatgaagtgcgtccagaagttgagcgtctcgttggtaggcttcagcaccgaggctaggcactcctgggccgtgcacggcagacgccggtagcccgacaggatgaagcactccacgaagtcgtcgggcacctcgtcccagcgcagcagcggcttggcagacgctggggggtcccgggaggcggcagagtgggagttccgggcggcccccgaagctgccggggccggggccggagggccttttgtgcccgcgccccggggctgcaggcgccgcggcatggtgcccggggctcggctagggcgcgcgcaggcgacctctggcgccggctcccgggcgctgggcagcccccgccggccgccgtcggagcctttgtgcccacgccgggggcgtcgctgcaggtttaggagaagacccgtgcctccgagcagccgctcctaaaaattaaataaatcaataagagaatcaattaataggcagcgctgcgaccgccaggagcgcggagcgcgcgaggctcagcggcttcctcgccaagcccctgctaccggcgcgcggccgcccgcgctgcggcagcggcggcggcgcggctgactgcggcggcagcgcggcagcggtgactgggcatcgcgcggtgcgggtgcctccgccgccgccgcccccggagcgggaggtggggatgtgcgagccgaggcgcggagggagggacgggcgcaccgaggaagggcgggggcctcccaggctagggtttcgcggccgcttcgggggatagagttgtcccctgtctcgagttccgtaccatccccctcctcgggccgccgcagcccgggccgccccgttaatgattgatgcgggggccgcaggctggtcggcgacgcggcggcgcgcgcgccgagtactagagtcggccctggggttcgaaacccgacagccacgcgggcgttctggaggacactggggagccgcgttcgcggggggcggggagctgcggctgcggggggaggggagggcgccggagccgggcagggcggagagatgcgccagcggtaatctccggaggtcgccggggaggggggcactccggaagtcggggggctttaagcccgcgtccggatcggggccgtgtcattgtcagctacctggggatgcgcctctcgctccctcactgtctttgcgtgtgtgttagtgtgtgtgtgtgtgtgtgtgtgtgtgtgtcggcctgtctacgcactacacgaaggcttagttggtcttctttcgtctagtgggcgcactcaggtgcgtcaccattctgccgtttccctcgcccttgtcctgtccgaaagaaccgtccgcaagctgccctgtggtcgcgctcaccagctcttcgagccg

SEQ ID NO: 5210 - DNA, 2954 bp, Homo sapiens
acgtcaatcacagtggacgcagcaccgcgagcggaaatgcggagagcatcggggctccgcatgtggggcacaatgaaacaagagcagccccggccagaggtccagtaaagcggaaagacggtcccgcccgcacacccctccggaaaactgaagcgtctcctctgacccccaaggtcagaaagatttattacttccttcgagagggcgcagccacagacccactagagagggcgggcagggtgtcggaagccagagaacggcgctccgcgtcctcccaccgctccagggcgcagaggtgtcctcagtgcccggagaggttggcagtgtcggccccgagggaagcgtggagcggacggccgacaggggatttctgcccaaacttcatcaccaactctttctgagagcaaaaacatggggccgagtccggcagctgcacgcagaatccaactctctggcagctctcggcaccgacgagctccagatcccgcgttcgcatcccggcgctttgcgcgcagagctaagccttcggacccgtggactgcagcccccgcgcgtcgcggtaaagcgggtcgcgtctccagcccccgaggcgcagcgacggtgggagccggctcggcgttgggggcgggggcggggccggcgaagggggagggctgcgcggcggaggggaggagccgcggcgacagacggcggcgcgcaccaaccgggcgccggctggcaggagccgcgcagaggctggtccgagcgcgttgcgggcgcccggcgtaaggggagtcgggtagcagcatcctcctgggcgccgctttcgcgcggcggcggcggctgcggcggggtctttctttgcttaaatacctcgttggccagaagcgctggtaccgggggcgggttgggtcgggtcgggcagtgctgcacacctgggtttccttgcctagagctgtgtgttcggggtcctttggtccagtcggaggctgcggagcggcgggggttgcctgcgctgtccgcccgggcatcctcccggtgatggaagcagccgccgccgccgctgcggggtcgcgctgtgccccatccaccgctgccagagaggtgggaaaattcgccgcacggaggccgaaagcgagaggggctgcgccgctatgccgggagctgagtcccatataagccgcccccagccatcgcccccagccggcttcgttcccctgagcgagacaggaagctgcggtcccgagaaagcggaggagacgtcgctggagccgggaggcgccgggttcggcggagcgcggagcggggctctgggccgcgtgaaagtttttcttcccgagccgcagggcgcccgctgcccggaaactgcccagggataagtcggccgactccccagacccctcgaaggtgcggggacccccagcggaagcgagagggagcgaaatcgaggaacgagtgacagccggacagtccgccgggcggtgatccggggccgctcccgggcgcgccctcggctccaggtgagcggaggaaccgggcagaaccgagggtgggcgttacttaggaggaggaggctgggagggagattggggcgcatccgctcactccgcttcccctcgcaggtcctacccggagccgctgccatgggagagccagccttgggcgctggggaccagccgccgcgcccgcctcggagtcgcggcccgagtcccggcgccagcagccagcccgctgcgtccccttcccgggctgcagggctgcctccgccgcgccgccggcccggattgtgcctgtgatgagccgcagcccgcagcgagctctgcccccgggcgcgctccctcggctgctccaggctgcgcctgcagccgcgccgcgtgccctgctcccgcagtggccccggcgcccaggacgccgctggcccgcgtcccctctcggaatgaaggtgttccgtaggaaggcgctggtgttgtgcgcgggctatgcactgctgctggtgctcactatgctcaacctcctggactacaagtggcacaaggagccgctgcagcagtgcaaccccgatgggccgctgggtgccgcagcgggggcagccggaggcagctgggggcgcccagggccgcctccggccgggccgccccgtgctcatgcccgtttggacctccgcactccttaccgccctcccgctgccgccgtcggggcggctcctgcagccgcggcagggatggcgggggttgcggcccctccaggcaatggcactcggggcaccgggggcgtcggggacaagcggcagctggtgtacgtgttcaccacgtggcgctctggctcgtcgttcttcggcgagctattcaaccagaatcccgaggtgttctttctctacgagccagtgtggcatgtatggcaaaaactgtatccgggggacgccgtttccctgcagggggcagcgcgggacatgctgagcgctctttaccgctgcgacctctctgtcttccagttgtatagccccgcgggcagcggggggcgcaacctcaccacgctgggcatcttcggcgcagccaccaacaaggtggtgtgctcgtcaccactctgccccgcctaccgcaaggaggtcgtggggttggtggacgaccgcgtgtgcaagaagtgcccgccacagcgcctggcgcgtttcgaggaggagtgccgcaagtaccgcacactagtcataaagggtgtgcgcgtcttcgacgtggcggtcttggcgccactgctgcgagacccggccctggacctcaaggtcatccacttggtgcgtgatccccgcgcggtggcgagttcacggatccgctcgcgccacggcctcatccgtgagagcctacaggtggtgcgcagccgagacccgcgagctcaccgcatgcccttcttggaggccgcgggccacaagcttggcgccaagaaggagggcgtgggcggccccgcagactaccacgctctgggcg

SEQ ID NO: 5211 - DNA, 2954 bp, Homo sapiens; identical to SEQ ID NO: 5210

SEQ ID NO: 5212 - DNA, 885 bp, Homo sapiens
gcgcacgcctgcgtgcccattctccagagttcctggcctcgcgatcgtgcactgatttccttcagaaccccaggcccgctctggacgtggaaggcagccgtgccgtctgggaaagtggagccgagcccgggacgctgtcggcctaaatggaacgccggccccggggcccgctccccggcgggttcccgagctaaatcctccaactgttccatgacgtcatcgggccccctccccctgctccggcccgcgcggccccagcgtggcgctaaggagtgtggcggtccccgcgcgcaccgtgggccatccctaacccaggacctggctagcaggctgccctccgagccgaggctgcgctgggcggaaccagggatttatagcccggagtggggctgaaacagagctcctggcccgagcagagagcgtgcacacgcatgaaatcgtgctcctgggtgcgccggcggccaggtgcccgatgtcggtcttggaagcagcgccggagtccgtctgaacccaggcccgggaggccagaggctgccggccacgttcaactgtgtcccccttgggaagacaatccccccagttctggtttcttcctgagccacgggtggttggttggtttggtggaaggcaggtgcacaggtaacagagacaaggttaggaggcaaagcacatttatgtgcaaatgagacgcgctagggaacttgtaatcctctgcacccccgcccttgatgtctcgatccctacaatcacagaattctaggcagaggccgccgacttctccgccctcgccaagagggacccggagcaccgaagcttcccagccggtgccggcgtttccgcgccctccttctctcctgcgccgtgacctcaaaagggcggcgggcg

SEQ ID NO: 5213 - DNA, 2174 bp, Homo sapiens
ccgcctcaccggcctcttgcggccgctgcagaagcgcactttgctgaacaccccgaggacgtgcctctcgcacagggagcgcccgtctttgctggggctggagcggcgcttggaggccgacactcggtcgctgttggactccctcgcctgccgcttctgccggatcaaggagctggctatcgccgcagccatagctgctcagcgagggcctcaggccccagcctctactgcgccctccggcttgcgctccgccggggcgagggcaggacctgggcggccagggaaagggcagtcgcggggaggcagtgctaaaatttgaggaggctgcagtatcgaaaacccggcgctcacaaggttagtcaaagtctgggcagtggcgacaaaatgtgtgaaaatccagatgtaaacttccccaacctctggcggccggggggcggggcggggcggtcccaggccctcttgcgaagtagacgtttgcaccccaaacttgcaccccaaggcgatcggcgtccaaggggcagtggggagtttagtcacactgcgttcggggtaccaagtggaaggggaagaacgatgcccaaaataacaagacgtgcctctgttggagaggcgcaagcgttgtaaggtgtccaaagtatacctacacatacatacatagaaaacccgtttacaaagcagagtctggacccaggcgggtagcgcgcccccggtagaaaatactaaaaagtgaataaaacgttcctttagaaaacaagccaccaaccgcacgagagaaggagaggaaggcagcaatttaactccctgcggcccgcggttctgaagattaggaggtccgtcccagcagggtgaggtctacagaatgcatcgcgccggctgcggctttccaggggccggccacccgagttctggaattccgagaggcgcgaagtgggagcggttacccggagtctgggtaggggcgcggggcgggggcagctgtttccagctgcggtgagagcaactcccggccagcagcactgcaaagagagcgggaggcgagggaggggggagggcgcgagggagggagggagatcctcgagggccaagcacccctcggggagaaaccagcgagaggcgatctgcggggtcccaagagtgggcgctctttctctttccgcttgctttccggcacgagacgggcacagttggtgattatttagggaatcctaaatctggaatgactcagtagtttaaataagccccctcaaaaggcagcgatgccgaaggtgtcctctccagctcggcgcccacacgcctttaactggagctccccgccatggtccacccggggccgccgcaccgagctggtctccgcacaggctcagagggagcgagggaagggagggaaggaaggggcgccctggcgggctcgggatcaggtcatcgccgcgctgctgcccgtgccccctaggctcgcgcgccccggcagtcagcagctcacaggcagcagatcagatggggattacccgccggacgcaaggccgatcactcagtcccgcgccgcccatcccggccgaggaaggaagtgacccgcgcgctgcgaatacccgcgcgtccgctcgggtggggcgggggctggctgcaggcgatgttggctcgcggcggctgaggctcctggccggagctgcccaccatggtctggcgccaggggcgcaggcggggcccctaggcctcctggggctacctcgcgaggcagccgagggcgcaacccgggcgcttggggccggaggcggaatcaggggccggggccaggaggcaggtgcaggcggctgccaactcgcccaacttgctgcgcgggtggccgctcagagccgcgggcttgcggggcgccccccgccgccgcgccgccgcctccccaggcccgggagggggcgctcagggtggagtcccattcatgggctgaggctctgggcgcgcggagccgccgccgcccctccggctggctcagctggagtgctagctccgcaggaaactcggggcccgggcgagagccaccgagatggcaggtgggacgcagagcccgcggcagccagagttcctcccgcacggcccgccgacccacggaagagcgaaagagcgcccaggtggggccgagctgggggccgggcccctggagcgctgggaagcacagcgcg

SEQ ID NO: 5214 - DNA, 873 bp, Homo sapiens
ccggagagctgccaccgaccccctcaacgtcccaagccccagctctgtcgcccgcgttccttcctcttcctgggccacaatcttggctttcccgggccggcttcacgcagttgcgcaggagcccgcgggggaagacctctcgtggggacctcgagcacgacgtgcgaccctaaatccccacatctcctctgccgcctcgcaggccacatgcaccgggagccgggcggggcaggcgcggcccgcaaggacccccgcgatggagacgcaacactgccgcgactgcacttggggcagccccgccgcgtcccagccgcctcccggcaggaagcgtaggtgtgtgagccgacccggagcgagccgcgccctcgggccagcgtgggcagggcgccgcagcctgcgcagccccgaggaccccgcgtcgctctcccgagccagggttctcaggagcgggccgcgcaggagacgttagagggggttgttagcggctgttgggagaacgggtcacggaaacagtcccttccaaagccggggccatcgtggggtgggcgagtccgccctcccaggccgggggcgcggaccagaggggacgtgtgcagacggccgcggtcagccccacctcgcccgggcggagacgcacagctggagctggagggccgtcgcccgttgggccctcaggggcctgaacgcccaggggtcgcggcgagtccacccggagcgagtcaggtgagcaggtcgccatggcgatgcggccccggagagcgcacgcctgccgcggtcggcatggaaacgctcccgctaggtccgggggcgccgctgattggccgattcaacagacgcgggtgggcagctcagccgcatcgctaagcccggccg

SEQ ID NO: 5215 - DNA, 2174 bp, Homo sapiens; identical to SEQ ID NO: 5213

SEQ ID NO: 5216 - DNA, 510 bp, Homo sapiens
gcgggcacctcgcacgccacgcaggcgttttcccgatgagctcctcctcaccccacagcccagggaaggtgcggggctgcgggcgcagagctgcacaagtagggctgcaggctgggccaaagccgccttgcggggaccgacatgaacccgggtccctcaccggaagggaccaaggactgagggctgagcggcggcagcggagactccgttcgcagactccgtcccgccgccgccatttcccgccggttcggatgaggcctccccagccttgggacgccctgcccccacactcaccatttccccacttcaggggtgtagcggagtctcagctacgaatcatccaatacccgcaggtcacagagcgacggaggctgaggctgtgaccgaatcaccgacgcctccctgaggggtgaaagcacggccgtggagaccctaaccgagctcacgctggcgcaaaaggcaaaagccgcgccagatcccggatgccgccccctcctctccggctgcgcg

SEQ ID NO: 5217 - DNA, 511 bp, Homo sapiens
ccggagcctggggtcgggccctccttacctgcgtgctgctctcgggccccgccccgctccgccccggagggatcctcaggccgggcccagacctaggagccacctggggatcccggggtggctgcgcgccgagggggcgccagcggggacgtgagctggcgccgagacagcctcggccccccagcgccagggccactgccaggagacccccggccagcacccacgtggggcgcccccgggagcccgaggggtccatcgcctgtcgggacccgctacctcaaagcggcgggtgccgccgagtcgctggagcttccggaccccaggcccgccccgccgccgagcatgctcagtgcgagccgccgccgaaagttttctggaacaaacacccgcatctggggcttggcgggccaggaggtgccggacgggcgtgggagggggagagcgagttggcgcggcccaggcgcccggcggccaggcctgggtttgcttgcgcccaaaccgaatcagagcg

SEQ ID NO: 5218 - DNA, 417 bp, Homo sapiens
ccgcgtcgccgccctggcggggacggtgcagcaggcggcgggatgcggcggggcggcagcctgagcgccccggatggcccgcggcggggcggcctgcaagagcgacgcgcggctgctgctggggcgggacgcgctgcggccggcgcccgccctgctggcccccgccgtgctgctgggcgccgcgctcggcctcggcctcggcctttggcttggctgccgcgcgggccgccagcgcacgcgacaccaggtgggtcggccgagcagacagcggcggggcggggagcgcggggcgcgtggcttctgggtcctgcgggcccggagccccggctctgcgactccttgagcctggttgggaacttcgcacgcaaccgcttaggcgtcgggttccccttctgctccaggagggaggtggcggcg

SEQ ID NO: 5219 - DNA, 1748 bp, Homo sapiens
acggaaatatccgaatcggtgaaatgtaaatcgtgtctactgcataagggaatcgtgcagggagagccgctctctataaggagttaaccagcgcctgccccggacacccccgcggggcctccagcggggctcaaactggcggcggctcagcagggggcgaggggtgctgggaaacgccggggctgcgaacttacggaagaaaatgtactcggtgtagctgctccagatcttgtcgtcgcggtactggttgacgaaggcggcggtgcccgaggagttacacgccaccatgtggaagccggcctcggacaggcgatcaaaggcctgctccaagtaggtgaacttgaggtagaagcgggacgtgtacttctccggctgccggtcggggtcgcggctctcgttgagcgtgtccccgaagacctccttggccagcgcgatgcgcccgcacaccatgatgcgcgccacacgccggaatttggcgtcggcctggttgtcgcgcacggtggtgtaggagccccggtagcccagcgtgaggaagcccgagcgcttgtcctgcgcgccgccgccgccgccaccaccgtgcgctcccgggcccgagggcacggcggccgccgccccgcgcagcagcagcgcgtcgctgctaccctgcgagacgttgtcctccaggtcgctctggcagccctcgtcgttgagagagttctgcttggtgaccttgggcgacagcagcttgaccaagtcggtgagctggaaatactcggcctcgcgcagcagccgctccttctcggggaagtgctccggcagcgcgagttgcttgtcccgcagataatccagcacgtacctgaaaaggaagccgtcccggtcgatgaagaagcgcgcccggctgtccctgggcagctcgccccggcgccgggcgccgccacggggactagagggcgagaacatgctggccaaagtactgtccgggacgctgagcagcgtcgagtgcttggtcacataaacctggccgcctacgttcagctccactacttcagggaagggcgagggtgcgcagggccccggggcggcggcggccgacgcgccgggcgagctggacgaggaaaccatctcgctaatgggcaggatggtgctgccgccgctgcccgtgtccttcagagccatagtccccccgccgccggcccagtgacccgagagagctgcactttctcgttcccggagcccgcgccccagccctccgcgtgctcctggcgctctgcgccctcggactgggcggcgcgttcctccgaccggggcggccccgctcagggttcggggcagcggcggcgtcggcggcgcccgagctccatcggaggagagacgcgcgagagaggagctccgccggtgcggcggcggcaatggagaggcaagaaggagctgctgctcctttggggcgagggcggggaagtgtgagagagacttgcgagaggctctagggctgctgctcggctctccgtggggagggcgggaggaggggccgaagcaaagaaaactcgccgccccggcagcttgcaagcgtgccgcgaggccggagcgccgacggtggcgctaactactcctggcagcacgggaggaggcactgacgtcaagccccggactgggacccgagcctcagctgtcatttaaagagataggctgcagccgcggctcccgggctccgacgctagggggcggggccgagagccgagcctgcaagaggtgcagctccccgacccgcg

SEQ ID NO: 5220 - DNA, 1748 bp, Homo sapiens; identical to SEQ ID NO: 5219

SEQ ID NO: 5221 - DNA, 648 bp, Homo sapiens
acgaaacgctgccacaccgagcgaatgcaacgcgtacacacgtccacactcgaacagcacaagcaagagaccggctgggtgtggaatagaggcgcacatcgcgcaacgcattcacagcatgcacacgcgcgcaccccgaccccgtccctccccgcgcgccctcacaccccggcgcccaagacccccggcccacgaacctcaccagacagccgggtaactttccaggtgcgcagcttgtcacctcggcgcggccgcccctgcgtctcagcgtcctctcccacgccgccctccccagccgcctgcggcgccggagcccagcgcaggtcagctcagccagccccgccgtgcacacggtgcgcagcgtgggcccggggctgccggctcagtcgctccggctacgtgtgagccgggggcgcgggttagcgcgatgcgggcaggagctgcggcggcgtcggtgctgccgcctggctccgcggcgggggccggtgcagaggagacacgcagggagggagggaagagaggagggaaggaggagggagggggtcagccggggctactgcctggatagttgggcgccggcttccctaaaggtggggtcacccgcgcccgcacgcacactagcccgaacctttactcccgacacagccg

SEQ ID NO: 5222 - DNA, 863 bp, Homo sapiens
gcgcacaggaagggcggaggcggcacccgggggggactgtccccagaggaggccgctgtgagccggcgacgcgaggctgggggagtgggaggcaaacccgctaacctgtcgtcgaatggccactcccagttctccgctcacgagggtggaaaggcagaaggcttgaaggcaaggcgtgagggagcgcccaggacgctctcggaggggccgggccggggtctgcgctgcagcccgcacgcacctcacttccgcgtcgcggcgctcggtcgctcgccccctctcttgggccccttctggtcgtcgccgtcctcctcctcctagtcctcctccttctccttctcctcggctctccgcccccaccgctgatttgtcagcgcttctgcccgcccctctcccggcgctcgctgctttccctgcagcgtgctcctcgtccctatctcggatggggatggggcagggggcgcggggtgagccatcaactccagccgcctgcctggccgcgcaaggcgggaaagtgggggcgcttttgcgcctcacgttaagtttagggtcacgagcactcttgtggagatcgggagcggttgggctagggatgatgcctcttcctctttccccttcccctcccttcttgtccccgcctttcctctgggtcctcccggggaccaccccctacccctcgtcagagtcgccctgggagagccgagggcctgagggtcgaccaccaagggcagagcctatcccttggggagctgctggaggagacaggcagcgccgggaggtggctcacaccgcaccgccgagagcgctttgccctcgcatcgctgaaatttaatcacggtcacaggttacaacgttaggggtcg

SEQ ID NO: 5223 - DNA, 1288 bp, Homo sapiens
gcggattcgagagcggcgatcctcgcctggaggtcgttggttttcacacccaggtacaggcaagacaccacggccaccactgacaggagggccgccaggacggcacacgggggcatggtccgggcacaatgctgttcggcaggggtcgggtcctcggatctgggctcccggccccctcctttccctgcgtgcttcttcagcagcatcgtggcggggtcggccgtctcggcttcgcttcccaccctctacacctcaaataatcctaaaaggaaagaaaaaggtcgattcctccaaagttcagtccctgtggctgcacaactagttggtggagtcaagcccacgagcggatacggacccctgccttgctcagcgtccagacccgcaggcgtgcaccatccccgctttcttctctcctcccagctggaagtgaaaagcaccctccgtccggggactgggtggcggtggggtaaaaagcaagacgaaacccacccagacagctcttccgactcccagaggaccgacacctctttcgagggccccaacagtggccgctcagggtccgagggcaacggccgaggcgccacgcggggccgcggctcgccctggccacggaggaccggacctgttgcgcctctgtgagtttgccttatttctacctactcggtgtctttcggcacgccgacctgtttcccacctgcattcagttcaaggcaaaaaggctgtgagagcacgctacagcgcagcgcgaaaggggcgactaaggtggagaagagagaggaaaacgaaataaacccaaggaaccaatgctactcgcgaagccgaagtcgcggctgcccgaaggatctccgcagccccgcgtgcgcgatccttaaatacccttcgcgatgctcgcgtgagtgtgtgtgtgagtgtgtgagtgcgcgcgcgctccgagcacgacgtccctcccccgaccccctcccggcgcccggcgtccggcctgccgctcccgctgctgcgcgccccccttccgaaggcaaagcaggagcccgccttattatcataatgtattcaccttggcccagcccgcgggccggcccggggaacccccaagggaggcgggaagcttgggtgggagcggggcaggaggtctgttattagcataatgtatgcaaatagctggagcggccaccgtgattggagaggagcctggcgacccctccccctgcgcggagtaacttcagcatctccgagggccacctctctggcctgggccggggccgaagcggggtcggctgcgcaagaggcg

SEQ ID NO: 5224 - DNA, 1275 bp, Homo sapiens
acgcggagcaaaacttaatcggtccagggaacccagacacgtcttccgcgccgcacggacttcccagaaggagcctggaggcaggcgctggatccctctaggcacctccgtccccgccggctcccctcccccgcgcccgctgggccactcacccgcgtggggcatggtgatggtctcgttggtgttggagcccacgttgaagatgaccacggctgaggcgttctgcaggaacgcgttccggatcttatccctgtacgtgcagttgcccttggggatgagggctatccagttcttgccgcgggtcggggcggcgaacttggtgttggggtcgcaggccaggcggtcgtgggccgagctggccatgaccacctccccgcgggcgtcctgcttgggcgagtgctctccgtagcgcccgcactccgtcttctccgtgtgcagctccgcgccgccgccgcccgccgccccggccccggggtccggcgcgggctcggcgtaggtgatgttcacgaaggcggtgtaccattcctccttctcggccacggtaaagtccaggcagagcagatgcacgaaacaaaaggaaagcagccatgttgagagagccagactgcagcacgcttggatgagagacattgccatctttatccgccggggccccctccccgcccccgcgccctccctccgtcccgtccctcctccccagccccggccaaccccgggccgctgcctctcctcctgctgctgctcactcccgggccggaggggccgcggccgggacgcgcagccgccgcggggaccggattccgggcgagcggatggcgctggccccttcccctctcagctgtagcgcggtggttgcattttgcttcttgggcgcccggggggcgcgggaacagagggcccgcggggcttgcggaggagtcctgctgccgagcgtcctgctccttcgcccggcttcgccttctctcataagggtggccgggggcccacgaacttgcagggtggcggccctgcgccctccagccccggcggggacgggcacgattgctcgtagtctggggtgctgcggtgcggggtgctgcccagggtgtcccggccgccgccactgagcgctggggcgcgcgaatccagctgcagccgctgctgccctgcgccggttccctcaggctgcgggcgctgcgctcctgatctcgccggtggctgcgcctgggcacgcacttgccgcgggcggggcgggcttggggacagtgggagcgagcaggcagagcggagtaagcg

SEQ ID NO: 5225 - DNA, 1071 bp, Homo sapiens
gcgagcggtggctcgaccccgggtgtggcaggaaggggtgccccgcgttccagagccagtgccagtccctatcctcccgggaagccgagactcagggggaacaggtttcccagagcccagcctgcagggacgcggagggcaggagccgccggcgaggagcagccaacttgccatctctggcggctgcacttctcggcggctacaggttgcccgacagcggactccagggtccccgcgacggcacccagagtgctcagaagggaggccggggccggggtgggccgggaaaaccgagggagggaaggagcctggagaagctccgtttaggcggggagggggcgacccggggcgcatctcccgaccatgacccccacagaccttggcgccgcaacctgcgcttcttgaggccgaagatgcgcactttggagaagatatccaccaggttgccgttgcagagcccgcggttcttgctggggctgctccgcctcctgctggcagacggccggtcccagtgctgctcccgcgcctgccgcttctggcggatcaagccgctagcgatggccgcggccatggtggccccgggaacgggtccggggagggagggcgcgggaggacggcgagccgggggcaccggaggggaaggcggcggcgcagaccgtggctcgccctcggggcagaggagggggtgccaggcgggactggggagaggggaaggggggctcagtcctgaccgggacccatcgccctctccgcggggcgcggggccaggcgcgcagatgcgcccagggcgcagccggacgatcccgggaagccggacgtcgtggccgccgccgcttggccacgtccgagtggagagcgggaccgcggctgcgggcgctgctggtcaccgctcgtcgcaggaaccccggcgggggtcgccaccgccactcgcgctgccttctcgccctgcccggctcccgggcgggaggtagagccggccggcggctccccgggcgccggctggagggcgggtcccggcagggtctctgcgcgtccgtcggtccgggtcgcgctgggcaggactcagcgccg

SEQ ID NO: 5226 - DNA, 694 bp, Homo sapiens
acgttcccgaaccccggaccttagctgtcatttcacctgcgtcgtcccggacgccatttggctgttgacgtggttccgagccagcaaataacgccagcagccctcccagatccacgccggcccgtctctccgccggccccctcctcgcagtggtttctcctgcagctcccctgggctccgcggccagtagtgcagcccgtggagccgcggctttgcccgtctcctctgggtggccccagtgcgcgggctgacactcattcagccggggaaggtgaggcgagtagaggctggtgcggaacttgccgcccccagcagcgccggcgggctaagcccagggccgggcagacaaaagaggccgcccgcgtaggaaggcacggccggcggcggcggagcgcagcgatggccgggcgagggggcagcgcgctgctggctctgtgcggggcactggctgcctgcgggtggctcctgggcgccgaagcccaggagcccggggcgcccgcggcgggcatgaggcggcgccggcggctgcagcaagaggacggcatctccttcgagtaccaccgctaccccgagctgcgcgaggcgctcgtgtccgtgtggctgcagtgcaccgccatcagcaggatttacacggtggggcgcagcttcgagggccgggagctcctggtcatcgagctgtccgacaaccctggcg

SEQ ID NO: 5227 - DNA, 694 bp, Homo sapiens; identical to SEQ ID NO: 5226

SEQ ID NO: 5228 - DNA, 1424 bp, Homo sapiens
tcggcgggtacgttggggatgcactcgcgcagttcggcgaaggcgctgttgatgctctgagtcctgcgccgctccttgcggttggcggtgcctcggcgcttcaccgggcgcggcccccccaggcccgggggcccggcgcccggcggcacccccccgtaatgggagtggtccaggccggcggcgccgctggcatactcggggctgtaggacagggccatgctgtagtcggggggcgacatctcggggtggccgatgagccagccatggaagtaggggttctcctcatggctgcagcggctggcggcggcggcggcagctgcggcggcggcggcggcaaacgggtagccctcgtggtgcaccaccgggtggtggggaaaaccacctaccagactcatttcgccctccgcgcccctccacgcgccccagcgtgcgcgcagccccgccgcgccctcggcccgggcccctgcctcagcgctcggcgtcctcccccaccccccaccccccagcccccgggcgcccgggcccgcccggcagccgcagagggggctgctgcagcccgggccccgtccccccgcctggccagccgggcccgcctcagcagcgctgcggccgccggctccccatggggcgcggcgagctggtcctggcaccgtgcgcccctggccgccgccgccgccgcctccggttcccgccttgctccacggcccgcgcttcggctcctgcttcccgggctgctgcgcggaggcagaatcctctcgtgctcatacaaaggtgccggggctcccgcgaggctggtacgcggagtctcgggaatccaagcccgggccgcggtcctggcaccgaagctaacccggaatccaggggcgagtctgagccgcggctggaggagccggtccagctgtgccggggggcggcggggtcgactgctcactgcaaagctacctccgtgcgaccctccccttcccgcctcttcccctccccccaccagcccgatctgggttcttgggcgcttattgttttaatgaaatttttggttgttgttgttttggtccttaaatgtgattttagctgcgagtaacgtgtcctcgctcctctcgcgctctctcggagggttttcagagaggtctcagtgcatccattttctcagatcctctcctttcggggcaaggatctggggccctgaatgagccttggagctcgaagaccgcggctcgggctctcggagggctctgcgcggtggccgaggaagctccggggtgacggcggtggttctcctgggctggacgacgtgaggggagcaagcggattttcccagcaagatctccatgtacagctacatctttagggccgctcgggttaatatatgtcgtcagaggctcctcacgccaatcccggggcggcaggggcggcgcctcgagctctcg

SEQ ID NO: 5229 - DNA, 1215 bp, Homo sapiens
ccgcgcaggttctcgggtccgccgcagaccctaacgcaaactctcgggttctccgcaaaccctaacgcagacctaccgtggcctcgcccgcgtcgggctccgcgtccgagaggtcgagtccggactcgaaggcggcggcggcggcgggcgcctcgcgaggacccgggagcagcgcagcggcgagcagagaacacgccacagagaagaagcccagcaagtgcatggtggaaggaccgggggtgggggaccggtccgctggcgggggcaggggtgggggcgcgggcgcccctgcgaggccgcgggcccctcctggtccctctcccccgggctcctcccggcgaccccccctgggcgagccggaggcggcgggagcgggtccggggctccgcgttcccaactttgcagggcgccctcccagccagtgccggggaaaggcggcgggtgtcaggtaaaagcctcacaggaaaccggacatccgagctccccgcattcggagcccgcgaggtgaagcgagggcgagggaggacgccgccgcggtccgcgtcggtgtagctttttggagaggcggggcgggggacaccagaacaccccgcgatgttcagcccctccaaacccgccagagccctcgtccccctcctccctccccttccccgaagtgagaggagccgggccgcgggcgctgcggcgggggcgctggcggcggtgccgggggcgggaggagggcggcggggcggctggcggcggcggggcccgggagcgccgcggcgcaggatcctccagagcgcgccgggctgagcggcggcggcggcggcggcgggcgcaggggcagggcatgactgacgcgccctctgcctgcgcttatgtgagagaaagcggccgagggagggagcgtgccgagcccgggctgccctcccctctcactctccctcggaagccgtctccctggagctccccgtttccctcgcctcctccccggcggccccacctcccccggcccccctctggatctctccctccccgcccctgtcccctgcggggagcgggcggccggaggggcaagttcagtcccggggctggcggttggcgggaccggctttagaggtgatgcgaccaccctggaccacgtgcagcggggagaaactgggcaccgtggggtggagggagcccccgctttatcctcggccactcccgagttcttgtcctccctcccgcacg

SEQ ID NO: 5230 - DNA, 1184 bp, Homo sapiens
ccgtcttctctccccgggtcgcgacactgactcgtcaacgttaatgggggtccgcgactgctgcggggacgagggcgcagagcagcccccgccacgggccggtccacgcaggggccgagaaagtggcggagaggcggtggccgaggcccaggggcgagcgcgggctgagctggtccctgctgcgttcacgagcgacacccaccccttcgctgcggacgccccgcgggcgccaggctgggggccctgcgaccgacccctcccgcccccgaggtaccgccgggcccgcctggcaggcagcgcgtcccgcgagctggagggccgagtttcgcggggccgtggggcgtgtgggtgaaggcgacacctcggatgcgggacgcatgaatggtggcagagcaggggtcgggatccgttcatgggttgggagagagatgcttttgtgagcacgggaaagtagcgctgccggagaacagctctgaggcgggatcaaaagccgccggcgaagccccgccgaggaacacggccgctgcccggggcggctcgcgagcgtgcgtgtgtggaggggaggatgccgccccgcggggtcttcggagggtgccgggagcgggttctcagtgcagttcccccgtcttcgctgggggcacggctgctcacaggccccggcccgcgtgtgtggagcggggcgagggggtgaggcgagggggtgaggcggcggccgagccggggcgctgggcgcggggctggcgggaggcggcggtggcggcccggcgcgaaggggttaagcggcgcaccgccccctcggcggccgggtgtaaacagaggagcctcagcctatcatgtctggccgccgcgcgcagcccgagcccggagccaggcgctgtaacacgatacgctccagacccaggcaacttggcagcgctgggctcggttcctcacggccacagcgagggcgcgccgcggcaaggtgggtgagcggcggcggcggcggcggcctggggcgggctggcggagcgcggctcccggtgaggctccccgcgcggcagggtcgctcgctcgctccggggaccgcggcggtggcggtggcggtggtggcggcggcggcggcggcggctccgctcttctcccttgtggtgtcggaatgggaggaggctcggcgcgggtttgaatcggtgcggaggcaacattcg

SEQ ID NO: 5231 - DNA, 5820 bp, Homo sapiens
gcgagtagaaggcggacgcctccgagccgtaggtcacgtagttgccatagccctgcgatccgccatagggacccccatagacgcccagcgccgcggccgagttgagctcgtggcgcgcggtggccagcagccggctctcgtagaccgggcagtagaccggcgcctgggccgaggcggcgggcccggagtccgccagcgtgcggcctccggactcgcagcacgtgctcagggagttggtggccatcaagaactgcagagagaggccgcgaggactggcgggaagccgggctggaggctggggccctgggccttgccaatcccgcgcgccgcccacgagggcgtgccccgagtacccccgggcctcccgccgtccacaccaggatgctcgcccctttccactagcttgtgcgcgtctggcctcctccgccacgtggggcccagccgagcacctacacccttccccggagggtttccaaggcctctgacgccatttgcgcgccaagcctccttccccaggggttccttggggtcctaggactcccctggggcacagcctgagccttgtggttcaaacatcagggaacccgggcccggcccgtcggattttcttagcgcctcggcctttccccgggggtttggggagcaggggttgggcgtgaggggcgcgcgacccaggccttgctagctcggaagccgcaggcagtcgtaggtcggacactccccaccccccgtccccgccccatccgccctaccggcacctgcggtggcctgggcggggcggggctccgcttacctggggagccgaggagtaggggtatccaaactgcgggtaggacatggcgggcgcggcccggggcggacgggcggggcctgcagggttctgcgcgctggggccggcgtggcgcggccactgctccggagctgcaggcttctaggcgctgggagggcgaagcaggagagccggttagtccatccccgcgctccgcaaacttttctaaccgggtaacaaagtgagcagcggtggccgccgcgattcctttaacttcgcattccggaggctcgagggggctctgggaccgagcggcctcgcagcggcgacagaaatacatattttacgaaaaagaaaaaaaaaaaaacgagtcgcgcgaacccgtcaagtcagatgtgcgcggcttgaagcggaggaggctctgacgtcagccccacctcgcgcagcccggcctggccgcagactcgccggtcactcgccggcggctcaggccgggaggggccaggacagtcccggccgcgcggtggacggaggggccattcctccgggcgttagcaaataaattccatccgagtcaatatcgcccagcgaacggtgtttctctttagtcacccgagaacgagaggcacttttaattagaaattaattaatgagcagctgctccttcccgccccactgtaatcattcgtctcaattacaaatgagacctatgaaaggacacgctgaagatgtaatcaacagttaaaattagcccggcgctgcgcaggcggccggcccggcctcgcgctggcgcgctctgctccgagtggcaggaaggggctcgcaggcgccccgcacgcgtctcgtcactattgtttaatcgagaatcagcaacgcctcccgccggtttccaccctacgccggaatggactttcagaacccactgcggccgcaagacagcccgcaagagctggtcaaaatgccctcaggtgcgtgggggcttcggggccttagttggagcccgacaccctgagactggcggcccgagggctgtagggccgccccgggcgtgcgcccaccggctttgcacctctgggcagccgagtgtcgcggagaacgccccatcttctccaccgcggtcttttaagttcccgctcagcccaccgcccccacctcgcctccccgactttcctccccgatcccctttccgccggccgtgctccgccggcttccccctgcccctcgcggctaagccggggactgccgggcggccctgcgcgctcggaagagcaggttcctcaacccaggccccggcccctcccgctaagctcgtccctcccggcgccccgcagggctggctgcgagggagggggcgttgggtgcctggcggaggcgccctcccctgtccattttgcccagctttctgtctggggcgcacggagcaatcggaagaggggaccgagcgcccaccccaggactccctcggccagtaccctccctgggaccttgcccaagttcaaagcggaggccagtgagcaggcggcaagggggcggcaagggggcgcccgggccatcccgaacccgttccccgccttctgcgccatcgccctccgggaccgggactcgccccggttgccctcgccccctgggccggcctcccgtggtaagttgggaaggaagccgtgcaaggcagcgttgtgcagacttgctcagaaagattcctgggttcagacctgtgaatcgccccagggtcaccctctaattaatgatgacgtcctcgccctctccccagctgcaagcctgcctcccagaaacgaaatctgcctgctcttttgacagctcggttgaaggtgattgatgactatctggagaccacagtacacatcatataatatctgctgcgtaattgctttaatttacagatgaaaatacgagttctccgatcgcgttggaccggagcgggccacgtccgagctgcttgcagagggaaaccatcggaaataatgaatagccgctccatgcaaattattcagacagtttagcgtcggtagccgcgagaaatatataaagaacacgagtcaaatgacattaataattgtttctgaattctgtattgatttcgcggcaggccgcgtttctttctttctcacctgaatcgctaatatcaccttcctgtaaataataagaaactagccaccggggtttctcgctagaaatgaatctctcaacccctttccctctcctcctgctcctcccctcccccaccctccttcctcccctctcccaccctccctcctccccactccttgcagttttctggtttttcccgagcatccttctacttcccattatttattgtttacaaactactcgctctctccaggtaatgaggcccggctgaaggaggggtgtgagcccagccgggccaagggctgggatggggagtagagacccccagaggggaggcattcagctgtggcttgtcctttcctcacctatactcggggacctggcctcggcgactgtgagcactccgccggctgagggggagagccagggcccaggggcccagccacctatgccctgcacctctgggctctagtgcaacagctcagcccacccagacctgaggctggtgcatttccttccttccagacccggcggggcttaactggagccgaagccccagaacaggcggccattcatcttctgagcagagtctgggagaagcagcctccacttcccagggcagccagtacgtgggggccctttcgggggcttcctttgaccaccaccgccaccttctcctgttctcttttgcctttccagcctgtgtgcataaatcgacgctccagtccccaccagcgggcgaccctttctccgtgacccagaaacctggcctctgaatcggctttcccaggccgccgcacacacacgctccacttcctgcccgccagcaggccccagcgcctggggtccgggcccagtcacagtcaccctgcctcgggaagctcgcaactgcccaggaggcctcctgacccgcccggcctcacccaggccccactactcattccaggacacagggtcaatccagcctgtggattggcgaccaccgggacatctcactgaaaccctgtagcctggcctaggcccgcctgcccaaaccggggattctcactgggccacccttctcccatagataatactggaatattttccaagtgccttcaccaaaaggccaagcctggagcggaggcacccagtgtccctttcaccaacgataggacgctcagcatctcaggtatcagctgaacgcgtctgcatagactcggagtgctgagccttcctccctctagggacccccggtactaaatacacccgtgagcaggtgggccagaagtcagccggctcccggagtacacagcaccggctcagcttcggggagatgaggtgctcccgctggcctggagcgctccgaagagcggaggaccagggccggagcaggccgcaggggaggcaggggatggtcagcccctaacgcgaagcgcaggcgggtcgcctattttgacggggttaccgttggccgtcggaaccatggaaggcctccggggagacaggccgggccctgacccttcttcggccagcctagccctggtgcttcaggagttaccctgggggccaccagttccccgcaccaagagctcgtccggagggagctccttccagcccagagaagttaactccagccaaaggcgaagccgggagcccggggcaccaggcaagggcctttctttctgagacctggggccagagaccttgggggcgcctgtgcccgcccaccgctcgggacacccggctggggtgtgggtttgagaggcctcacggtcgctgacgccgcactggcgaacctcgaggttggcaggtcatttcctcacagccccgaggccccctcggagccagtggtaggagaaggagccacagggacaagcggtgaatctctggattcccaaccgccctccatgggggcccgcggccctctccctcctctctcccgctgcgcccccgccgcttgctccctgggtacggcctgaggctggacggagcgccgtccgggcgtccaggactcaggcctggccactccgagccccccaccccccgccccgcgccggcccgcgcaccctgcttcccgcaacttgcagcaaacgcagcggcctctggagagcctagcgacgggtagcaaactttgtccccttaagcgcaagagcaatcctcgcaaagtttgtgcggcggagcccactccctacctgagctggggaagctcccgcccgcgccgtgtggctgccggggccgcggggagcagctcgcagcccgggacgcaccggggagtcgccgcagccgccgccgcccgctcccctcggcggccgcgcggagcctccgcctcctcggaaggggggaggggtctcggaaccccggggcgggggcgggagcgggggacctcacctacctgcggtggcgctgggccgctcccggcagcccgcgagggctccgcgcggaagctcggcgcgcgcgctccagcggggagccggcgacaactaatggagacatttccaggcggagcacctggcgagcggagcgcgccggcgtccccaggcgccgcggtcgtcagccgagcccgcaccggcgtgacgtgggcgagcgagcgcgctgctcccacccggccgcccattaacgctttctcccgcgggcgccgcgctcttgccaactttcccctccgtccggtctgcgcgcggcgcgccgggtgcaggagctggggtgagggcgccccgggtgccagcaggggcgctgggagctgtttgggcggggacgtagggctccgggaggtcacacagccctaacaggacagtgggaaggcgcgcgagccagatttggccaaacgctaagctcgctgcggcctcgggccctcggcccacggggcccctctccccgtttgggctgccccacccagggacgcttgggccgggcgcgaagagcccggaaatagccacccttgtcgtcggcccggtttccctccg

SEQ ID NO: 5232 - DNA, 1233 bp, Homo sapiens
tcgcgctgggctgcgtttctgcaggagccaggcctcttcatgctctgcggcgacagccgctggggtggggctacggggaagtcgcgctgcccctcgtctgagcgtgggccagggcccaggtggtgaccaaggcccggcgcagtggccccggagcgtggaggggcagctgctgggcggcctcccgggggagggtgacggcttcacccgccaacgctgcctccctcctgggattaggccggaggaatcttggatcgcccgaggctggtgctcagcctccttcccccatcccacctccaccacccggcgacccccgtagacttgattggcaggccctgccccgacccctacccctccaggtccccgcctcggtgcctcggtgcccggctccgggccactcctgcaggccctgcctagggcagccggcggtgcctggaggcgggctcgccccggctgctccacgcccaggccggtccctggcatttcagccagtgggagggcgtccccgccgcccccgtgcctctccgcaggggctgcgccgcgtccccgggcctctccctccgccgtggcctggtctgcctgctccagggcgcagctgcgcccgcttcagcgcctcccgggtctgcgtggcctgctcggctcagaggcctccaccacggtccgctccctgccggacgccgcgctgctgtggccgcggtggttctgtggctgtgagggccgtttctgtccgtccacaccgccttccctctgcaggtgaggaatggggtctgcttcgtttggaatgtgcctttgccgggtcctgcctgacctccaccttccagccgggacgcgcgagcttttccgtttggctgagtcaaaaagggatcgcgcgcatcccgccgcccctcaccacgaagcgcagacacaggaggttgcagggtcagtgctgcggagaatcccagacggccccacagccgccgccacccgcggggcactcgcccgggctctgccgaggatgtgggggctttggtctccgcagagctgggactcccgaaggccttaccagaaactcaggagcagccccagccctgcagagcccgcgagggtggagacgggagacccgctgtggggcctgaggctgagatgccggcctgcggtgaagccggcgggacgttccaacccgctcagacccgcccactccgcagggcccgggcccaccccccggcctgtggcctgtgctgggctgcgcagccggcg

SEQ ID NO: 5233 - DNA, 2865 bp, Homo sapiens
gcgagtctcagttcgctgctcgctcagagccgcccaggtgcgagggcgtcttcaccagaaatcggtgctcccgcgcgccccaccctccggggccctgcagatgccgggtcgggggccgccagcaggccctttggctcctgctggagacactggaagaccaggcgaccaggacagcgggtcgggccagtgcggtgtgacacgagggctcgagcggcttcgcagtttaaacgtgtcctcatcctacacctcccacggctgtttcggattcggtgccctcgtgcccctcagcttgcccagcggcacgtgggcctcaagcctggtccccagcggctgcgccagcctagctgtgttcaccttggggccgcgagggcctcccaccggctggcagctggtggacacgctgtcaagatcgggggaaaaaaaggaaggaaggaggctagggggacacagggctggtggcctccgcagtctttgacctgcgacgggcgcgagcgcacctccgcgcctttgcgcagagaccttcccccaagattggctcacgacgcctcctaccccgaagtcaagggctccctgtggcaaatcctcacacgccctcctcctccccgcccatccccggcgccaggactgacggggagagggcaaggccgggccagaggggctgtgggcctggactgcggctgtcgcccgcggccctgctcttttgggcagccagacgtggggtcagcgcccagtcgcagcctccgggggtgagtccgcagatccccgcacgtgacacaggccaggcatggggacggggagttcctcgtcgtccgttcccactcagatgctccctgaggttccggaacaccccgccccccatcccaggatctgaccaaccctcaagccacggccggccccggttccgcgagacgggggactctgaggattgtcctcccttccgggctgggactcccccacagcagccgaccgcccccagttcagagtggcccggcccgcagcgctccccgggcacaggtcccaggtggacggctccgctcccgcgcccggctcctctgcccgccaagcgccccggggattccccggcctccaagcggccgcggccgggtggagtcagccccgaagcccgggatcccccgaagggagaaaacccgctctgctcctctgaagcggcgggagaaaccggccccacccaggtccgggggcccgacgccctcggcggaggccggctccaggggtccgaggttcccgaagctggaggccggctccgccccggcgtccccccgccgccacctccgcccccatcccgcgggccggcggagggaggggcggggccgcttgccgcccgcgactcgggttcggcttctttagtgattgcttctgcttctcccgcgccagctgtccccagctctggggcaacgctgccaggtgcccagtccccgcgctcgagagagcgcctgcctggctctgaactctggccaggaaggggcgcgaggggaaggccccgggggaaggcgtgtccccgcgccccgccccgccccgcctcggaaagcccccgcggtcccgcccaccccaggggctcgctcagcctccggagacttttttctttgagcgcagccgcctggtgccggtttccgccgagctggagcgcgcgggccacggcttctctggggacgcagaagcgagaagcggggacctcggcgcgcgccccgcgtcccgctcttcctgcccgcgccccggcccccggcccgcgccccggccgccggcatggtgctgctggccgggaccgggccggagggcggcggggcgcgctgcatgaccccaccaccgccgtccccaccccggggcgcgcaggtcgaggaggaccccgctgactacgaagagtttgaggacttctcgagtctgccagacacccgcagcatcgcctcggacgactctttctaccctttcgaggacgaggaggagcacggcgtcgagagcgcggagagcgtcccggagggcgtcccggaaagcgtcccggagacggcgaccctcctgcgcgccgcctgcgccaacaacgtggggctgctgcggacgctggtgcggcgcggggtgagcgtcgaggaggcgcaggagactgaccgcaacggcagggtaagcgggcgtccccgcaggatttgagccccctcactgcccccactcccctcctccccaccacatccccgcgcctcccagctcctggctccggaccggtccctcggtcactcagccgccgcccagagcgccttttccccgctgtttgggagcgcggtgccctgggtggcttccccgtctcaggctgggggacgcggtgcggggagggagcagtcgaggtgtcagcgcggcagaaacgccagtccggcgtcctcaccgcatccccttctcgtttaccggtccccgtggacctcctgactgaattcgcgctggctgcccgtgctgcaatccaggatgggcttcttgcggcccggtcccctcctgactattacctttccccaggtccctggcaggggaccattcctcctcccctgcaggagacagcccctcctgcccagcgccccatttggcccctgggcccctcgcgccgcccttgtcctaacacgctggggcgcagatcggctcctccagccgcaatgatttggaagcaacagtttcttccctcgccgggacagcttggtcccctaccccacctccgctgagctttgtggcccgcgccgcgaccagccaacgtgatctctgactggtctgtccgcaggtcaccttcgcgagccaatgccagccggggctccccagagtcagggcatagggagagccccagagccgcgggcatccacccgggtagggcaggaggcg

SEQ ID NO: 5234 - DNA, 1154 bp, Homo sapiens
ccgtctcctcccgtatattagggacgtcatgaatgcaccgagtatgttctcagggtggcggggagcagcattgtcggtgttgccctaaatacgcttcctcccggggagatgggtggcagggagggggagcacgcagggcagccacttggtaaccgctccaagaaaggcactaaccccggacccccttccaggcacagcggcttccgagggggacctggcgcgatcgcggtcctccccgaggcaggcagaaaccccgcagcagccgccgccgccgcctgccggccgggagcccaggaccacccccaccagcggcaagaggaggaggacggcgccgggaggaggctgcgcccggccccggccgcccagccccgcaactcacccaaaggcgcggcgcccggcggcttcctcgcaaacatgcaccctccgccggcgacagctcctcagtccgggaagaggcgtgcgcggcgccgcccggcttcagggcaaggtcctgaccttgcccaactgcagcatcttccgcttttgttgtctgagcgcggccgcgggacaagggatgctggcgggcggcaggggcgagcgccgcgggcgagaggcggctcccgacgcgagtgcgcagcgcccggcccggcggcccctccgagctcggcgagcgcagcgccccctgcccggctccgcgggctccacgggctcctgcgggctcctcggggctccgggcgccgccgccagccggccgggctgagagagcagccgccgcgcccgcagctccgctcagccggctgtcgccgcgggcgcgagcctggggccgccgcggcgcccggcgccgagcgctcccgagctgcgccccgcgcgcggcccgcgccacctgtgccgccgccgcctcagccgccgagggcgaggctcctcccgcggcgcgcggcagcctcagcctccacctaaacctcggcggccggcccgggcgcccggctagtgagggagcgtccgccccgccgccgaaaccggccccgggtgcggagcatgcccagtgccgccgcgagagcggcgcttcgccgcgcgcgttccacttctcctggttttcgcggcagcagcggcagccgcgggagagaggggaggaggccgcgggttgggagagggccgagcatccttgggaacgcacg

SEQ ID NO: 5235 - DNA, 1154 bp, Homo sapiens; identical to SEQ ID NO: 5234

SEQ ID NO: 5236 - DNA, 396 bp, Homo sapiens
ccgctgggaagggaaaaacggcccacatcgaactggatgccggatggaaacctctctgcgctattagactgcgtccagtacagcagatggcacgagcacgtgcggcgctcagcttaggctctcggaggcagctgagttggaaatcccgacggaaagcacccacaagctcccactctgcgctggcccacccgcgtgcacgcccaccccccacgcgcgtccctggctcagaagcgcacagatgtttactgcttagagccggtaccgctggggagatcgagcgacttgcgcggcgcacagtgcggcgctggcagggctctgggctcccggtcgggggttcgagcggccaagggatgggggtgggggcggggagagtggggggagggcgaaagaccgccg

SEQ ID NO: 5237 - DNA, 438 bp, Homo sapiens
tcgcgtggagagaaatgagctggagagttacaccgagtcaacgcgggacacggctcccggcccgggccgggccaggggtgggaggcggttccctaccgcaggcggcgggactcccatgcgccgagggacccaagtctccactccacccacacgcccacccggcgtcggggcgctgcggcctcgcctcacgagcccagagcaggccgcagcctgggctggggatccggcacctgggcagggtgagcttggccggacatcctcctccaggactacccgcaccccacagtcgcgtcaaaagcgccccatccccctgtctctcgccgcgcaggtttcccaccgacgcccgctcggaaggcgagagcccccacgtggcccggcgcggcgcggcccccggggaccgcgagcaacaaaagcccggcccgcagcccctgctcctcg

SEQ ID NO: 5238 - DNA, 438 bp, Homo sapiens; identical to SEQ ID NO: 5237

SEQ ID NO: 5239 - DNA, 411 bp, Homo sapiens
gcggtggtgtcgatccacttgagcagctgccccgcgctcagctcgccgcgcgcagtggcgtgcgccggctggatggcttggctcatgaccacctcgccgggcgccggccgctccatggccagggcgagagcgctacgcctgcggcccccgacaccccaccatgcccgctccgcccgccccgccctccccgcccagctccagagggcactggcgccgcccgcccgggccgcgaacccctggccgccaggtggtgggagctgcgagtgagggggcccgcactgtcatcccaggactatcgcgagtgggggaaaaccagcgctctcgggtctcaggagaagtctgggaagtgcgcggggagggggctcccgggtagacaggtctggaaggcggctccccgagagccggagcgcg

SEQ ID NO: 5240 - DNA, 1137 bp, Homo sapiens
ccgcggccaaaacgcccagcgccgggtctgggtttgcgaacggctcagcccaggccctgcgccagagcaccgcacccgggggcggacggccctgcagctccccagcctcttcccgcatcaactagctgacgcccgggcgcactggcttcccccgctcccgcccgcacgaaagccctgcccgacgtctgcagtcagcatcgcccgcactgcctagggagggtttgcgccgagacccagtggccgagtgagccacagagtcgctggtcctggggacgctgtcttctaccgctccccaccgtcctcctctttcctgtatctcaccccggtaccccgcacccttctccccgctcggccccgcgcactctgctcagactttacaagcactttctcggggcacccaggactcgacgcctcctccgcgccgccagcggcgctcgccacccttggcacgccggagggaccgcctccggccccctgcgcggcgtttctcaggggactcccagcccatccctcacccagctgtccgggtcccgacgccttacctttgccgaactgggggacaccgaggctgagcccgaccaagagccagacggctaccgagcgcttcatgatcccgtctcccggacgtgaccccggctggtcaggggtcgtcgcggagggcagtgtagccgaggtggcagcgcagggcagcagcagactccgcccctactaaagaattcaagaagacgttctctttcctcagcgctttgttaaacaaattcttggagagggcgagagtggtgactaaagagaggagcctttcctccccttttgcctgcgctccggcgcgcggaggtgggtgagctccggggagccgccggcgggctcagccctccgctgcgggtgggtcccggcagaggcgcggcgggcggggcgcgggctcccgcggccgccccgggtctgctgcgcgggcaggcagacccaccggcagacaggcggaccgggcgctcggctgtcgctgttctccgcgcggcggctgcggggcttctgacttggagaacaatgaagcgtgagctggaggggagcgagcgggccgccgggagcgcactgtgtacaaacagaggcggcgtgcgtgtgagtctgagcctggcaggcgcg

SEQ ID NO: 5241 - DNA, 2383 bp, Homo sapiens
ccgacgtgtcaaggaaagcgcgtcgcaaggtggagcgctcgggttgacgatgagaaggtgagctgtgaaccctgcacacgtcctcaaacaaaaggctcacgagcggcggccccgacgtggggagcaagcaggcttctctggcccctgcagcaggcggacccaggcccgcctgccgccggacattcagaacctgttcccgcagcgcgagctctgcacacgctctgcgatcggcacccctggaccccctaaccacccgccgcccaacccccggagagagggctttccgcccgctgagctgcggggttgggaaggaaaagggggacgcgctcctgggggtctttggatattctggcaaagggggctgcagctctaggctccagctaaagggtctgggacggagtgggccagaaagccgccaaactgaggattcccccctcccccaagccggagccctaggtgcggagccgcttgcccacttaccctcggagcacgtcctgctgtcctcgccggcggacgcggctggccactgcggcaccctcctcgcgatactcgggcgctagaaacccgccttcagagcctgctgtagcggaccgaacctgttgcggcggcggctggggccggggcggcttgggcggaggaggctgaggctggccggccgtgccctgcgcccagagcaccacacagcccagccacaggaagtagagctggagacacagcctccgtcttctccccatcgccggcgccgaaagcgcgcggccgtagacccgcggagagggagtgatcaaagacaaaatctgcgcgcctcagaaaagagtcagggtctaataagcccttcgtcggctccggggactccctcgggctcgggctccctgctctagctggagacctcgacagagcgccggccccctgactgcccgcgaagcgagacgcggggcgccgggtctagcgcagtgagcggcgaggcgcggcggaggtgcagccggcagccccgagcggtacacgttgcataaccggcctaaagccccgagcgactccaggaccgtcagcgggcgggggaggaaattacaaaagccctggcgtaaaatttcaaaaaatgtgaacctcaaaagaaaaaagggcctgcacgcagagctcggcggattcccgtgcgctccgaagacggatattggaaagctgcaaaagtcaccagaaagaaacaggcaagcaaacaaaagtcgcccccagaagaagaggagggttccctccgggctcgctcggagtcccacagggcaacgaagcgcgggtagcggctgcggagccgggcggaggtgcgcggggccggggcgtgcggccagcaagagagagggcgggaggctgggcgctggagaagatgcggcggtggagggcgcggcgcgggggttttagaggcccggcggggcgcggggcgggccggcgggcggcggctgtcagtgggggcgcggccgtccacacgtggggctcaacccggactgagaggccggcgcagagtgggcggggacagagtaagggagagatcgggactgaggaacgaggggaaccagggttgggtgaggggaagaggaaggaagggggggagggcgaagggagggaagaggacggagattggggagaaggggggcgaacccgagaggaaggccgggctggaagagggacttggaaagagggattggcgagcccgggtgcgagaggaaatgagcgggggatgggggcgaagttagggcaaagagagaagtgggaaaggagagggagggccaaggtccgggcgccgagaggaggggcccggggggccggctggagggggcgaggcgctaggcggctttgcttcccgtccccgtcaattggccgctagctctgttttgactgcctgtacaaagcgagtagacggcgggggatggggcgattagggaccggatttgggaaaggaggcagcagccccttcccctccccctccgtcctcgcccggccgcggaccagggactagggtgcctaagcgcgccaggcttggccggacccgcagctgaactgacccgcagctgaacttccccgccggacagaggccgcaaggttgaggatgagaacgggtctttctgtagggtcccggcccctgacctgggatggggggattcgcagtcagccaggaatagaggctcacggggctgttggttgcagcctcaatccaagaaggaggagacctcccctttgccctcctacccccaccgccccaccgggagcggcgtcagtctgcgggaccaaattaggggctgggagtttccagattgaaatgcgccctccaccaccaagagggagctcacgcggccgcggggggccgaggcagccagccggcgccgcggtcctggggagtccg

SEQ ID NO: 5242 - DNA, 2367 bp, Homo sapiens
gcgatcccggctttggggccctgcctttgccgcgggagaataggctccaatttacgaagctggtcaatttcagaaatccgagacccggttcttgagaagcgactgcgtgctccgggaccctgcgtcaacaaccaaacctgggagaagccgcgggaatgtctttattggacgttacgaagggaattggggtttctctcctgggaagaaaaagcccgacctgtgccggcgagagcaggctgccttgggctgggggcacctccgagcgctgcggcgggacgtcggggtccggggcgaagagagccagggcgcggaccgacgtctgctgcttttctgcggcattgctgcccgaacgaacgaacgaacgaacgaacgaagcggtttcgtttaggaaaaataccctcttgacgcgaagccacggctgaagtcccgggccacgcagaggggccagcaattccatgggtggtggggccctccatccctggacgcagcggggagcagcgggcggccctctctcctgcccacttctcctgggggtgggggagccctgtgtcacccgacgctgcgaggggctgccacgggcttctcaggttgtgcccttcgcggggccgtggcccgtgcccccgaggctgctaccctcttgaggtgcccggagccaaagcagagggttgatcccgccggttgggtgaggtagcacccggtgacggcggctatgactgtgccctgggcgcaggaacgagctcctcgcgctgcctcgaaggctcctgaccttccgcgccttgcgctgtcccgcgccgccgggtggacccacacacgccaggagcaaactgcgcaggactcggccgccacctccctgcgcccctccaccgcggagaccctgcgcccctagcccagcgtctcttaccccacctgggcagcgctgcgtctgcggctcgtgggctccgggctcgcccgccgcggactctggctcaggtttcggctccggctggggccccggatccagctctggctctggcactgcacggttcttcggcccctgctggttcgctacatcccagcgcgcgaggccggggcttcctcggctcggcccgctcctcccgccgccgccgcccgtcgcccgcggggaaggcggggacactggccgggaggcgggaagggtggggggaggggaagctaggtgttcgccgggacctgcggggagaggggcggcgcgcagtcccgccggctaggggtcctggcctccctcggggcgtaggctggggtccgcgcggctggcggccgggcctcgaggccggggagcgcgccctgggacctccgtggaggggccctgccgcatgcggacgaagccagagcgggtcccagcctggccctggggcactttctctccctgggcccagtttcccacctgactcgtgaggggctggccctacttccgtttagacgggggctggtggtcgagtttggggttttgagattggacctttcttctttctgctcagcctgcgggagggagctggtcttgcgtgttggcagggagagtccgctgcccagagcgtggcagccagggaggtttgaggacagaccccaggttttctgtgtttgggggtagggggtgttagggtggggcaaccgcccgacctgccctggttgggggaattgccttcttccctctcctcaggggctgggctggtgaggaaagggcacaccaacccctcaggacagacacttctggggccccttgtccaacccctatgcctgcacatcccccagcgaccatcctgctgcgggcctgcgaacggtgacgcctccacccctgtggccccgcaggccgttcctggctggctgccgctgggagacgggctggacgcaagggaactgggagcctgtcctttgcccaccctcaggccacagggctccccagcgttgcctcgtggccagataaccctgtgcgcgaagcctcatggtggaaaccagttggccgaacctactcctggtaccccgaagtgcccagcctgagcctgcttgctgttgggattatgggatgggaccacagggcaggtcgggctgtggcctgcctttctcagggactggagcggctaagcctgcccgccgacggccacgggctccagagcgaccgtttccggcgcaaggtgccgggagatggcagcgcggcagccgggcctgaatctttcatgagatgcagtcagcagcggcgcctccctgcctggttctcgccgacagctgctgcgggagaggccgcgacccgcgccacctcggcgtcctgctagtccgtgcctccagggccgcttggcctgggaacgcagagacccacgaccccctccccaacctccgaagcgggaagccggcccg

SEQ ID NO: 5243 - DNA, 1235 bp, Homo sapiens
gcgctagcgcgtgtcctgctcagagagcccggcgctagctcattcttcgtgcagttattggctgggactctgtgtgccgctgtcggccaatgaagacgctggagatcgggcccctgcccgtcccctttctgcgccccgggatgaggcagagactgaacagccggcgagcaaatcaacggcatccagaaagccatgtcggactcggcgcccagcgcccaagcgctaacccgctgaaagtttctcagcgaaatctcagggacgatctggaccccgctgagaggaactgcttttgagtgagatggtcccagaggcctggaggagcggactggtaagcaccgggagggtagtgggagttttgcttctgcttggtgccttgaacaaggcttccacggtcattcactatgagatcccggaggaaagagagaagggtttcgctgtgggcaacgtggtcgcgaaccttggtttggatctcggtagcctctcagcccgcaggttccgggtggtgtctggagctagccgaagattctttgaggtgaaccgggagaccggagagatgtttgtgaacgaccgtctggatcgagaggagctgtgtgggacactgccctcttgcactgtaactctggagttggtagtggagaacccgctggagctgttcagcgtggaagtggtgatccaggacatcaacgacaacaatcctgctttccctacccaggaaatgaaattggagattagcgaggccgtggctccggggacgcgctttccgctcgagagcgcgcacgatcccgatgtgggaagcaactctttacaaacctatgagctgagccgaaatgaatactttgcgcttcgcgtgcagacgcgggaggacagcaccaagtacgcggagctggtgttggagcgcgccctggaccgagaacgggagcctagtctccagttagtgctgacggcgttggacggagggaccccagctctctccgccagcctgcctattcacatcaaggtgctggacgcgaatgacaatgcgcctgtcttcaaccagtccttgtaccgggcgcgcgtcctggaggatgcaccctccggcacgcgcgtggtacaagtccttgcaacggatctggatgaaggccccaacggtgaaattatttactccttcggcagccacaaccgcgccggcgtgcggcaactattcgccttagaccttgtaaccgggatgctgacaatcaagggtcggctggacttcg

SEQ ID NO: 5244 - DNA, 3043 bp, Homo sapiens
gcgagggtctcggggtggtgggggtgccggccccagcatgtggaggcgacaggatccgtaagaccccacgcgccgccggggcaggaccgcacagggccgccattcactcacttggggcgtccctaatgggcactcgtgcattccagctcgtgcggtgagcgcacgcacgccgccgctgccgcgttcacacggccccccaaagtcgggggaggggtcgtggagcgaaggagctgtaggcagattttctttctctttccgagctgggaaaagggccagccccgtgccctgcacgcctggctctgctttgcagcttgccggtgagccaagagccggtagagcagaggaggcgcacggttcgggtcgtgtcaccatttcttggcttgctgacctggccaggagctggggatggcggcagcaccgcggaggtacgctttgcgctgccctcacgctcccttccgaaagcagtgcccccagggggaaagttcgcaatgccatttgtctcgccggcaaagttctgggatgtcgggcatcttttgaggagggggaagacgcggcacccttactgaggccggcaggccaggaagagaagttctccgggcgcagggcgcagcccagctccggggaccctctgggcctcccgcgtgccggccgggatgaagcgcgctttgcaccggacccgggattcgggggcgggggctggcgctggcagcgtcagacgctgcttcatttcccctcgaccctggggaggacagcaacaagtcctgccccagccatttcatcaccctgctagcacgtgcagattccgggccctcggagcccggcgcggacctcgccttgcctcgcgcttccctttgcacgtcccgtgccatcccaagagtttgcgtggccctgggtgggcgcctggctcccggcgaaacgcctggggcgcgccgcgtgggtgcacggtgtcctctcccagtagctcccggctgcgggggcacatgcacttacctgtattctgcagggacaggcggcctttctgctgggagctcctgtcttggggaccctcgggtgggttggtggcgtcggtcccccgcgccgggtcaaaggtggccaacaccaaagccagggtcatgaactggcccagccgctcggcacacatggttcttggtattaacctcccgtcgggagacctggatcctttgtgctcccctcttcctcctcctcctcttcctccttcgccgcttcccctcctcctcccactcttcctttttgctcgccttttccctcctcctcgcggccgcggctcggatagaggttacccagcgccctcccgtagctctccggagagcatgtgaccaggccgttagcagcgccgcgagtgcccggcaatggcagggatggtgcctcaaatatccctggaagctctggtgtcacttgaatgaaggagtcgagcaggtgttgtcccggcggctggaccaatccgagaccccggcccttttgacaacacggccgggaggcggggcctgcgctcaactactacaggaggaagccgagcgccgctgggagcgccggacaaagttgccgacctggcggcggccacgcgtttgcgtgcgtgtgtatgagtgtgtgtgagcgcggccggagatgcgtgcgcgtgtgcgggtgctccagggcaatggtcgaaaggactgtacaatataagagcgaatccaagctccagttgctgttaaagggggacggtgtgctctgggacagtgtccctggggcccctggctcgcgtcacacccacatcgggttgggaaagtttcctctttccgccgtttggaattcagtgagattcccagcccagaggacttgataaattgaagcagtttcctaggcacaatgatgctgtgggccaactgagcacacatgggaattcctggccttgtgacactttgcattaaaaagaaccccacgattgaagataggagcagaagcactagatacagtatttggtctgagcaactgccctatcttcccgctttggtgggccgtgcaacacctggagtgtcgtttctcgtctttcccctaatccagacgcattccaggctgggctgcagggatccaggtgacagtcaggacttgcatcatttccaggagggtggcagggaggcccaaggcagccctgagtcagcccgccgcggagcatcgcgtgcccggaggccagagcttgaaaggcaactttacgcgtctccaaacacactcctgcattttctcaaagcgctgctcgccaccccgctccgggttcccttttactctccagtcatccgatggaagtggtgagaacaaaaacaaagacaaaaaagctaaatccggggaagttatctccatctcctcccttttcttgttcggccccctccccaagaaccgccgggtcgggatagcccccggctactttctcacccggcccgtggagggaaggagaaagttgggcgccgcttggagcgcctcttcccctgctgtgtgtgtacgtgtgcacgctcacgtctcccccgcgccggggccggggacaggaactgctctcggtcccgtcaccccacggcgcagctcggggggctcgcagggctgggggagggcggggacacgagcgccgcgcccaagcgccccagggcacgcacccggcgttggcgcgcactcgcccctccccccgtccccaccctcctcctggagaacaggtgagccccggtaccagctctcgatcccccacccccgccccgcgccccgcccgcgccctctgcggtaatgcgcctgggaagtttcatcacccactgcccaggcgacgcggccctgggtctccgcggcggggcgcactgcccgcctggttggggccgccatgtgacacggctgggggagggggcgaggagacacgcgggcaggtcatcttttggccggcgcttgacttccaaagctttcctttcccgtgtcccggctgcacgcgggagtggggaaggcggaggcggggggccaggatggccacggctggccgcagctatccggcgtgtcgagctctcctgagtcg

SEQ ID NO: 5245 - DNA, 864 bp, Homo sapiens
ccgcaggcgcggagctgcggctgcagccaccagcctagacgtggcgcgcccgcagcaagtggctggacaccgcagaccaggcccgcgtccccagcagcgcggatcccggggccagccgcccaggcagcaaagtcaggcggtcggcttcgccagcagccgatgagtctcatcctgtggattgcccagcgccagggatcaggatccggagaggtgtccaggaggagcagaccctcagaccaggtaggctgtgcactcggtgaccctgacgccatccaagggaagctccgccatcccgcgccagtgcctgagctgcaactgcaaactgcgcgtcctggcacgagcagcggtgggggcgggtgggggaaggagcgagtgactctccaggcgtcttccgctacctgacaccagccaggcagcccccagggccagagcgtcagcgccgaagccaggctcatccgggaagccactccggtggccgcggggtgcccatgccagcaccagatctctcttcggaaggaggagcggggcgggctacacggccaggcgggccctccccttaaggcggggtgggccgcgcgcctgcgattttccgtccgtggtcctggggcagcccgggccagccaggagaacccgcgagcccagcggcgcctgcacctgcggcttccgggagccgggcggctttgcgaggctcactaggtctgagaggtcggaggccgccagtgtcgctgctgaagggtggaccaggcgggatcgcggattctgggctagatcgcagacttggtatcgcggattgggatttggatcggggattttgagttggatcacggattgggggttggatcgcggattgggggttggatcgcg

SEQ ID NO: 5246 - DNA, 2071 bp, Homo sapiens
gcgagagcagcggagagaaaggagctagagaagtgcgtactcaccagcccatcgcagttgctgagcgccacagaggaggcttcggctaggccggccacgtctccgacgtagagacagctcccgagcaggggctccacgcgggtggtgcccttctcgccctgccactccatagtggccccgggcgccacgaggcgggcgttgggccgcagccgcaggtgcaggtctcggccaaagaccgtgacattgtagaagaggtgactgccaggctcctcctcgttgcctccggggaagctcggggtccggaccggggcggccctgcgggctcgtacccctgctctggacgtagctgccgacaccacgtgggacaccaagcggccctgggcgtcagtgcgcacgggcaccgccaggatgcgctccgctccgtgccccaggggcccgcctgcaacgggaaggggcgttagatcggcggagaccacggagccccagtgcctcagagacccgccggcaagccacgcccccccagaccccgccccactgcgaagggaaggggcattccgccaggcgaccccagaagccagcctgcacctccccggctttcctgcaaccgggaaggggcgttaacagggccaccactccggggctccgccactccccagccgttccctcctccggagaccttgcctgccaagagctctgccccctgccccgttcagggttggggctcggtgggaacctccccgtgcccgaagggacgaccccgtcagagagtcccccgacccttgcacctaccgtccttggcaggacgtggagctgctcggaagccattccgggttggcccccttacccgtgtgccacgacccctcggcgggcccctgccgcccgagtgccctcaccgccagcctccggagcggcggagtctcggcttccccgagcacgagcggcctgtcctgcctgtccagctcccgctcagcccgctgccggccccgtctccccgagcgcccgaggactgggaggggtggaacagggtccctccgatctccggggattccctgcggggcgccccaaccaatccttagggcccaaggctacgcgctcggcagccggctcctccggagcgtccccggacgcgagccccggcgccgcctcgccctggctcccccctcggacccgctggggctgactctgcgctcttggccgcggggcttttcccggccctccgtccccaccctccgcgactcaggagccgccagtgctccgaggctcccccggcccaaggcgctcgggggcggtgcggggcgccccctgcgcgaccaacccggccccgaagttggccaacttggccccgggcggggcgcgcggagtttgcccaagtcaggctggacgacgcctggggagggggcggcggggcacgcgggacagggccaggccggcgggggtcccggggagtaggggccgggccgcacctacctggggggtcggcggcggcggcgagcctggcgttcgcgggcggcggcggcggcggcaggagcggcggcggcagcagcagcagcagcagcagcagcgcggggcagagcaggcggcgagcggctcccgccggcggatccatggcagccggactgcagccggggccccgcactcgcagccggcgcgaaagttccccgcgagccgcccagcccacatctgggggcagctggagccgcccgcagctgcagcaccgcagggcgcggggcggaggaggcgaggcgcggaggggcgggcgggggagcgcggagggaaggcggggagagggaaggagcgagcgagcgagggaggcaggcgggagggagggaggcgagcgagggggagggcggggacggcgggcgcctcagcctgcggtgacccggcgcatcttggcgcggccgccgccgccgcccgcttccctcttcgcgccgccgtcgccgcggtgccgggctcgcagcgaagcagagacaccccgaggcggcggcagagaagcgccgcgggccgggccgggggagccccgccgccagccaccccaggggcacaacctccgaggagcggcgccggccgaacg

SEQ ID NO: 5247 - DNA, 1170 bp, Homo sapiens
tcgggctggcgggcactgagctggggccatcacgcctttctagagcgcctgcggaggtggcgaaggcttggagagcatacgaggcggaatccggatcgagtgagttccttgagccgcttgcgtgggacgcagggagagggcgaataacgccctcaggcgctgaatgcaggggcaaggagccagcgagggtggctggagcaggccttgccagctgttaccaagtctctccacaggcttgggggcttggggcctcctggaaagatccctccgccgcgctgaccagtacggggctcgctcccgcactttgaaggctgccgcggtctttcgtcatttataatcaagcccaagatcaaggttgcaagctgaggtcggggtactgacaacgggaatgaagccataggggaagaggataactgggacgggctggacccatacttgatacccgggaaactcctagagcgtgtggtgctcctgccagcggcagttactggtggagctgaggccaccgctactgtcgtcgttggcgctttgcttctggaacctcccagcaagatggcactcactgtctgttcccttccgattagcacccccagccgcgctccctcctccccgggatacgtattagtcacatactgtggggagaagatgggctatgtaaatgtaagtcaacgcgctttcccagccacctttgcataatgcaacaggaacagcgacccgcgcgcacgaaccgggtagtgtgcgcgtgtgtgtgctcgcgtgtgtgagcgcgtgtgccagcgtgcgtctccgcgcgggcgtgcgtctgggtggatccttgcgtggcttgggaggcaaatcgggcgtttctccaagtcgtcttaacatgatttaggctctcaaatacgtgaaagcggtagacacaacagggatgcgaaggaaataaaaaacaattggggaagtggtgccaagtcactcaggctttgaactgaggacgagtagtgcggtcgcgcctggggcgcgtccggaaatcatcctcagcctgtggcggccactgccccacttaaactcttctgcggggagagttgagcggatccctggggggttggtcctgggctagttttaaactctccggttgcatctcgcgtggccccaccgacggcgcgtctcggcgtagctcttggcgcgggctcg

SEQ ID NO: 5248 - DNA, 2168 bp, Homo sapiens
tcgcgctgcagtcaggcagagccccggggcagctcgctcaccgcggaggagccactttggagttttacgccctttccacaccccacccatggactggaaaggatgttcagttactcgcgagcttgtctgatactgggatggaaagtcacagtccgcaggctggagtgaggcgcgggaagatgcctggtccttgcctcgcggacttggcagccgcgtcctgcgggtctgtccactgaactgctgaggactcgcccgtgtgcggggacccgagtgccacttcccggagcgttaccttgcgctccagcctccaggctagataatacctggaaggcagggcagggctgttcccgctctcaccccttgcggaaggatggcaggatccggcgcagcgacgtagcagcgggagggcacagcgacctgcatctccagtttctcctcaggacacaaggctgacttcaccttccggacagctgcaaagcccctgccagaaccaaaccgaactcgcgcctcggagaggggcttctggggccgtttcgctgcagggcgtggggagtggagagagggaaggggaagcctggggctgggtgtgcgcgcgtgggagcgcgcctcggagcgccccgcactcccccactctatccccgggggcagtttgggaaggagggagtggtagtcgcgggaatgagggagcaagagaaaccctctcaaagtgacgccccaaacaggtccggatttagaattcgaagctaaaggctgttagaaattgggactcctcggcctcctctgcagcccctcctttcccgccccgaagcccgggcggtttgctggctgcctgcttccccgcccccggctcagaggtctctggctggcgggcgccccgtcggccgccggcttcctccttgaaacccgccggcgcacatgaggccgctgcccccgccgcaggcgctggcggccccctcgcggtgcccgtggtgatgccatgccccgccaccacgcgggaggagaggagggcggcgccgccgggctctgggtgaagagcggcgcagcggcggcggcggcgggcggggggcgcttgggcagcggcatgaaggatgtggagtccggccggggcagggtgctgctgaactcggcagccgccaggggcgacggcctgctactgctgggcacccgcgcggccacgctcggtggcggcggcggtggcctgagggagagccgccggggcaagcagggggcccggatgagcctgctggggaagccgctctcttacacgagtagccagagctgccggcgcaacgtcaagtaccggcgggtgcagaactacctgtacaacgtgctggagagaccccgcggctgggcgttcatctaccacgctttcgtgtgagtacccgcgccccctgctatgcccgctgcaggggaccactgtccctggccccctggggcgtgctccgcgctcgcgcccttgggcccccgcgcgcgtgcacacgtggtggcttttatttcttcgcacgtgttcgtggtcttccttctggagcctctcccctcccccagccccacttctctcatctctacagcttgaaccttttccccgaggacacccaatgaactgcccggtagcttcaggctcccggggcgagagccaggcagacgcgggacttaggctgcgcggataattgggagcaattaggtcccaagatacgtaaacttcaaccgaacggggcgcccgggagctagggaatgcaaagggaggacaggcgcccgtgtgaggcttgagagtatactggagaggttaggaggtgatggcggggtaggacggggagaagtgagggggcatcgagggctaggtcctcagtcctaggggcggagtaggggaagctgctacttggagagagctgctaggttttaagcgcgcccggaaacacgcctcgccaccacccagccaccaccaacggaaaatctgtcagtgcatgtagcccttcctgccacggagaaggtggccaaggtctagaggaggccagcaggccaggcgaagcaacgctcccgcgctgcagggggcggggaggcagcggggaacctggggcgcaggaacgcgggcggaggtgcgatagcagaagcgcaaatgggtcgcctctgacagagatcgggcagtgggttaagtccccgtttgtggcgcg

SEQ ID NO: 5249 - DNA, 2053 bp, Homo sapiens
ccgacgcacgattcgctcacacggaataagaactccacgaaggacacttggggaccacactggtcgtacccgagggggcgggaggcggaaaaagtatttccaaacgcaactctgccaggtcttacccttcgcatcccctggtcctcgggacagaagctcccttggcacctctcgcccagctcaggggctggttgtccgctagaacgaaatatcccccactgactacggagagctctgcagggagccgaggcccccgcccgggccaagggaaggcgctggcgccgcgggagacaagaagaggcggaggcggaaaagaagtggagaaggaaggggtggcagagggagtagcgtgcgggaggcggcgccggcgccgggctgctggcgaggcggggtggggtggagtggggtgtgcctccggcgggcggtcagcaagtcagtccgtccgagcgccggcgtcccggtctccagcgcccgcccgcgacagcgaccgggactggcgccccgctgctccgaccgccggcgagcctcgccccttcccaggctcttcactgggtcctcccgcgagccccgcctggcccggcgtggggccgcccgtctccgccagcccgggcgcccgtcgcctcgtcccgctcgcgcagtccctgccgctccctccgctcgcgctgtctctggctccctctcgctccagtcccatttatgaagcgcggtcccatcacgtgttaatgagcctttgtcctgccctggcagcggcggcggcacagaccccgccgagggaactgcgcggggagggacctgagcgcagcgcccgtagccccaaactttgcttggggcgggggacccgccgcggcgccagccctggggccagaggggacaagcctcttcggcccgcgtcacctacttctcctcttcctcctcctcctccgccgccgcgctcccggaggcccccgctgccatgacctcgctgtgctcccggataccctcacaccctgaccaggccaagaaggggctggtgcatgcgccgcccacgacctcggggccattaatcacacgctcccgggcagcgcgcatcgccaacaccttccgcgggggtcacgtctggggcagcgggctgagccggaaggggaaggggagcgggagcccagaggccgaggcgcgccgggcccgggggtgcggtctcgcgccccctccctccgcgcaaggccgctcccgtggcaggcggcagcgagctgggcccggggccgggctgagctttgggaccgcgctgcgcagcccccgagccgttcgctacctggctgcggtcgcgcggccacctgtcctccgccctcggggcgccgcccagcttcgcgccaggcgccttctccagcgcccgccgccctttcccggcgagaccactcgggcgcgccccgcccgccggtccccgatgcaaacagttgggctccgtaggcggctggctccgcgcctcccggcccggcgcgccccctccccggccacccggggccccgctcctcgcaccttttcgctggaggaggacgccccactccagggccggactgggggctctgggactcgggggcggcagcggcgggcgcctggggagccgcggtgtgctcagcagccgcggcaggaattaggggacatgctcgttaattgtttccactatcagccgccgtctgcctcctgtgtgcacggatcaaaccttaattggtctttacatttatcatggtgaattgcgaacctccaaacaagcctgggccgccgcttctgccgaggaggcgctcccctcccctccgcccccggggccctgcagggtgtgcggcggcggtcgtggttatttagacatctttatctctcgtgagttggatcgggagaggatcgcacggtttccacctgacggagccacgtcacgtcggccacaagggccccgtgctgggcgctgggttcggttcccggccgtcctcttgtggccgccttggcgttcattttatgacaccttgccggtgttcccagacatcatcccgcaccgctccgttttaccgacctccaggtcttcccg

SEQ ID NO: 5250 - DNA, 1679 bp, Homo sapiens
gcgtttccactgcgtgttcagcggcggtggaggcggcgccttcctgcaccacgaacacgcggctcgccaaggcgccgtcccagcggctgatggcctcggtctctccccaaaacccccggcgcccgatttcgccgcgccttcccaggcaggaactttgcgaccccaccccctgggcccgccaccagttcaggcctgcggtgcgcgggagggcatcaagcgcgaggcctcttccgcgccctcggccacctcgccgaccccaggcaagtgggggcagcccaagaagggcaaggagcagctggaccgtgccctggacatgagcggagccgcccgaggacaagggcacttcctcggcatcgtgggcggctcctcggcgggggtcggcagcctggctttctaccccggcgtgcgctcagctttcaagcccgccggcctagcgagggcggcggcggccgctcacggcgacccctaccgggaggagagcagcagcaagcaaggagccggcctcgctttgggcaggctgctgggcgggggccgggcgtgcgggcgccccgggagcggggagaactcggcggcgggcggcgcgggtcaccaccatcaccaccacgcgcaccaccaccaccatcccaagtgcctgctcgctggggacccgccgccgccgccgccgcctggcctgccctgctctggggccctgcgcggcttccctctgctctccgtccccccggaagaggcgtccgccttcaagcacgtggagcgcgccccgcccgcagccgccgcgctgccaggagcgcgttatgcgcagctgccccctgcgccggggttgcccctcgagcgctgcgcgctgccgcccctcgacccgggcggtctcaaagcctatccgggtggtgagtgcagccacctgcccgccgtcatgccggcctttacagtctacaacggggagctgctctacggctcaccggccaccaccgcttattacccgctcaaattgcacttcggcgggctgctgaagtatccggagtccatctcctacttcagcgggcctgcagcggccgccctaagccccgccgagctggggtcgctggccagcatcgaccgagagatcgccatgcacaatcagcagctgtccgagatggctgccgggaagggtcgcggacgcctggactcggggacgttgccaccggccgtcgcggcggcgggaggcaccgggggcggcggcagcggaggcagcggcgcaggtaagcccaagaccggccacctgtgcctctactgtggcaagctgtactcgcgcaagtatgggctcaagatccacatgcggacgcacacgggctacaagccactcaagtgcaaagtctgtctgcggcccttcggcgaccccagcaatctcaacaagcacatccggctgcacgccgagggcaatacgccctaccgctgcgagttctgcggcaaggtacttgtgcgccgccgggacctggagcgacatgtcaagtcccgccaccctggccagagtctgctcgccaaagcgggcgacggcccgggtgccgagcccggctatcccccggagcctggggatcccaagagcgacgacagtgacgtggacgtctgcttcacagacgaccagagcgaccccgaggttgggggcggcggggagcgcgacttgtaacgagtcttcccgggaaggggcg

SEQ ID NO: 5251 - DNA, 1474 bp, Homo sapiens
ccgttcccaaaggctcggggaaggaggttgcgggtgggtggcgcggacctcgggtccccagccatcggcgctctcccggggccctctgacctcgctccttaaaggaggagggtccgtggcaacggtcctcctcggccaggcgctctcgggacgcgggggtgaggagtgagcgccgtggcccaccctactctccgagcggggacggagtgggcgacaccgcgcgcccggctgcacgcaggctctgcgcggctcgaggcggccctacagggggcgaggaggaaccccggagactcggcggagagagcagagacggagctcaccaaggggcttgccgccgcagagcgcgggagccggcactcggtggggccgagggcccggggacgctggggctgcctgacctgagcggcggccgctgaccgttgagggtctctgtggccgcagcgcccagacccggggagaagggcggcctccaagggccgggagcccctcgagggcgcggccagcgaggagggacagagggcggcgcccccggctgcccgggcgcgtagaacaagcagctgccgccagggccgacaaagttgctccccgaggggctgagatccaactttcgcttcccgatttagccaggggagcgcgaggccgcacacaacccggcgcggggggaaagccggctgcagctgcgcctcccatccttacccggctggtccctggcggggagcctgggcagcgccgaccaaagttcggagcggcagcttcggggcgcgggacgcggggcacacgggctcagctgctcgacgggagcccgacgcgcgctcctcggcgggtcggcgggtccggaagctccgctgcccgggccgggtccccaagcccgcagccgctttgactaaaataggcatcgcgacggcggcggcaggcggcggcagccagggctggggccgcaccgcgcacgcgcatgcgcccgccgccccgcgccccccggcgggcggagcccggcgccgcggccaggatttcccacctcgctcccgcgactccgctgcgggtctgcacacccgaggactcggtttgaaacgcccgcttatttattttcttgtcgcctcgctacaagattctatccttgtttgggcatgagtggggggcggcagtctcgtgggaccggcggcattcgtcgttcctccttacggggataattcgagaagtgcggtccgggtagggagagaaatcaggagagaaaatgagaaagagaatcctcgtttcccctcaaagttggacgacccactcgtatatctcctttttgggagattcgcccataactcagcacaaacagggaatagcccggaaagcgcgcgagttcccgtccgattgtggcgggggaggctgaacgtttggtccacacgggtgcaggacgcgggggtcaggcctcctgctgcggaggaagagggggaagaggccgcgcgggagggacttctgacacgcg

SEQ ID NO: 5252 - DNA, 675 bp, Homo sapiens
tcgcggtgcgaagcctcggatccgctgggaaccgcatagtctccggcacccttggccgcatgcttgtcagaggtgggccccgggaaacacactcgctgcccctccaacaagcgtccctcgctccccattggccccccggtccccgccccccaccgccccctcccgctccgcagcccccgagtggcgtcagcacgcccgccgggcatgggctttaaatgcccactagcgggagctcaggcgcttctgccctggagcgcggtcgggagtaaaatcgcaggagtgggagggtagcgagccagctggattccgagccgcggagcgcgctggctttgctccgcctgatgactccagagcgcgggtccaagcgccgcccatgcagcacccctgagctccggggaaggagagttaatgaaaaaacacttaaccgtctccgctgcggagagtcatgagctgtctggatgttatgtaccaagtctatggtcctccgcagccctacttcgcagccgcctacaccccctaccaccaggtacgtgtctcctctggggactttgggaaggagtgcgcgccccccgtttgcggcggcatggcctgtacgccaaggtctgctgtgcctccgcgcgtctcgggcgtccgaccacgaccggcgcagccgggatgcggggattgccggagccg

SEQ ID NO: 5253 - DNA, 1133 bp, Homo sapiens
tcggctccgtagctctccgcgctccgacccttcagatcctcgggagcccaggggagccaggtgctgggcggtgcgtccggtgccgccgcgccccttctcgccacctctggcctctccgccactcgggctttccggccgctctggatgcctcggttgcacccctgttccatgaccccagcttccttccctaaccctcctcttggtcccttctcccccgagcgcgcgcgcacacacacactcggttcgctcccgcggagtggctctgggagcacgaccgacttcagctcagcaaaccgcggtcatgccgcccagactcctcgccccgaggccccggtccccgccgccgccgctttcgcgccgctcctttccgcctagacaccgccgcctgcggccgcctgggcggcagcccctgcggtcctcaaagttggccccctgggagggggcggcagggagcaggatgaaggatttgttgtaggaggaggattcacacatctgggcgaagggaggggcagcgccgctgctgggacgcggcgcggacccgcatcattgcgcgcagcagccgctgcagcagccgccggggaccgcggagccgggacgcccccgctcggcccgcgccccgctccccgccccacccccgcccgccgggcccagcaacgcagggtgcctaggagccgcgggctgcgcagggaggcgggcagcggccctcgcgcgcttctgccgcccccggagccggcgcgcggcgagcgcagggcgagcgcgcgtcgggcggcggccgcgctggggggcgtgaggcgagcggcgcggagagcggcaggggcgaaacttcgcgggccagatgcccgagggcgcggcggcgctgccaggctgccgctgctgcccctgcgggccccgagcgcgcctccgcaggcggcactgcccgcggcgcggcgtgtgcaccgagcgagtgaaggtatgtgtggcgggcgcggctggagctgccgccgccgccgccgccgcgccagcaggtcctaatgcctgtcacttcccaggacgctggcagcagcagcagcccggagcccccgagccctcggcaggtttgcgtgtccttccccgcgatctgattggataaagtgggggctcgacggtggccgacg

SEQ ID NO: 5254 - DNA, 1808 bp, Homo sapiens
gcgcgccggcgctggggatggggtgggggcgctggggcacaagggcgcaggggcgcacggccaccgacagccgggtgcgcctagcttgaggccgcggagaggagccgaactgggatgggtggggggtcttcggcctcaacactgcctgccagccccagtgcgcccaagtctccccgccagagctgcccttctggaggggctcttcgcacgcactgctttccccattcttctggctggaattctccggccgtcactgcagtgtccagagatgctgcgctgtagacccgggaccccttaggcgcctcttcccgtccctctgccaaagcgcaacgcctgtacttttccagctccctctttccctcttgaaattgaaagttattgaggtcgctcagggttgttgctccagcagtttccttccccgcccccgagctcccccccgccccccacagccatcccccctcctctccccctccctgccctcctctccctcccccctccctgccctcctcctcctcctcccctatgtggtgctcccgggagcccagcccaacactggagcgtctcctgctcgcgcacgccagaagcagctcggggtctctccgccgccccttggccatggccgctgtgccgacggcgcccgctcccctgcgctccaggggcccccgccgctgcagccgcagccgccgcagcttctgagcccaaggggccgccgctgcagccgccgccgccgccgctcgcccgcccggatcccgcctgcggcagttgccgcacaacatgctacctgcggccgccccggcggctcctggaaccccggttcgcggcgatgccagccaccccagcgaagccgccgcagttcagtgcttggataatttgaaagtacaatagttggtttccctgtccacccgccccacttcgcttgccatcacagcacgcctatcggatgtgagaggagaagtcccgctgctcgggcactgtctatatacgcctaacacctacatatattttaaaaacattaaatataattaacaatcaaaagaaagaggagaaaggaagggaagcattactgggttactatgcacttgcgactgatttcttggctttttatcattttgaactttatggaatacatcggcagccaaaacgcctcccggggaaggcgccagcgaagaagtaagtgcagggttttttacgcgtttgctccctcccgccgcgttcacctgtcgggtcgctttgcctgtccggagccggctcccaactgcagcggtcctcccgccctgcgcctcgcagaggagatgcaggttcgggctttgggggtatggacggcgtctttcacccttgcctctcggcgcccctgccttccgcagcatcctagccggtgcgaggggcgggcggacgcggcgctaaggtggctcccgccccatggtaacttcaggttcgcgggaaagttcggtcctgggttagactcgcacccgggatttgtgctttccttttgaggatcggacaggggcacccagccgaaggcacttgggactcccagacgcaggatgcctctgaccgctgagtaaatgacaagggaggcgcggccgcggtacccgctcacctagcgcaaccgcctcgcgcggggagacctcggctgggcccttaggctggactccggtagccgaacgcccgctacccggccaggaagccagggagcgagcgcctgcgcggccgcatccccgacacgcaccagcggagccaaagggcgcgcgaggcgatggggttcgcgtgtctgcgcgtttgcagagctgccggacgtcccccgcccg

SEQ ID NO: 5255 - DNA, 1323 bp, Homo sapiens
tcgaacatccgcactgctcatcgaagacccccgtgcttcagttccctctgtcttccatttcccccgcccatggttctcgcccccccaagccgttctccggaaccccttgccgggccggcgggaagcgtggaccgagcgggccttggccgcgtcttttccggccaggtttggtttagctcgcgcagcgcccgcgcagcccgccagggggaccccggcccgccgggcggcatctgaggagaaagcgtccgaggggcgtggagccagggtcctgcggtgcctgctccgggaatactgcgagtcggctggagctccccagccgctccggagaactgggggagccgggtccctggctcggtaaccggtggtcccgcggtagctagaggcgggccccacgggtgggtgtgtccgtttccgcacgccagccttccagcccgggaagagcgcctgcaagcgggtactttgttcccaaagatgggttttgtctgcgggtgatttgggctctcgaagtgcaactttgtggccgggacgcggatcggccggcctgggctcctgcagagcagatcctgtctgcgtcctccaggaggagtgggtggcaggactggggtttcccacaggttttggggcggcggcgagattggcacggtccggggtcgcaggcgcgcagccacgcccctggaagtccgccccggcccccgcccccaacccgcctcttcggggctttatggcgtgaggtttggggctgggatccatctggagccgagcagaaaacttttcccctcccgttcccggtcccttttgtctttcttggacgcggtggcggcgccgcctgagcggcgactccctctcccctgcccggcttgctgcgcccggtgccctccgagggcaggcgcgcctggactctgcgcccggatggcggcggccctctgtgagcaccggcagcggcgcatcccctgccccgaggcctccggtgcccccccggcgcgggcataggggcgcccccaccctccgtccgcttgcaccccttgccacccgccccctcgcctgactcatccgcccgcggtggccgcccgagccctgggatggggagggagaccgcggctgcccgcggcggccgagattcccgctgacgcccccgaccctgccgccttcttcgtccgcctccagaggcgcccgacgtcccgacagctcctggagtgagaccaggactgagaacagggagaggcgacccgacccccagggcccggtgctcaggacaggtgaggggaaggaaagggtgctgacgggagtggggaggtgggtgggcggccaccgcagccgaaaccg

SEQ ID NO: 5256 - DNA, 1501 bp, Homo sapiens
tcgacagtggctctccggcccagggaggagagcgcggtcgcgggtccctcccctcagcctggaggctgcagccgctcgagtcggcccgggtgggggcggggtgggggcggcgcggagggcacggagattacggcggcgccacccgggacatccagggccccgaggccctgggcggtccccacgcgagatcgcaaaccatgacaataggcagtcacccgaggtcaaataaaaacggagtgggtcccccgcgcgccgccgccccccgcgtccctggcggcctcccccgaggcccccggcggcctcacgagcccgcagtagccggtggcgacgtcgcccccgccccacctccctgcgcaagtgcgaggctgccggcagcgcggcgcacgctccggccgttcccggcttccgcgcaaaacttccatcctgtccacgtgaagttgtcgctgccttagagagggggaaagagctgcgggaaaagccggggagtgacgactgcggcggctgggcgcgctctctcattttcttttcttctcctttcccccctgtcgcagtccggagttttggctcctctcctttcctcctccccctcggagccggcttctccctccgccccgcttctcccccgcttgtgtacgctatttgttgtggggtggccgaaggggatgtcctgttttcaccagaggcacagcgcgaaggggaaacttcgacactggaaggaacgagaataaatacttaattacggacgcactgaaccgcggctgggacagacacttcgggaacccgaggcggaccgggcgacgaggtgagtgaccccttcttccaacccccgccccagggctcccgggggagcctgagttgagagaacccccaaactttccgggaaagtgcgcgaggctccgccggggacgccgagcgctgggtactgaggacgcgcagctggacggtgcgtgggcgcctgcgtccccggggggcgcttggaggccgggtgccccacgcctgagggcccgggccgctcggaccgcagcggtgctctctgccctagaagacgtccccaagccccaagggtcccttccgagcctgcctgtcccttccggggtcggcgcggagcctgcgcgtaacggagttcatccagcagtccagcgcgcggcttctacctgcaccccgcctccacctggcagaggcgcgagcatcggggtctcccccacatctttcttatgacgtgtattactttctgatgaccccctagatggtccaggcgcgaggatgctgacccagagtccttcggagggtcacaggcgcctgggctttcccggtgccgggtgcgtgtgtactttaaaggctcgcgttctaatctccaggcactgatcgggcttttcaactgcggcgatcccactttaatagtttttatgtggcgtggactgaatgtctcctgcagtttgccagggtcggtgaaattagaggcgccttgtcagagcagtcgcgttcattggctcgagtagcg

SEQ ID NO: 5257 - DNA, 1744 bp, Homo sapiens
ccggtgggtcgggggcgtggcgagaccctgtttcagtggagggagggcttatgcattgccgagacgccgattatcagaccttgaccctgtcgctttcagaaaaaccactggcagaagatccggaccatggtcaatctgccggtcataagccctttcaagaagcgctacgcctgggtgcagctggcagggcacactggtgagcagtggggcgggtgggcgggtgcccgcgacgggaaggggctgggcggcgctgacggatgccggtcctcagggagttttaaggcggcgggcaccagcgggctgatcctgaagcgctgctcggagccggagcgctactgcctggcgcggctgatggctgacgcgctgcgcggctgcgtgcctgccttccacggcgtggtggagcgcgacggcgaaagctacctgcagctgcaggacctgctcgatggcttcgacggaccttgtgtgctcgactgcaaaatgggcgtcaggtatgcgtgccctgccaggtcggttggggggatcaagtaggggtccggggccgggacagctgcttgagggggacccggggcgagtgctcgaaggggtctccgtgtgcgccccctcatgccctggccgctgcctgcgcccccacaggacttacctagaggaggagctgaccaaggcccgtgagcggcccaagctgcggaaggacatgtacaagaaaatgctggcggtggatcctgaagctcccacggaggaggagcacgcgcagcgcgccgtcaccaagccgcgctacatgcagtggcgggaaggcatcagctccagcaccaccctcggcttccgcatcgagggcatcaaggtgaggcaggcgcgcttcgctggcaccgccgcagccccactgcgcgctgtctttcccgatcccccgctcccgccccgcctgcccctccgccctctcccaccgcctcgccgtcccctgcaactgggaggtaccgctgctctacgctgtcctcttccccactggcgggcccggggcccctgacactcctgtcccacatccagaaagcggacggctcctgcagcaccgacttcaagactacgcgaagccgagagcaggtgcttcgcgtctttgaagagtttgtgcaaggagatgaggaagtgctggtgagagcgggatcccaaaccctgaggtgttggggagcctgaagccgaggactgcccctgtcatctggcccagtgccctcggctgtgtccccaccatggccctcaccgcgctggctcgcaactgctctacgctccttcccttctgggccacgctgggcggggccctgggtcctcctcctggcggcatttgccaagcacagcgtgggtcccggctcctcatcgttagcaggggctcatttggcgtttagttaatttgccctcctctcccaccccaccctctgcagaggcggtatctgaaccgcctgcagcagatccgggacaccctggaggtatccgagttcttcaggaggcacgaggtaagcggcggctgcccgggtgcccgggccgcgagggctagggcgggaacccggcaagggcgtctctgggcagggccgcggcctgacggtgcggggctcgcaggtgatcggcagctcgctcctctttgtgcacgatcactgccatcgcgccggcgtgtggctcatcgacttcggcaagaccacgcccctccccgatggccagatcctggaccaccggcggccctgggaggagggcaaccgcgaggacg

SEQ ID NO: 5258 - DNA, 1801 bp, Homo sapiens
tcgtccccgggcgacaggggttctcccacgtgaaccgacgtcccgggctccgggcgaggcgcagggctcagggcgcagggcgggtcccgtacgcagggcgggcgcgcgggcatctttgtggccaggcgaccccggctcgctctcccggagcccagggactcccgaggctggcgcgggctgcccgcgacaaggtgccagcagcctcgggctcgcgaggagcagctcccacccgcggcttccgagtccagctctgtccctccgccatcccctagtcctccggcatttattcagggagacagggaggcagagagaagaggagaaagcggccgtgtctgcacccagcctctgccgcagcactcgatgagggacagcagggaggctggcggggaggcagagattaaactatgattccatcgatcacggaaagaccaccatcacctacagcaaaggaggctccgatgcgcccacccgggcagcgactcgcggttggtgggcgttcctcgtcctcgccccctcggtggctgtggaatccaccccgcgccgcacacgccaggactccctttcctttgactaaggggaggggaaggaacaaaagagaccccccaccccctatacatacatacacatacacacacacacacacacacacacacccctccggtattttactgctggtcaaaggattcattttcgcaacctcttcttcgaacaccttccccacctgagcagtgcattttcccaaaggtaaagagagataagggaggaaacacagcacccaaggtgatcagtcgattggacactgttgatggcacattctcctcgttcccaaccaaccgcacaaaacccgcaacacctcgcgtccccgcggggtctcccgcgcccctggcccggccctcccggccgcccccagcaggcgccccgctctccgcgggaactctgggacctggccgagcgttccccggcgggcaggacactcgcccggttccctgcagcagctgagggcggcgagcggaccgcgtccaggcagcgacgcgggattcaacttcccggacccgcggcgcggcccccgctcccgctcagggcgccgcggccacagctgagaccccagcgccgcgcagccgcccccgccggggcatgggcggtcgcgctctccgccccctccttccttcacctcccccctaccttgaaaaaaatccatccattggtgcaaagcagacattttgatgtcatttacttagcaccgcttgttttggaggcagcgtcttacccggtcgcctggaggtgtgggcagcgcgccgatgggtccgggggagcggggctgggcggctcggtcctctagcggagccggtttgctgccatccgcccaacttcagcacccagcgggcgaggagagagggagagcggcgaggatgcagaggagggggagggggaggagggagcggtgggcggggagggagcgagagccgctcggcagcgcgcatgcgcctcgcgggccggcgcagcccctcgcccggcgcggccggaggggcagcttcccagcccctgcgcgcggccgcgagagtcccggccccgccccctccccgggcggcccccggccccgcccgacctcgcgcgctcgcctgggcgcggcgcccaccgtgcggaggggctcggccgggactctcggcttcggtgacgcccgtccggagcttcgcgggaggcccggagtcccgagagcttccctgggtgacagcggctctccgcccgggcccctgcaactccactcgcccgtagcccgcgcgctgctgtcctgggctgcgcg

SEQ ID NO: 5259 - DNA, 1801 bp, Homo sapiens; identical to SEQ ID NO: 5258

SEQ ID NO: 5260 - DNA, 1684 bp, Homo sapiens
gcgctgggcggtgagttcagccaggttatctctgcgaggacaccggtcggcggcggacagcagcacgcggcgtccaggacccggccttcctagagcttaggtcactgtagcctccaggggcgctccgagtccatctggagggccgcgaggcttccaggctggaaggaggaatagggagaaggaggaatagggagacctggggcagtgttacaattacagaaaagggagaggcgaggtccgctgagtccttggcctgggcaacaaggcacactgaaaactgggttccttttcgacccgcatcgtgcgcgccctagaaatgacagccagacggagcagggtctaaggacgctgaaaacccctgacgtgggcgcgccgggtgcgggtagggacgtggaaggactgggctagccacaggaactacagcgctgcggaccgggtgaggggtcccggcccgagtccccacttggggcgcagaggtgtttctgtaaggggacaaagggcactcctcggcgcgatgggcgacttccccagccagaaaatgagagggttagacgaggggaggaacttcctcagccacttggcccggcacagcgaccgccccaagttcagaaccgctaagtcagtccggggcgctccggccccttcgtcccgcgccccgcccgcctccagcccgggccccgccgcccccgtcgcccctgtcgcccgggtcgcccccgccggccctggccccggccccgcacaccggcagggggcgcccgagcgcagctaaaaggctcggcgggaggtcggcggcctcagtggcggagcgcggctgccggtgtgcggccgggagcgatcgccgcggggcaggggcgcggcgggcaccgcgcagagcgcgcagaacagacggacggcggcggggacccgacggcggcgcctcggcactccccagactccggccagcgcccccctgccagccgcaagcacccagccccggcccaccccgggctctcgatggcccccgaggccggggcgaccctgcgcgcgccgcgccggctgtcctgggcggcgctgctgctcttggccgcgctgctccccgtcgcctcctcggcggcggcctcaggtacgcgccgcgcccgggcccccggcgctcctcagctccccgcgcaccctcctgcgctcgggccccgtcgtcccgctcagtgctggctacgggtcgtgtcactagcctgtgcgtcctcgtcactcgcgggtcggggcacttggcgccctgtgtgggtggcgggagcggggacgcctcggtgcccggggaccgcagcgcgctggcgtttaactttgccgtcgcccgccttggagtcgggaggctccagccgtctaagtgtcccgggagattcaggcacagcggggaaaaaaggaaaagaaaggcgactttcagcgtgcggactggggtaatgcctttctttgcccagaatttctcgggagcgtaggtggtcatcctactttctccgcgttcacctctcgcgaggcaggatgacgggcgcactcgggagaccggagggaggcagagcagggctgttctagaaggtcgtgggggaaaggctgcgagctgccgcagggcgtcgggtgcctctgcgctccagaggagaagcgctccagtgccagctcggctccaggcggcaggaggcccgcgcgcccggggggaacg

SEQ ID NO: 5261 - DNA, 6657 bp, Homo sapiens
ccgggctcggcccgctctgtctccctgttccctggaggtctgggcgcccccgcgcagggactaagggctggacagccgcaggcaggggctccgtccttggcctccacccttcgtgtccagcaatcccgggagcaggcggcggcacttcctccatgccccggcctcaatcacggtctcagtccccccaaccccgtcctgcaggaacaagtgtggtagaggctcggggtcggagggcgggcggccgtcccgcgggctggacggagtttctgggctgcggagaggccgttggacccacgtccggacaggagccccgcgcgcccatccccggcccggccatcctcggggcgcgctgtctgcggcctcccgcgccacccccacccctgtcccgggacctcctccgggaaagacacccggggagcagccccctcccctccagtagtcccctcccctcccctctccctgccctcttgacggtgtggggctccccggccggaggggcgcggcgctggcagcggggtccagagtgtcgcgcccagcgcgcgctgggggtcccgggctccgcagctccgcacgcggccggtttgtgaagcggcgcgcgggggcttagccgggcgagggcgctcttgagcctggtttggaatttttagcccacacgaaagccgcaggctggggaaggggcgggtgggagcgggagacgccctgggaagccgtgagaccgctcggcgagggctcgggaccaccagggagcgacgggggacccctcggctcagagcccgagggcgcgatttcggatccgctgggattccggaggcacatgaagggagagggaaatccgctaaaccgaaccttccgggaatcggaaggcgccgggccgctcccacgcctccccctcctcccggccgaaaggcggggggcgacgcgcaacggggagggaagggagggaggggtcggcgaccttaggggagggcgagtctctggggacgcggggccgccaggggcccgacgaccctctcgctccacctccccgcccccaagtgccccgctctccccccgccccgcaaacgcgcgtcctgcgggctgtgctttggccctcgcggacgcgcgcgctcacagagggtctgacttggggtcaacttccacgaggttgccgggcgcctgtgagcacagccgtgtccccacccaggggcccacctcccagcgccaccagggtcccgacccccagaccttcggacgcttctcttccaaaccgaagcctgggagcctctgggtggcctggggcgggggcagggggcgagcggggcgggccaggaggagggggcgaggccgccactcggcttcccacgccgcccccgcggctggctccaacttcccctccggagcccccctccggccaccccccagcccaccgacgtgcgggcagcgaccccgccccccgcccctccggtcgcccccgccgcggcccccgccccctccccatccctccccgcgcgctctcccacatgaaaccttccatcacgctcagaaagaatgtgctacaacctcggcgctgccgcggccgccaccactgcgcccgcgcccgagcccgagtcggagccggagccgccgctcccccgcctgcccggccagccccgggctccgagcgcgcggtccccgccgccgccgccccgcgctcgccccgcgcttgacgcagtgagcgccgcagcctggctcccgccggctccgctgggctccgggtcgcaggccgagtccagccgggcgggctccgggaggggccggcagggcgggagggggaggagggctgtctggagccagcgagcccggaggaggaagaggaggaggaaggaggggaagccgccgccgccgccgccgcgctcggggaaccggggtgcgcgcgctctgctcgcccgcgacagtgcctccagcccggggcccgcaccccggcccaggtaagaaggggcctgaggggcagggggctgtccggggccgggggacccctctgtcgccgctgcgggatcggagggtccccgcccctaggggaggcagggaagaggatgctctctggggggggcggcggggggcagcgcagggtccccagcggctctcgcagcccgggccaccccatccctggtgccctgacctcggcgtccgcgccagggccgagtctccccgcccgcggggctctggatgcggcgctcggggcccgcggctcccgggcgtccccatccacccacccaggttcggaggcgggcgcacccgaagttagcggccgccgagcctgggccggacaaacttccctccccgacgccgcggctggaagggccaggactccggacccctagggctagggaggcgccgcggggaccccgaaactttccggagcgcgctgagagcaaaaagccggctgggcagaaagagggggagggggctgggcgcgccttcgagtgcgctggggtagccgcggcgccccaagttgaaccacagacgaacccctcttcatctgaaacctggtctcggagtcggaggtggggagggagtgggctgtgggtgcctcgacttcgcaaagccggcgtgggggggcgcagcgccccgccccgcgccgcttgaacctccggagggggtgttacgggacccccgcccccaccccagccggtggctgggctctgccgaccgctgcggagctcccgggaaggacccgctcgcggctattaataggcgtcggtgaccctagcctctcccggtccgggaagctggcgcggcggggctgggctgggctgggctgccgagtggggcgggaccccggggcccagagcggacccccagctctcctggtccctcttccgccgctcttccctccctgccgcctgctttcctcccattttccctcttcgatctcggggtgtcggcccccccccgaactttttctcttcccaaactgcacggtggccacccggtcacggccctgggccgtacccgcgcaatctcagcaccattcccgaccgagtcctccgccgcgggctgagcgcgagtccccggggccaggctgcccagggaggagcagggacttcctacaatccgcgcccttcctcccaacccacggcgagcgcaacacattcgcccgcccctgcggccccatctgagggcggggagaggtcgctgggggcagcttcgggggttgtggagggcaggggggacccgcgaagctcctggagcgtttagggatgcagctcgggcggcgtgtgcagggaggaagcagcgtcccggcgtccccccttcagcgtcgccttcgcgcgcctcgagggcccaggagggttcggtctcccccaccccacctggacactcaggtctgagcctgagtggatttgaggatctgggggacggggaatacggagtccttcttcctgcctcggtgtctgcagagcccagccctcaggcagcgtggggatctttgtccccagggccagcgccggccccgccccccgccccgttaactccgggactccgccgccctccaggttccaacctcccagcttcaccgccgcgtcctctccccggttctgggtctgggggaggggcagggggcgtggagcgcggcgttgggccccggacagatgtcctcgcggcggcggcgccggcgtccgggtaacagcaggccgccaatcggcgcggccacgggggaggggcgacccggccgggactccggggactcggtcgcagccggacggcgcagcctccgctcggggtggggggggggggcggccgcgaggactcgacccctgccgtgcagcccggcctccagtcctctgccgtcccctcccccagctccaggtttcgctctctgctggggtcctggctcctcaggttgcgggatctcgcctcccacggccccgcgcgcgtacccctacccgcccctcaagttgacctctgaggttctccgtggatctcagaccccgagtgaccgcagaactgacctctggggtcaggcagtaccggtcaagggcgctctgaagaggccctcggcctcagtttgcaccccgaggaaatggactcatcatgcctgctcctgggaagtagcaggacgtcctggcgcggctcctccgggcaggcgcccagcacagcgcagggcacacgggggacacctgcgaaggcaaaggaggctcattccagagcttcggctgcacttggccagcacaggcctgggggaacctgctggaaatggggatccagtacctctcttggggtttatgtttggcaggcggagtggataggctggggcccggagcccggtggtcatcttctgcacaaggctggccaggccagaagctggagggtagcttactgggaccttccaagcgtgaccaaggaagctctgggggccgaccagcttctccctagtggagctgcagctggggagacctcacagacaggcagggaggagagggtgccccgctcaccgccggcctcgttccacaggcccaggcctggcacatcccaggcttgcagtatctatctggtgggtaaacaaggacctgctcttggcctgcggcctggctctgaccgtggtccaggtcggggcagagggagaaaggccacagcttaggtgttccaaaccaccggtgcccttcctgccggcccctggggctgtgctgggtttccagggcccctgccccccagtatttgcatgaaatcgtgggggcgcactggctttcgtcctagcactccccttcaaggctctgcacccctatcacgggagccccacccagccagccgaaggaggccacaagctctaaattactaaattcgggccagtgctgggggcctgggagccaaggcagctcagagcccactctccgattctggctcctggagaaccctaggacccgggcgtgtcaggccctgcagccgggctaggccggtccatacaggactgaacggcgtcgtgggcgttcattcacattccctctccggtccccacacactataggatttatcttgatttgctgcctttgaattgagtcaactcttttgtatgctcgttgaattgcccagctgctggcggcgagcggagagcgtgccgggggtactgaggccgggaaccagaggcgggcgggggacaggaagcggggagggggcgccggcggggacgcgcgggctgcgcggggactggagagggtccccaggcgccggccgttctgcgaacgcgggcttgtccaggcaccgccggggcctgcccggcccgagcgtggagtcccgaggctcctgccgggggtccaggctgcccctggggctctgccttcgacgcgctgtgtagggccagattctgggcctctcttgactcagtttcccttcctgtaacatgcggacgggggcttccgcacaggcaggttgtcagggtgaaactgagccgaagagtgctccagaaccccctgaagtcctcacagaggttggggtgaatgaaggaaggaagcggggccagggctgggcagaggaggcccggcctgcgccctgcgttctccgcccctaggtccctgccctcccggataaggggcggaccgacgggaggacctgagaacgccttggctttgcttgaggtggtgggagtcgcgggtagcttgttcagccaacagctgtcgcccccactccccccacccacccacccaccccctccaccttttagatgtgggcggggagggccggggacggaccgcgaggacgccccctgcgctttctaggacctcccctccttccccagcccctgcgcgtcgccgggagagggaaggagcgggttgccgcggggagccgaggagagcagggggctcgggaggccagggagagaaggggagggccagaggctccgagccggactcgcggcggaggaagagggggtggaagggagcgcgcaggcgggcgagggagcgagggagggagagaaggagggagggagggagggaaggggggcgggagggggcagggcgagcttgaattcccccccggccgcgcggcgaggggcggggccgcgcgcgcagatcgatgggcgaagctggggaggaatttcaatcccgggagcgaagttagagcttgaaggacggcggcggctgcgggcgcagccccggaaccgaggccgggcgggcaggtaagcggcgagcgcggccgggcgctgaacctgggggacttgggacccggaccacccccggggagcggcgcggccaagccccccgccacctcgaaccccgggcgtccccgagtgcgcagcgtgcgcccccagcccctgctgcgcccccaggcctggcgcgcgatccgagcgcagcgggcaaagttggaggaacttggcggcggcggagcgggcgcaggctcagcccgacaaagcccgggggcccgggtcggggtcgctgccgcagcccgcacgctgccccgtgcctccgagaggtcccttccccagcgcctctctcccttccgtcccccttcgccgtccgcaccctgcccggcgccccccagacgcggccccctgcccttcccttcccggaaattagggggctgtcctcacctcctggccgagtcgctgacccctccccaggctcgcatcgccctccctgctgggccgccctccccccgacgctgcgagcctcctcgctccgcgcggggaccgtccagtcacgcacg

SEQ ID NO: 5262 - DNA, 546 bp, Homo sapiens
gcgggcgccccggttactccatcccagcgagaagacgaggctgcctgggtcctggttttctcgggcgggggtcaggggtccgccgatcccctctagcgctccgggcggcggggcccgagaaccaaggtggcctccgcggcccccgccgccgcgcgcccctccctccctccccgcggacctccgcggccgccgctcacctcgcgtatttcgtcttctggaaatccagcagccggggggcgaacatcgcggcgcttccatgggaatctggccccgggctcagagcgcgggtagctggcagagcctggggggcgcggcggcggcagcagcaggttggagggcgcgcggcgggggccaaggggacctggtcggcgcccggagccggagccggagcccgagccggagctggaggcgcccggagccgccgacgccaaatcccgagcagatggtggcgggggcggggcgggcgggggcacgggggggctcccgggctcgcgctgccaatcgcctaagcccggccccctccctcccgcgaccccgccgcctccg

SEQ ID NO: 5263 - DNA, 288 bp, Homo sapiens
tcgcgagaggaagagagctgagccgctgtaaccctgggcctgggattgcggggacgggacgggtgggaagcggccaaaggcgcagcggcttctggtcagagccgcagaggcctgagacgtgggccgcgccccggcccaggagaccccgcggccgcgccctaaccctcagtctcccgactgcgactgcgacccgggaaaacgcctacgtttttggaaaggaagtcccatcacagggagctgacccggtgtcagcgcgcagcacgttcccggcccgcagtgcgccgcgcg

SEQ ID NO: 5264 - DNA, 947 bp, Homo sapiens
ccgtatctgttccgcggtccgcctccctgcacacacgcccccgagccgggagagcctccgcagcacccagagaagagaccggaacacaaaggatgaacgaatggggagggggggtttggggggttgggagaacgaaaataccagctgcgcttccaacatccaaggaaggaagtggcagcggggacggggagaggatgggaaggggatgctgactgcgagttggggcgggacgcggtgatgggaggggaccgggccgggaatgcgggaggcgaggggagcgacgggacctgccgttccggcggccgggcagccaatcgattcgtctcccctaggaaggagcgaggggagggtggcccagagagaaagcgccgcgcggcctcggctgcccccggcccgggacacccaaacagaccaaagaggatccggagtggagcccggagcggatcccgcagcccgcgcccgccgcgcacttacccgcgcgcccgctgctgggtccccggcagccgcgccccctgcgctggcggagtcggaggagcctgcgctgggccggcggggggcgggcgcttggggagggcggagagagggcccgcccgccgggacctttgctcggtccgggcgccccagagccgcgggactggccgccggaggctgcgggaggggcccgggccagacctcccagaagccccagagagagccgcttcccctccttcgtgtgactctctgggagccgggttgctgacggcccagcgctcagccggagtccccgcgcgcttttcgggactcacccgggagatgtcggggcctctcgggaagagtgggctgcgcctgccttccgcggccgcctcgcctcttcgctgcgcgggaccgtggggtttgagagcggcgcctcctcgcggggccgaacccgccacccacagtggagtgtggactgacaccgcggcctcacg

SEQ ID NO: 5265 - DNA, 1313 bp, Homo sapiens
ccgtgtcacacggcgctgggctctgcaagctgttgcttgcgcagtcgcccccgccgctgccgctcccgggcgggtgcaccagggtccgcgcgggcggggcggggtcggggcgggaccggggcggggcctgccccctcgacgcgccggccccgcccctcgctccgtccctccccagcggaccgcaatgatttagaagttcaggaatcccacgtgacgtcaccgggggggtgatgtaatgcactctaaatagaatgtattgtaatctttgctcagtccaacgtggtcccttcacccgggctccgctcttgccttctccacacttgtttggtaagttcctaaaaatacggctcggccacttctggggcttttgcatttagccacttttgttgcacttgccgcaggagccatctcgggagtgtacttgtttgcaggggttggttctcggcagcagccgcgaggttacttggtccagtgggcaggtcacagggcaaggagtagggaagatgcgatgcatttttttctggagggtgatctgtgtttgtaaacattttggcggaccagagggaagtccggccccgagtgctggtagactgtggaattcggctgtgtcctgaggccaccctagagaccccgcgccgcgtgagtgccggagcgctcggtggccgccgcgccgcgcgcctggagggatgctaacgtggagccggcgccgagtccgcccggcgtgcgtgcgtgtgtgggagcgcgcgagtcccctgacgcggggaccagttatgaatcgggggtgtgtgtttgcctccagagacctggcaaggtgcggagccctccagaagtgcggtcaagcggcagcggagacggcgagccaggaacctccccccgcgtccccagcttcccagcgtggcggcggaacccccggagaaagtttgcaaacttccagcgggcgcggcgaggacgccgggtcacctagggggcgggtgggcgcgcgcgcagggggctcgctctccccggtgcggagctgcagctgccacctctcccgccgggctgccggctgcagcgggtgggcgcgcgcccggggaggggaggtcgccctcggagggcgcttggctttcgctccaggcgctccgggctggagagcggcgaggctccgtccgctccagtccactcctccggccgcctcctgcctccgctgctttcttgctggcatcgttacctcttcccggccgctgccccaaatgacagctccggctcgagctttggcggcgcccaggcaattcccaagacctggcggcggagtctccccctgcggcagattctcg

SEQ ID NO: 5266 - DNA, 848 bp, Homo sapiens
ccgtctcctcgcccagctcgcgatgcccagccaggcgcggcgcgcgtttgcccggcactttctcggcgcgctcccccttctgcgcccccagactccgacttagagcggactccgatcgcggcaaaccatggccccaggtgcgctccggaggcagctgcgggaaccagccatggtcccgggctaatgcccagggataagcacagggatagggatagagatagggattgggattggactccagctccaagagaaagcacctcgggtctattcgtattctccccctacccccaaacaaagccacagaagcgatcagcgcgcagctaaagggtttggaggtgaaaaggagggctgggtggggaggagagaaagtgagaagggagagaaaagcggcggctgagcaaagcgggagccggcgcgggcggtggggcctgacccggacgccgcgcacccggctccgccccgcgcccagcgccccgctcactccctggccgcgcctgccttcgcgcccctctgttttctctcacttaccagcagctctgctgacaagcgagaaaactgacaagtgagaaaagtcgtctgtcagcgcccgggctggtgtctgggctgtcaccgcgggcgcggagggaggggcgcgcgggcaccgccgtctgccgggcacacgctgggctccgaccccggccgggcacactcacccccgcagggcagccgcggccaccaccgacctgcggagctgcgtgggcttccggaaccctcacctcaacaagagctcggctccgcgcgcaagtaggagggaagggaaatccttatcctcccggggccagggcacgcagaagccgcgaggcttcgcg

SEQ ID NO: 5267 - DNA, 2406 bp, Homo sapiens
gcgcagcgctatagccgcgactgcggcggcggcggcggcgcagggggcgggggaggagagaagcgcccacttcgtcccgctgcctccgcagcagccctggccctagccccggcgcatcagagcggtccttgggaatctttgggcttgttgctccggcggccgccagctgggagcccaccaccgctcgatggtaccgaaccgacccgtgtagccccataaccccagcccaactccgaggagctagcgcagaccgctctccgccctcagctgcggcgaggcaagggctggcagcgctcggacgcctccgtcttgcccttcccatgcctaagcgcggggaattacacgttcccggtgtagaacagacgatcggggctattagggctgggcggtgggagtgggggttgggagcaccatttttggctggacgtgtgtccagactcatcgtctctggtccttaggaccccatcttcctctgcatctccaggtgtcggcccctctgtacccgcctcccacggggctcgtccggcgaagggcagccgcagcccacatctactccccgccctcaatccctgccccctctgcccgccgcagtcactcgcctggctgggagcaagcctcccctctcgctgagggtgcagagagcgcctagggcgccaagagtagaggggccaaagttcaagcgccatcagccagccgaaggccctgagcccccagggccgcggccgggacgcagggaggtcaggacgcgacgctcgcctcacctgtttctccagcggctccttggccgacagcgccggcttgggggagggcgcgcggtcgcagacgcagccctccagcaggtaaagccccgagggccgcgagctcgagtcgctctcgaagtagaagagcaggttctgcagcagcgcgaaccacttggtttgccattttgtgttgtccgaactccgcttgctcaggtagcctttgcgcgtgccgtccttgcgcgccagcagtcccagggacgcgacgtggccatcattcagccggatccccttctgcatggtgctcagaggccagcgagaccccacgcgcttacatcttctccgcgcagcagccccccgtccgtgcgcgctgcgcgctgcctctctctggcgctcgctcgctcgctccctctagctctcccctccccccaaatatctacactccaggatctggcgccgagccgcggcttcttgaatccagatataccattccccgctggaacctcttctccgctccgcagagccccagtacccggaagatgccgcccgaccctcctccggtgccgggcaaactgagggactggcgatctgcgcgctggcgaggggcaggcggagtcatgtgacgccgatccctcgaagagcccgtttcagcagcgcggacagggacacacgcacgcagccccgccgaggcgcagagccgcgcgcaggctgcaacttggtgcctcctccccctccccagacacacacacacgcacacgcacacgcacacactcaaaccctgccctccctcccctcatctccccttctctccctcggatgttaaaaagcaaatcagatcaattttcgtttaacccaatgaaaccccgaaggctcgccatcccgggagtttgcgtctttgcgccccaccgcggcgcactgtagacctggggttaagtgccagttgtcattttctcctccaaaggctcgccccccccccccactttatttctaatacgaggtggaaggaggaaggtgggtggcgaaatagagctgcaaaagcgtccagtcctagtctttgcatagtcagccgggtcacattgaattccagcatccggctgcactcccggcggcttccccagctacctgaggacagtacagggggtgagatggggtggtggttggtgaacgttggttactttattttatattattttattttgagagttgccataattaccggcgccaccccccgtgcaccctgaggtctggttggcgagccgctgctgggagttttctgcaaataccccccaaagcctgaaggcgggcttcaaacgcaggcgccggggaccatgggagccttcaaatagctgcgctggcgcaatgataccttaatgatagattttccgttcttatttttagctctcattcgcctacacagttacacggcatttatccgagaacgtcacagcgcccgcatgctgcaccgggagggcgcgcgggccgccgggcgagccgggagctggggcggggagcgcgcatcgctgtctgccgcagagggcagcgagctcgccccgacccggagcaagccgcgcctggcccgggcgctttgcagcggggatgggtgcccgcgcagccctgtgaaggaaagacaccatctttccgcacggaaactgcgtatacccctcccccg

SEQ ID NO: 5268 - DNA, 1218 bp, Homo sapiens
ccgcgcctgcagttcgtgcacctcttcccggagctgcgccagggaattacggacgaactggaaggggtcgagaagggtcttggccaccacctttagctccaagccttttcgctttttcagatttgggatcctccccggggaggacctcctggcgccccctggcagtttcccgccgcctagggccgacttttccacctccagctcccgggcgggggaggccccgtacggccgcttagacgggctggggcgggaagattgcagcggctttgggtttactccttgtttcttcataatccctagtggagctgggtcaatttcaggcacagcccatccgagtcaggcgaggtccagaaaggcctgactcgcctggcagcctcaacggacttgtccccgcagccgttgactagccgttgacgagcggacctcccggtcgtcatggcgactgtgaaatgtagggtggagcgcatgcgttcgaagccattcgcgcgggcagtccctgcgtgtccccctgcgtgtccccccacgtgctccccagcgcgcgcagcaccccgcctctgcgcttccccgagcgtgcagcttccggtgagggcagccccacgcacagcccccaacaccctccccagcgcctgcagccttcggtgcgcgcagtccccaagcccacatgcgcagttctcaccttgcgcgcagccccacgtacagcccccaacacgctcccagccccactggcgcagaacccatcaccgcttgcccttcacgcgcttcattgggagtgcagctcccaccccgagcgcgcagctccacgcagcctctccacactctccccagcgcttgcagcaccccccagtgcgcacagctctgccagtagcttcccggcgcgccgcccctgcaccgcttcgggccataaccttgctggcgactaagtctgaagaacttcctgtggtttcattcttttcttcaggtttagtcttagctctgacattttaaccaaaaggttacacgttaattaacgaggtattaaaggggaagatctcagctgaaagaaatgactgtaggaagtgtgtcagggaagccaacggaaccgctggcccgccggtggtgcgcccggcattaggaaagtctctacgatcgctgaggtatcgggcagtcagtgcccgttgccaacgcggagggaacgggcggagactgcgggcaacacgtggcagagccggcgtgagtccg

SEQ ID NO: 5269 - DNA, 1848 bp, Homo sapiens
acgacgaaggcgcgcctctctccatccgctcacaccacacccccgccctccgaagcatagcccgggctggagaagccccagcggcggcggcccccgcggcggaggtccccgcgcgcacccaccatgcctcccgcctccttccgcccatcccgagcgccgtgcgcgcccgaagcccgagccgtagagcgccaccgcgcaaaggaaggagccaggcgcgtgcggggctcgcggagttcttctgaaccctttggatgggggcggaggcgaggggcgccgccaccactgcggcaaacttcgtcccccctccgggaggtgaaattctccaatccgtctccggccggtccgcgggtcggactcttcggaaaggaccttccaggaggagggagcgaatgcaagccttgctcggacgcctcaccggcggctctctaaatctgggcgccttttgacagccattttcactccatcccgtccccacgctggggaccacctctggccccggaggcgcgggcgcggccgcaggagcgggctgcggggtccgcgaaacaaagaacttcgagcgggacgtacctgcggcggcagcggctgtcaagtccccgaacttcccatagacccgcggacggggcgcaggctggcggctccccgctccgcgcggccgcgggcggctacggctaccgcgagcggccgggctgggcgcggggtgcgcccgccgcgggcatggtgcggcgcgggcggccgcggggcgcgcggggaaggcgggagagcggcgcgggtgagtgggagcggcgggtgtgcgcgagtgcgagtgtgcgagcgcgccggtggcgctgcccctgcccgctccctcccgctcgtgcagctccggcatcagtttcggggatcgtgtaatccgatcccttctgactcacaagccctgagtgacagttctgatttggttcaaccgcgggagggaggggaaagagaaagaaagaaacccccagccgtacgcctctcctggcatccaatcgactttctggaaaaaggtcccatcccggcctggtgccccgtgctgggtggagaagccccccgccccgacctggcaccgcctgcactactcacggggtggaaaagttgtccctcggctccgcgctcccctcccgcgcgctccctccttcccttctctcctcctcttcctcctcctccccgcgctcctcctcccccaagttttaacagatgttgccggactctcctcgctccctcgcactctctcttcctccgccccggcccccgcccagtcccttttctttcagccactctcgggctcggaggggacgcgctgagcagcaggacgcctgccgccgcagggggcgaagttgggaaaacttggagtgctgctcgccttacttttgctttctcgctccttccaggccgcgccgggagcccccgcttctcccgcccgccgggtccccaagcccggagtgggtcccagctgcgaggcgggcggcggcggctgggaggcggcgcgtcgcgggccggggtcgggggctgggggggagcccgggcgccgcgagccacgcgcgcgctccctccccgccctccgccgccgccgccgccgccgccgccgcctcctcctcctcctcctccttctcctcctcctcctcctcctccgcccctccccggtcttcacacagacacattcatgcctgctcctcctcttccccctacttgaccccgcgccctcccggcgcgccgaagccccacccacccggcgaggggaagggggcccgggcgtgatgtcacccgcgccctctctcttctctctccacaccgccaggacaccccccaaatgcgcgccctggcactcgtgctgcg

SEQ ID NO: 5270 - DNA, 2119 bp, Homo sapiens
ccgccgcctccccagcacagctcccgcagcccgcacccgcccacagggtctccgcgaccctagagcttagggaagaattgccgaggggcggggggtccctcatgcgcatggaagggacgtacgccccaggcctccaccttcctcctgaccccggggattcttggacgtcgattctccgtctcgtaggggcgagggccctgggttcgcagtcagacgcgggcccctctcaaatctagtggcctggttttattgagtgggggaaggcacatattttccaagattaactgccccgcaacagggaatttcgcaggatttcagtattttcgactccccaggtgacgccaagagggtgggttccactgtgcacggtggggaaactgaggctcggaggggacaaggaaggtactcgaggtcacgcggctcctccggcgggcgggaacgcaggacgcggagttggggcgcgggctgtgcgcgcccaggttcgcggctcccggggctcggctgtcgcagcgcggtcgccgccgaggaccacggtcggggcgcgggcgggctccagtgcgcaggcgcggcgggcgggaggggacgcgctccgggcgcgcgcgcggggcagccggcgccccaactccgcccgccccgcgccccgcgccccggcgcctcgccgcccgccgcccgcccgccccggcgccgccgcccgcgccccggcgccccgggccggcgaggggcgcgcccgcggccgcggccgctgcatggcgctgagatggcgggggcgccgcgcggcggaggcggcggcggaggcggcgcgggcgagcccgggggcgccgagcgggcggccgggacaagccgccggcgcgggctccgggcgtgcgacgaggagttcgcttgcccagagctggaggcgctgttccgcggctacacgctgcggctggagcaggcggccacgctgaaggcgctggccgttctcagcctgctggcgggcgcgctggcgctggccgagctgctgggcgcgccggggcccgcgcccggcctggccaagggctcacacccggtgcactgcgtcctcttcctggcgctgctcgtggtaaccaacgtccggtccctgcaggtgccccagctgcagcaggtcggccagctggcgctgctcttcagcctcaccttcgcgctgctctgctgtcctttcgcgctgggcggccccgcccggggttccgccggggccgctggggggccagcgaccgccgaacaaggggtttggcagctccttttggtcaccttcgtgtcctatgccttgctgcccgtgcgcagcctgctggccataggctttgggctcgtggtggctgcgtcgcacttgctggtcacagccaccttggtccccgccaagcgcccacgtctctggaggacggtaagtgcagccgcgcacccctcatctggtctcggacacacttgctgggacgatgctgggaatgcccggagtcgggcgcgctttttcctatgcggcgggtggggacactgaggctccgagtgggggtgtgttcaaggtcactcctacgagttggggacgcagtcggggctggcaccctccggccagggctctcttcagagttacaatccacgaagcgcccctggcgtgaagtgtggagaggggagacaggtgtggagagagaaaggtttggccaaggtcagggagctgatgagcggccagacggcggccagaggggtccgccggtcttttgccgcacccatccccacagagggactgaaagtgggcgaggagagcagacccccagggcaagctccaaggccggctctgcgcgcagcgctgggctcttcccctgcgcacctagagcgcgtgctgggctcgcctcccaaccctgcggacccgagggtggtatatgggtggtgggaaaggacttcggctcttccagccttgctggccacccttctgtggacatgcctccggcccagaaagagtggggtttgccaaggtcaaacacagtctagtccctgccgctgccactcggcggttgccctgaccctgccttttctgcgcccgaactttgtcactgtcttcccagtcgggcgggcgagatggttgcaaggacggggacgctgtctgcctcccgcg

SEQ ID NO: 5271 - DNA, 562 bp, Homo sapiens
ccgtagggcgaaggggtgcgctgtcagatgtggcattcccgttttacggagacacacggtgtcttacacgccagggagaggtctgagacgcaaagagccgtcgagcgggctgcgggattgcttcgctgtcacctccgcctgcagccacccttccgcacgcacttgtgtgtgcacccaggccaacatggaaggcgccatcctaacttctgccgtgagcaggtgggagggaagagagacgagaggtattccattggttgtctgggaaaatgaattgcaccttcccctcccttgcggaggatcaacttttcccaccccctcgggtgggcactcgcatcctggggccggagcctgaacccgggagccaaggggccccagttccagggacgtgaagctgagcgtacagcgggcgctcccagacactggggaaagtgctttacgatgtcccgagtccctccagtctcgccagcggggcgagcgtgagggtgccccgaccgaccagcggccccgggtgcagggtggcgggcccggcggcgcgcgtccccctccccctcctggcggcccg

SEQ ID NO: 5272 - DNA, 1404 bp, Homo sapiens
ccgcttcgctcgaggcgaaatcgctgaaagttcggctatttaactcctgtccccataactcggaatcccggacaccagcggccccagctgctggcgcgcggctctcttccagtcccctggatcccaaagctccctgccacagcgcggcgtctcctcctcctgtcaacttccctccttgcactgtgacggaggcaaagcaactcagcccaggaggttgaactcgagtcatcagagaaggagaaacagtgccgaaaacggcccgtgcgctaccagggtagcccattaacgcattaactccaggctcgttgggcagaagccgggaggaaacaccctggggaccgcactcctggttaaatgcccagcacgagtcaaatccggcctttccaaagcgagccaagcccactactacaaagagatcccccgagtgttttgccttaaccacatttcagacagccagctttgtggctgctgtttgactccaactttccctctaaatctaaaaggatgcacacttccatcagacggaacgtcgcgattccccggcgaagaaaaaggcgtcgcccattcctcttccaaaacgctacaacaaaaaccaccacgcttcccttccttcttccttgcccctttcccttctcccagaccaacaaggaaaggagcgagcgagggcgcagatgccctttggtcaagtactccccggatgttcccgactaaagcgtctccaaatgaacctgcagcctgcggaagccggggacacattcatagacgctctctgctgcccagaccaggaggggtggtgggggaaccaggaagccagggagagagcaaagttcctggacgcgtctcaggaggaaaactttgtgcagtgctgccaggcggaggctcgtcagaaggctccgcagctgctgaggcggggtgggactgcgccccaggggccgcgctgaagctggcgccgcgattactgcgcaccgatttcgcccactctctgtccgctcccgggagccttctctgtctcaggacggttccttatctcccaaaccatgctcgtcctccacttcggacccacagccacccccaaatcccggctatccccgcttagcaccgcggtctccagcacaccctcccactggagtagcaggtgacccaaaccagacttacctgctgtgaactcttctctccctctctcttttcctggtgccttttcagggagaggggaacgggatgcaggctgaggtccagcggcgcggcaacccggggcaccggcgcgcgttcctctgagccgcagccctggctgagcaagcggagccgccggcagccctggcagagccgggaagctgcggccgcaggggccaggccgggaggcagggggcgctgctgcctcccccgagagccgcgctaggacaggcg

SEQ ID NO: 5273 - DNA, 819 bp, Homo sapiens
gcgagacgtgggaaactggcgaagctgctaccagccgccggcgcaaggagcgcgagagtcctgggtgcgcgcagggcacttactttctatcctccagcaagcatcgtcgcaagcctcccaggtgtagaaattgttggcgttgccctcgcagcccccgtacaggaactggcggcagctctgcgtgtacctgtcgtagtagtaacggagaagtagggcccggcagggtccgtagtctaggggcaggagacagatctccgcgttatttcctgaagaaggggcagaaggagagcaaaagagagggaaagtggtcaggcgtagctcctaggaggaaagaacatcccggggagttctgtccccttccgagcggaggggcctctgcagagaaagtgcaaacttgggagcgagtcccccctgccagcggagcgcgcggcagggacctggagaaagcgaggcttggagggcgcctacacggggccccatggcccgctgcgccctctccgccggttggggagagaagctcctggagcggccagatacctgttggctcctgagcagcatcgcccagtgcagcctccgtcaggaaaagcagcagaatcgacagccccagggggcgagcggggtccatggtgcagggggtcgggcggcccgctgggcaaggcgtccgagaaagcgcctggcgggaggaggtgcgcggctttctgctccaggcggcccgggtgcccgctttatgcggggcgagcgtccggccgacccccgccggggcggagcctgaggggtggctgattcatgcacggggactgtcaccccgccgcccccgcg

SEQ ID NO: 5274 - DNA, 1128 bp, Homo sapiens
gcgctggcgggcgcacccggcggcggcgagcgcggaggtgctgcggtacctaccatggtattcttgtcccggaacgtagtaggtggggttgcccgcaatatgcagggaaatgagcacctcgccctgctccccatccccttccagctccccgtggtgggtgcacaggaaaaagaagggcgaaaagcgggggtaatagccagccgccgcgcgcgccctcagcgtcgcccccagcaacagcgctaggaggaaagtctgccgggcccagccactgcgctccatgccgccgccgccgccgccgccgccgcgcgccctacgcgccgctcgctcattcagttttggagacgccgggacggaggagccacgcggagagaaggcgagaagaaggcggacgggagcggaacgggctcgggagcgggcctgggagcgggcccccgccgagaagttccgcgggagacggcggctcccaaagttactttgggccgcgggagcgcgggaccggggctgcgggcgccgagagcgcgtcgtctgccgcctccgtgcgccgccgccgcctctgcgcgacgcccctcggccaggcctgggaaagcgcccgccccgctccacaccttcttaaagccccgggcgccgcgtcccccccgccgccgccacacgtgtcccggccgctcccccgcccccgcgcgccgccccgcccgccccccgccctctcgggctggctcggcggcacctcgcgcggcgaggggcgcacgcgtccccggagtccccggccagcgcccggttcgcacccgggaggacagggaggggcgcccgccggggagcgggacggggacgctgtcgaggaccgctgagcccgcgactcttctgcgagggacgtcaaagccccgcagagggcacctcccgtccagctgtctgaaggggaaggccagcccctttggccgtcagtgtgccctgtttttcctgggaggatgcgtgagggaaggagaggggcggcagggacggccgctggcgccggtttctttgtctgagccggctgcgtcccgcgcccctcggggctcgcagtctgccagtccgggcggcccgcactcgttctgggaatccgcccgaggccgcgaaccgctaggggccctcgcg

SEQ ID NO: 5275 - DNA, 1128 bp, Homo sapiens; identical to SEQ ID NO: 5274

SEQ ID NO: 5276 - DNA, 1128 bp, Homo sapiens; identical to SEQ ID NO: 5274

SEQ ID NO: 5277 - DNA, 1921 bp, Homo sapiens
ccgcggacctgggcctggcgcccaccccatcgccaggactggacagaaaggccctggccgaggccaccaacggagaggccagagcggagcctctggcccagaatggaggcagcagcgagcccccggcggcccccaggagcatcaaggtggaggcggtggaggagccggaggcggcccccatcctgggccccggagagcctgggccccaggccccgtcgcggacgccgtcgccgcgcagccccgccccggccagggtcaaggccgagctgtccagccccacgccgggctccagcccggtgcccggcgagctgggcctggccggggccctgttccttccgcagtacgtgttcgggcccgacgcggcgccccccgcctcggagatcctggccaagatgtccgagctggtgcacagccggctgcagcagggcgcgggcgcgggcgccggcggcgcgcagaccgggctcttccccggggcccccaagggcgctacgtgcttcgagtgcgagatcaccttcagcaacgtcaacaactactacgtgcacaagcgcctctactgttcaggccgccgtgcgcccgaggacgcgcctgccgcgcgcaggcccaaggcgccccccggcccggcccgcgcgccccccggccagcccgccgaacccgacgcgccgcgctcgtccccgggccccggagcgcgcgaggagggggctgggggcgcggccacgcccgaggacggcgcgggcggccggggcagcgagggcagccagagcccgggtagctccgtggacgacgcggaggacgaccccagccgcacgctgtgcgaggcctgcaacatccgcttcagccgccacgagacctacaccgtgcacaagcggtactactgcgcctcgcgccacgacccgccgccgcgccgaccggccgcgcccccgggaccccctgggccggccgcgcccccggccccctctcccgccgcgcctgtgcgcacgcgcagacgccgcaagctctacgagctgcacgcggccggcgccccgccccccccgccgcccggccacgcccccgcgcccgagtcgccgcggcccggaagcggaagcggaagcggccccggcctcgcccctgcgcgctcgcccggccccgcggccgacggccccatcgacctgagcaagaagccgcggcgcccgctccccggagccccggcaccggcgctggccgactaccacgagtgcacggcctgccgcgtgagcttccacagcctcgaggcctacctggcgcacaagaagtactcgtgccccgctgcgccaccgcccggcgcgctcggcctgcccgccgccgcctgcccctactgccccccgaacggcccggtgcgcggggacctgctggagcatttccgcctggcgcacggcctgctgctcggcgcgcccctggccggcccgggggtcgaggcccggacgccggccgaccgcggcccctcgcccgctcccgcccccgccgcctccccgcagcccgggtcccgtggcccccgggacggcctcggcccggagccccaggagccgccgcccggcccgcccccgtccccggccgccgcgcccgaggccgtgccgcccccgccggcgcccccctcctactcggacaagggcgtccagactcccagcaagggcacgccggcgccgctgcccaacggcaaccaccggtactgccgtctttgcaacatcaagttcagcagcctgtccaccttcatcgcccacaagaagtattactgctcctcgcacgccgccgagcacgtgaagtgagcgcccacactacagccgcagacgctttgcacgccccgctgcgatgcggggagggggccgcccccaggccgcacggactgccgctcctgggaaccccgccacgcacaggcctcggcggagggggccgcagggggcagcgcccg

SEQ ID NO: 5278 - DNA, 2872 bp, Homo sapiens
gcgcctctcggaacgccacgctttgcgactgacttgcgagcaaagcagcgggctcagtctgcggcgcgcggaaaaggcggccggcgaagagtcgcccggcccgcgggcaggggagggaccggagggagacggcggggagggagcgctggcccccctctgggctggggctccggaggaagcccctcgccaagattccggtcgtgcgtcccctccggggcccgctctctcctccctcggcctttcccctgtcaccgccctgggtcccaagcaggccgcccagccgggtcacacccggtggatagaagccgggacccagggctggcggctgggcccgtgcatcccccacgcgggcgcctcggctttgaagtgcgcgcggagcaggctctgaccgtttcttctttcctttctttccggttacttttgctcccctcagtcactgataggacccttcccgaaaacctcagactctctaagtcccagcttggcggccccttccttccaagccgcgccccggtgacctgggctgcgcgaccacgaggaagcccgagaactccttggcccaagtgagacaggaaccagggcaacaatgaagagaaagacactcggcctctctccaccccaggccgcagaggcgcacaccgtgaaaagaaaggccaatcagcgctttaacgcacgctcgggtctccctttccgactaccatgtacttttaactccctgccaccgagggctttggatcccttcgaggctttctgcacttcaagtggaatcccctgtttcatttgccagcagctccgtctgctgagaggacgtactttggggactgccaagaagcagcagacacaactcggctttgccaatacagcatacggttttgttctcgcctccctccccacccccttccctgactcgccgtctggggcgagctggagaaggcggagcaggaggtggggagaagggtgggggtgggggaaggtctggcgtagcacaaacaagttctccagcgggttgtttacatagcaggtggacctgacgtcagccaggaggctccgctgcaaatccgaacaatattcttccccgcgtttccccctccttaaagaagttagggaacggggggagataggtggacgggggagaaaggcatcctaaccagctggttccaaacctatcaacaacaacaacgacaataacaacgcaaagtaaaacaaaacaaacaagtggtccggcggtacttcagaatcctctgcggcgtcctgtcccccaccccgcccctccgaggagaggcagccccgcgagcagtgtgtgtacagttcgcattgccaacaacacgcgcgcgcggccgggtgcgcgcgcctgccagcgcacattcacacacacagacacacagacacacacacacacacacacacacacacagatccgggtggggggagcggctgcgcgagacagcgcgagcctccgagaaagcgcgagacacgccggcgcgtgcagctccgcggccgccgcttcgccctagctctagccccgcgccacccgcagcccgcccgcgaacgcccgccccggttatttatgcggcggccgcgtccgctggctgcggcttcctcggccccccccctccccgggcgcgccccccactcgcggcagcagctgcccggactcgcgcgtgggtgtgttgtttgggggcttctgcctcgccgccgcgggtgccacctcccgggacgctgcccacggcgtccccggtcgcggtaagtttcttggccctcactctggcgcgctacacctccgcaccccaccctgtcccagccacctccacgctgggccgagctgcgactttactctgctccgcgctcctcccgcggtggcgacaaagtttcgccccaaaggcagcgccctgcttgccggggcgagtgtgacatgtgtcaaatttgggctcggcgttggggtcgcattccggacccagcatcaccacttgttgttctctttcattttgctttgtgatgggggaaaaaggggtggagaggggagatttgctgttggctcacggatgatttttagtttggataatgcaaaatgttgcttcgtccggagagacctcggctggaggagaatgtgtgtcgaaacaccagatgtgtgtttgtttactctcttctttttaattgtttgttgtcttttccccttcctccccgcacccccacccccaacctcgggaggagaaacaacagtaaaaacatctggcggttagaagcacacactttattgatccaactgctgacctttatttactcagttgggcaagtgcacgcttctcgcgtctaagttgggcacttcagcgttcatctcagaagtacttctccaggaaggagagagatggaaaggggacactcctgtttctggagtcaagaaactcctgggccctactgacgcttcgggataaccgtgcacagggatgactgctgccttgatcgcgttcctttccctgtccacgcgttagcacgaccggcttcccccggtgtctggcctggttttacttttattccgctttagagaggtcgcctggctgtttgtgggtgggtttggggtgaaatcgcacctcgcggcacttggtgaggggacgtgggaggagcgcagacacctttcggtgatagggagggcttctcacttggctgttacctggaagtccacagtggccccggcgggcaggcgggcgggcagagcgcgggtccgaacgcccttcgcgctcgcggcggcgcacgtgcggcggcggcggcggcgccggcggcgcgggcgggacccactgggtggccgcgcgcgccacccgcgcgttttctgcgcgcctctgcccacccgcgaggccgcaacgcgccctgacacccg

SEQ ID NO: 5279 - DNA, 2906 bp, Homo sapiens
ccgcgggggtgcggttttgcgcaactgggtgactcgcgtgtccctccgcatttcatttgcaccaagggagcgcgtgtcagacgaagggaatttttttttcttttttggtgattctgttattttttcaccaactgtacgaagctcaagggatatccgagctttctggctgggcggatgggcttcgcgcttggcatggctgagcggtccatctctacctctccgtttctatctctaccataacagcgaccactcagcccgccaggagcccctgtttcccagcgcaggttcctttttcttctcagttccttgggctgttgaagccgggttctgggtagatagagactggggccgtggggagagcgccaggctgcttttgcctttcccgcgccccggggcattccggcgcgctggggatgcagcctccgcccccgccgcacctggccgcccgagcgcccgcgcccacgccccgcgcggggccgcccgaaactggggccgcgccagccgcgggagctaccgaggagctgttggggtgcgtttgcctttgctttttaaacaagatccccgagaccttttctccatccccccaacccccagcaggacacggaactccggcgtttctcgaaagccacaaaagaggggcacggaaatcccaagctcgccgtgctaactcggagaacgcaaactcgaggcagagcgtgcgccgtgcggggatgtgggtgtcgaggaccccgaagcgcccggcttcccccgcgacccccatcctccctagatcctggttagacatccatccagcccacgctcagagggcgggggttaccccgactcatcccggaagccgctaacttcagaaatccctcctgttaggttcgcgaaacgaaggtacctcgtcatctcggcggggcaagtccggattccaccagggcaggtccgggaggtcacccagggcagacgatccgaggcagagcgctttaaaatcctgccgccgcacgcccagtcagagcgccgagcgcgcctgcccccttcccgtcacccttcagtctcccattcgccgactaaacttttgggggatcacatctccaagccttgggagttccgggtaaagtctccctcttttctgaacctctttactgtaatgtaatcatgggcagacaagaggggtggctgccttgttctttgcaacgtaaaatcaacagacacccaatcaagctccaatgcccggccagcccctcgccccctggtgcccactctccttctccccccattcccgtcacctccgcccgctatttctctcacagactacggacatgcagggccatctacttgtgctcaggaaaaacaaatcactagagtgatatgagaaggaatggtgcacctggctgtccgctgaaaggttttagagaagaaaacggaaaggggaataaaacggggggattctccttttccaacaagcagggcgttttggggaagtttgggggccaggggctttttgtcccgtggttcggcacttgctttcctcggagccgctttctgctgccgggcggcgagtcttaccctgctccccgcagagggcgcggtgaggaagcccgccgggggcccgcagctccatgtcagcgccgccgccgccgccgccgccgccgcgtgaggcgagcacagcggccgcacttgtggctgatctctgggctgagggggctgagctggcctagcaggcgccaagtctcttccatgtgaataacaaatactcccaccggcggccgcgattggtctgcgcccggcgcctcccgatcctccgcccgcggccattcacccggcgcggcgcggggagccgcggccaggatcgcgcccgggatcgccaatcgcttcgcgccaaccagtcacctcgggaagcgggaggaggaacccccgaggggcgggagcctctggatttcggtgtcacccagcggccctggcgcgggcagggagggggaccctcggcccgcggatccccctccgctcttcagcctgaagcgacgaggagaccagaaatgtcaatagttctgatttttaaaaatcatccccccttccccgcccccaagaaaaaggggaggacccaactacagagtgagagggtgggaagaagcgggagcggtagaagaaggaatatggttgtggaggagcccagcggctccggctgcctggcgagcccgggaccggcgcggggaggcgcgacgcccgcccgagcacagcgggcagcacccgcgagcccgggtccccggtgaacacagctccagaaagcgtcaccgagaataacacatggtagatgacaagtgtcccgccacatgctttcttttcgggaatgcttaaagtagagccggcaagccgcgcggttcccttgcaaagtttgcctggcgccgcgcggcggttccgccatttgtcccgccccgcggctctggcgattgtctccccactccccgcccccgagggtctgagggacgcgtgcaacagagtccccagggctcgaggtaccacacagcgcggtccgctgcgggcactgcgcaggaaggggcatgggtggctaccgggacggtcattttattgagatgattcaaggagccgcagacgcggggcaggaaactccgggggagccgtgctcgggttctgcagggaaacctcgggattcccttcgcatgccgcatgcggaaacctgccgggctcgacgtgcacagtccagcgctcctccccactagttactgcccaggccccccgatcctgcacccgccggaatgagagaaagtagcccctcgccgcccagctcccgggtagctgctccggccgggccttgcgttggtgagaaagttccatctagaggcggccgcgcgcaactgcaggcggcgccctaggcccgggcgagccagggagagcggggcgcg

SEQ ID NO: 5280 - DNA, 2906 bp, Homo sapiens; identical to SEQ ID NO: 5279

SEQ ID NO: 5281 - DNA, 1696 bp, Homo sapiens
ccggagccggagccggcgaagccgcggagttgaggcgcgcctgggagagccaaggcccggcgggctatgcaggtgcatgcccccccctccgcccaaggagcggcgccaccagcgcttcccggctttgtccttggaccctggcaccggctcgctccagccgcgggggaaggcgcttcatcgccaaagtgcgctccggcggccccggcccgctctgcgggccgccgccggagggagtgcgggggcgccccgaagccgcccaggccgcactcgctggatgctgcgctccctctcccggcgtcggccgctccgggccggcggcagctgattgcggtcgtgagctcgcggagcggcgagagttaagaggaggtgttcgcggcgccttcgccctccccagacacacaccccctttctcctcgcctcttctcggagggtggaagagacaaaaacggggggtcagttctccagtccgccggctgccggcacgcggggcggcgctccgtccggcccccgaggaccagcggcgtggcggctgcgctcggacccggtccgccggccggaggagcgcgcggcgcccgcggtcgcgcccgcaccgcaggccccttcagagagtccgggggcgggcgcgggtccggcggcggcggcggccgcagcccccggcggcgcgcaaccgcccgtcgccgcccgccgctgcccggcccccggcgcgccgccggctccggctttgtgcggagggagcgagttcgcggcttcggctcccggcgccctcagtggccgcgccgccagcggactgctgcagcggcgtgagcagcgggggtcgcggctgcgggaaacgctccggagcccaggaacatagtccccgctggctagcggcggcagcagcagcagcggggcccctgcgcgcggcgcccaccgtctcctcctcgcgccgggctcgcggtgttgcaggcggcagccacgcagactgctctctcatccttttgtccttcagtcagaacgtgaatgtactgctgacgcatactgttctgggagaagattagcgtgatgcagtgctcttatgtattagcgccgctccccctccgtcgcctgcctcgcggggttaacgccggcgccttccagcgccgcgccggccggcgccgcgcagccccgcgcctccggccgcccgtcttcctctttcctccttccttcctcctctcttcctctctccccctcccccctcccccctccccgggccgcttcctccccgccccctctagacgagcggagcggggccagggcgagcgggcgagcgagccggagtgagcgtcaagtgaggggccgcgcgcaagtcgcaggcgttcgcagctattttgggccggtcggagggagcagttgggtggccgctgataggctggagcggcgcggggctgcggcgggagagcccgcgccggcccccgccctccggcccgcacccggggccccctggctctgaagagcggggctcaggggcccggcggcccgcggcggggctgctgcatttggcctgcctctcgcccggcccgcgtcatcctcacccccgctgactgctgacggggcgcggactcgcgttcggagttcggaactgcgtggtggggactcgggggacggcggccggggccacgaggctcccaggaccgagagcccgggcttcgctgctgcactgccgccagcccctccttcg

SEQ ID NO: 5282 - DNA, 2054 bp, Homo sapiens
acgcggcgatgctttaagccgctttctgcctgaaatctcggcgcattcccggggaagcagtgccacgcttcagaaaggcgtttgtgctgcctcttactggggaaacgcagtgtctgtttcatatgcgccgccctacagaactgcagccccaaccgcctatctggcctcctccccgggcgctgggccaccactctctccaaatatgcgtccgaatatctgtgggtctgtctcccgttgaaatcccagggtgtccaaaggccacggggccgcgatgacactgggtaggtctccggaaacctctcaggacttctcccattttaaagcccagctagggacgaaaggggctgggagctgaaaaattgctccctcaacctccccgggtgggaggcagagccgggaatacacagaatcccaccccgaaagtcccgggaaagagaagtctgagtccaggagcgtgagaggagaacacacccgggaaatccctgctccggccgctgcacctccgcgggcgtccaggtgggacgtgggcaggtgcgcgagcgccgtgtgtgccggtgtggatctgtgtgtgtgcctgcgtgtgtgcgtgtgcgtgtgccgcgggctggctccgggacactgaggactcccgggtcggcccaggtctgtccgaccttgctgccctcgccgcccgcccggccccactccccggcgggccggctccttacctggacgcgccgcgtttccctccttcagcgggagcgccgcattgacactgcagatggagcctatgccgctgcctctcgccctcctctgaacgtgtgcgtgtgcgcgcgtgtggctgcctcctccagccccagccccgaacgcaaatactccaccgaggcacagggaagccgggagcagccgaggaacgcggagggcgccgaatcagagcctgcggggcttgacagcttctcttgcggcgtccaaggtgggcgtaatgtccaacaaaaaggtcggaaaatggggatcgattccgaacacccctttcctccacccagccccggagcccgagcagcggcggcggctctcgggggctgcggtggcgacgccgggctgccccccttcgtccccacccccgcgggctgaatgtccttgatgccaagcgggcacagcggcgtcactccgcgccgcccatgctcgcccggtcgggccgctgcccgggcgcggcgagtgcgcgggggacccgccggggagcgctctcggcgcctctgcgcgcctctctgggtagcggcggccgccccccggcagcccgcggccggccgcgccgcggcagcccccacccttgccgagacactcgccgggcagtgccctggggccggggctggggggccgcgggagccgccggctgctccccggggaggcgcggggctgcggcggtggtggctgcggcggctggcgctgcggcggcggagagctcggccgcgggccgagccgggcctcccgggcgcgcccccggccccccgggcgggctgctcgcaaagtttgcagggggcagggagcggggccgccgctggctcggccgccgccggagctcccgggctgcctgctgccgccgcggctcgctgctgctgtgcattgaagcccggccaagcgctgcaaaaactccagctgcctggcgctctctgggtcctcctctcctccctcccgccctccctgcttcccttcctccctccctcgcctcgcctcctctcctccctgccgcccgccgcccgccgccgctccctctctggctcgctctcgctggctcggagctcgcggctgacatctagagcgagggagagcggccggcagagggggcagggggcgcctccctacatgctcccacccgccgccgcccggcttgccggctctcctccgcaccaacgtttgccgacacccccctgggtcccctcggcccgcacggagctaccctggcggtggcgatgtggggcggagagaggggcatacatgggtgaccggagcgcacggcgcgcgctcagagggaggcgctcagccgcctcggaatttgcagctctgggcgctggccgtcg

SEQ ID NO: 5283 - DNA, 1258 bp, Homo sapiens
ccgcggaagcgccccttgctgggtagaagagtgggtctcccgccgcggcgcacctgtctcggctgccggctccccgcacctacctgtacgagacctgcttccggaaagttaagttcctcagcttctcctccagcgcttcgtccttctccttctggccggcggccgcgggctcgtccagggcagcggcccccgccgccgcggctgaccctgcgccccgcgggtccgcgccgccctcggcgcccaggcagcagctcccggcgccgcttccgctgctgctgctgccgcccgtcgcccctttctcctctcccgccgaggagctggggttcatggcgcccgctccggcggccgcggagggagcgcaggcggcgccgctgcaggggccgggcgggctggcggcggcggcggcggcggctgcaggagcgcgggcaggtccgcgcgccgctggcaggggcagcaaatggcagccccttcccgcagcatccatccgcggctgcaccgcaccggggcattgtgggaaactccgctcactcccccgccccggccaatcagaggccgccgctccccgcctcccgcgccctcccgcgccggcccgcaccctccagccccgccggcctcttcctaaatcccgagcgaaagcccaagctgaacatgaactctgcccggaggcgacgggctgcggcggagggggagagagaggaggacaggctgcgaccccgggctggggacgccagggcagggacagcgagcatcaggaaggagagcgtccggggaactcgagtggccgcgccctgggtcctgcaccgtgaggctggggggaccaggaccggcgggcgcccaccttggtcctgagcccagctgccgacgctgggccagcaccctctccaccgccgccctccagtgagcagagctgggctcaggcagcagcccctgggcgcgggaaggtagcgggagctgcatttaggggaggggggaggtagcaggagctccgccagtgggaaccttggagtgaattcgtcggcgggtgccaagtcgaagcgccgacctcctgtctctggactggggcccggacccctgcgtccccaaactgcgtccccgccttgctcgtcgcccggtgccttccttaggcgcagcagaccctcggtaaacagcggttaattcgatggaatcggatcacagggccctcggtgaagcagaaaggcggaggaaatccaggaggcagaagtgaggaccctggcgcctggcgccgctgcgttgttcg

SEQ ID NO: 5284 - DNA, 628 bp, Homo sapiens
gcgtggaggctgcggctcggcggggcaggcgctgagcgcaccgcggcggcacccggcgcagaggctccagcgcggggagccgggctcagccccggcctgccagcgccgcggtcctagcccacccgaggccggcctggggggcccgcagggcgcgcggagcgccgagtgcgcgtcgggctgggccccgcaccccggtgcaggagcgcgggcgcggcgcggcggagcgccccgcatggagccggcccgggagcccccctcgcgggcccggccgccgccgcccctcgccgcgcgccccgcgcccgcccccgccgcccccaggccgcgttcgcccgcagaggctgaggcccgcggccccgaggggctgctgcggcgatccgggtcgggctacgagggcagcaccagctggaaggcggccttggagggtaagcgcggagcggcctccctctcctggcccagggacccctgcccaggcccgacccgcgacccggaggcggtcagagtcaccttggccgctgtcccggaggggagcgctgggagcgcggcgccgggacgcggcggagtcattcatttcagggcggccagacgccggttcgtggggtggggtgggagggaaccgggggccaccgcg

SEQ ID NO: 5285 - DNA, 1075 bp, Homo sapiens
gcggtccccagggcgagcactcccgctcccagcgcctcctggccaccaaagaaaaaccagacgcctgcgacgggctctcctcccgcccgggcttcctcgctcctcgcccctcgccggccatcgggcgccaccaccgcgggtagcagggcggggcgctctgggagccgctgggtgtctgggctggcgtctgcaggggccccgcgggatcaggccggctgcaggggcgcggcggcgcagcccaccttgttgctgaagagccgcgagaggctgcgcatgggcggagggggccgcggggcacctcggagcccgcgcacgtcccagaggcgcagggcgccgtcgtgcgaggcggtgtagagcacctggccgtgcacctgcgggcgcaggggcgggcgtcaccggtgacgcggtaggcgggggggacaccgctgcccgcgtggatggatcggggcggggcaccttccctcccacgggcggcggccccgagaagggcagagggacctacctggatgcagttgatgatgaatgtgtggccccggaacaccctccgcagctctccagactgcgcgtcgaaggcccgggcgcaagcgtccccgctgcccgtgaacactgcggacacacagcgcgcgctgggcctccctccctgctcggccccccgcaagcagggatggggcggcgagagcgtgacctggggcgtctccgagactccgccccacgggggtatcctgaggctcatatgggaagtggacagtgcccctccagagaaacgggtccccacggttattctgctccaccctgcagatgcctgcgcgccagctggccctgcccctgccctgctgaacaccgcccgggcccagtccccactccgcggtttggtgaagttggtttccgtgcctgcttgggaagcccctgcctggggataatcgtcaggtcctcgagtcgcttcccccctaccttccgctgcgtcggcaaccttatcctcccgtcctcattaacggatcggcactcaaatcaaagcccagccctctggggttcatgatcacgcacccccgggacccctagcgggggcgagcctccg

SEQ ID NO: 5286 - DNA, 5566 bp, Homo sapiens
gcgcttctccagcgatcggggcagaaccaggacgtgcaatgcgactgcccccccctccccgctccccggcagagcttctgtccgcgccaacccacccaccaggctctgcccgcgccacgcgcgcccctggcaggcctggggcggggaaaggcgaagcgctgggcacgcgagggcctgtgcaccccagttcctacgacgctcctggcccttttcaggcccgccgctgccgcatttaaccccctccttccgggggttattctgaagaagtctcagaccctagacccagcctcccagaccccgtccccgagctcgcccggtgggcctgtaggccggtcctccttcgcccagaggagagcgcagacacgcaatgtccgcccgttggccccgcccgccccacccctgctccccgcgccccttcgtttcggcctttgtctacaggccgggtcggaacgtcagccccaggagccgacggtggctctctgctcgccccggggaaggtgttgctctcctatcggccccaattccccgcccggcgcctggggcttggctgcggggctcggctcccagccgagggcgcagggctggccaggcctgctttggctgaggtggagatctcgctctcagggattgttgggcgtctctgccccgcgagtaacgagaccgccgcgagcgaacggctttcattgagtccatttttccaagtgtcaccacgtcaagctagagaagcgaggcgagtggaggggacgcagaggggccggaaaagtcacccttctctggcctcgttttcagataaaaacgggagcctggctcggcatccgggcgcccggtgtctccggggcgcttcactgaggttttgtttgcaaaactagcgtccgtgtcctgaagcgcacggcgtctggaagctgctttcctgctcgccctctccgaggcccctctttgtgcagcgagcctgagaaatatggaggaccgtcctccgcaagcgggtggtcgcgggcgctctccgattcctgggtgaagctagagggaaaacggggttcccgggtcagtgccccactttccatcccgggagaaactaatgtccggagagggctcgtctgatccgcacagaaaggccgaccttgagggcggcggtcgttcgggggagaaagcggaggctctgggctcgcgggagcgcggcagccggggctggcatcgcagaggagagacacgccactgccccgcatccccagaaagcgcgaggcgccgtcccagctggggcaggcggccgaggccggtcctcatgcgcgcttctcgaagcttcctgaaacaccttgcggagttccgtgtgtatagaactcagcaccgcccagcccctgggcagctcaactttctgcagccccatcccagcttccccggccctttgaacggtgacccctcttaccgctttcccagagttgtttcgtgtttgggtccactctggggggcccggtaccctctagttatctctctcttcatttatttctctttctcctattcctccctccacctctcaccttcctcctttccaggagagcgacccacgaattcctcttcctccagccaaccccagggcccagcccgcagaccctgcgagggcaggtctctgcccaccggcccgccaggcgccctggaggtgacgctctgcttcccagagtctctgttgcagccacgaattggggtctgggtcgcaggaaagcacagggctgaagcccagcgtcttggggccatttatactgaggcagtcagaggcaaagagtcccaagaattcagaaaatacttctcaggaagccgcctaattggctttcatgggacaggtggagccattaacctgggatggttttgcaggaaccaaagagctcagggcccctcctccccccaatatcatgttcaggagacccagagtcgttggaccctccctttcctgactggtgatcatcagagtttccagagttgcagaaaattctccccccaaaaaaccaagtaagcgtcaataagacttcccacaaactctcaccagccctattttcccggggggcaggtagactgtggggtttgattttttgagactcggggaggacccctggcagatgtgtgcctagccagaacatttggtaaggactcctccaatgaagaaaaagtggaggaatccagccccagcgagaagaggcttccccaccctgccctagacacaccggacagagggcacactctgaccagagccacgtccagtggccaggaggccagcccagcacctcctcccccaccattcccgtcctgggtgggggggtaattttcctgggagcagctgtgggaactgtcgtttctcatcccagcccagccagcactctgaagcctgcaggggaaggacagcacgtgggatggacactggggaaggagcttcgcaaggccagggtgcaaccttcaggccccaggtggcctggcaggccacgctgcctcggagatgcttgccagactccccaagttcactcagggcctggcagcaacctgctggctgcctctgcgggggtctgggttgctgagcacggtgcagctgcccagggccaatcagccctagggtgtccgtgccaggctgcggcctccccgcctcccccgcactgagggtactcatggcgtgcaaatgctcccgcacccccagagctgccctatcggatgtttccaggaattcacacatttccataaaaatgcattttaaatgatggacaggcgagcctggggtaacaacgggtgtttggtgggtagacaagagcaaatgggaaggagcccgagggaggagggggaagagaagaggaaacagaacttccagttggacattctgacaacagctggaaggaaagtctagaaaagatgaagagagaggaggggagaaaccaactggggctcccacccttgccgttggattcctaattctcgtttcaaatgggccctgctctccggcaaaattagtttaaaggattttaaaacaaagaaaacgagatgaccggtctgggagctcctcaatcagagtagagaagttagaggggggcgggcgacttggttttgaagtcttagctgaacagtcacccctcctctccttggcaaaaaggattcctttagaacctccgaggctcctggatttctcccttcgcaaatggagccgcatactgcattcccccgctctttcggatcgctaagcatgtttcatgagggtcgctgtccccgggtggaatgcggccgtatgcacgcgcctccctgcacacgcacacacacgcacacttacaataagtgtctgcaggaggagtgtcctgcgcgccagctctgcgtttaagacaggaagctgccgggttaccgagtcaaatgggagtgacactattcctctccatcagcaaggaaagcggaccacaaaagtccctttgtatctcggcagctcatttaatattatttatgcattttgtgcaaggaattgtgggatttcgccccacggtaaacaatatggaaatcttaaaaatagcgatcttcctgtgcgtgtccacctacgcgccccggggtgacctggcggggctgtcgccgggtgactcacacccctgaaccgcgaagcgacagggaaagcgcgggcgagcgcaggagacgcggtcgggggtctctccgggttcctgggctcccgcacccggagcgggggacgcggccgctttaaggggaggaggggcggcgggctgctcctgtcacccagcggcggccggagcgtcacgtgggcgcgcggcgccgcggccattggcccgaggcacgtgtccaggagaccggcctgcgacgtcactcgagggggctctgttaaaaataagaacaaaaatccagagtgaaagtgtctcaggttgcgccgagtggcctggaaatttccgagcccgcgcggaggccgaggcggcgagggcggcggacggccggggagcgcgggcggcccagcccggcccggccgggccctggcctcgcgtctctcacccatgcgactcgggccgcggagctctgcggggctcggcgggggcgcggccgcacgccggtggggcgccccggcccgcagcggggcggcggccgcgaggagggggcctccatgtgcgtgcgggcggtggcgggcgcgctgaccgcgggcgcccggcaccctcgagggccggctagggcgtgcgggcggggacggccgggcggcggcggcggccggagccggcccgggcgggcgtgagcgccggggaacgcgctgcctgcatgcgcgcagctctcgccccgggcggcccaggcggcggcgccggagcccgaggcggccggacgcggagaggagcggggagcccgggaggcggcccgcgtccccgccggaccactgcgactgtctagaccccggctgcgcggcgaagtcgaggacttggctctgttgaatctctcatcgtctgggcgagcggggcggctcgtggtgtttctaacccagttcgtggattcaaaggtggctccgcgccgagcgcggccggcgacttgtaggacctcagccctggccgcggccgccgcgcacgccctcggaagactcggcggggtgggggcgcgggggtctccgtgtgcgccgcgggagggccgaaggctgatttggaagggcgtccccggagaaccagtgtgggatttactgtgaacagcatggaggagaatgaccccaagcctggcgaagcagcggcggcggtggagggacagcggcagccggaatccagccccggcggcggctcgggcggcggcggcggtagcagcccgggcgaagcggacaccgggcgccggcgggctctgatgctgcccgcggtcctgcaggcgcccggcaaccaccagcacccgcaccgcatcaccaacttcttcatcgacaacatcctgcggcccgagttcggccggcgaaaggacgcggggacctgctgtgcgggcgcgggaggaggaaggggcggcggagccggcggcgaaggcggcgcgagcggtgcggagggaggcggcggcgcgggcggctcggagcagctcttgggctcgggctcccgagagccccggcagaacccgccatgtgcgcccggcgcgggcgggccgctcccagccgccggcagcgactctccgggtgacggggaaggcggctccaagacgctctcgctgcacggtggcgccaagaaaggcggcgaccccggcggccccctggacgggtcgctcaaggcccgcggcttgggcggcggcgacctgtcggtgagctcggactcggacagctcgcaagccggcgccaacctgggcgcgcagcccatgctctggccggcgtgggtctactgtacgcgctactcggaccggccttcttcaggtgagcccgcggggaccacgcgtcccggctcgccgcggggaggcccgcggagctggggggcggtgctggcgcgggaacttaccgggaggaaaacatctcgaacctcccccgcgcacacgcacaaagactcacgcgacattgtgtgaagctgacgccggcccgggcagcggccaggagtccagcggcaggactgattcg

SEQ ID NO: 5287 - DNA, 5566 bp, Homo sapiens; identical to SEQ ID NO: 5286

SEQ ID NO: 5288 - DNA, 1164 bp, Homo sapiens
gcgacttgctcagcgccaaaccgcggctccagccctctccagcctccggctcagccggctcatcagtcggtccgcgccttgcagctcctccagagggacgcgccccgagatggagagcaaagccctgctcgtgctgactctggccgtgtggctccagagtctgaccgcctcccgcggaggggtggccgccgccgaccgtaagttttgcgcgcaaactcccctccacctgcagacccggcgggtggccactgccacccgaactgaggatgagaagaaggaagttggaaggggcggtggatgcgcccagggactctcccagcctgggctctagccccgaaacggtccccggagtgggatccaggaggggccgggagggaatctcctcccgatcgtgaagcggcggcgcccagttcccgctttttctctctgccgggttcccgcgctatcccttccactctggctgggaccgcgttcccgggctcgcaggctccgccggggaggttccggggtgtgggggccgggacggcggaggcggggagtaagggcccggctggcggtgacctgcagtcacctctctgccggaggggccctggaatgaaaggcgcgcgggccaaggtgacctcgccttggttggcactgcggctcagcccccgcccggggactcgcgggccgactgtggccccttctggggaagccggggcgcggggaggcgttccgggcatctcagccgcacggggtacgctcgccctcggcggggcccctcgctccgctgtgggagtggcagtgggtgtcggggtggagaaagtacgcgtggcgcggagtcctggggacgcggcgtcccacccgctctggggagccccggactctctccagcttccaggctcgcatgcccctcttttcttagtgccctgagaacccagcgaggggctgaccctcccgaaaccgtggcgcagccaccagcaatctgtggtcgccgactcggggggttgccaggtctgcgtttggccaccctttctgtcctgggggctgaggtcagctccgggcgcccggccccgccgcgcggctgcgagcacgtggggttgacgggcgccgcgtggaggcagcgagcacaacggtggtcaccgccgccagggaaccgcccgctcgctggggtccaggcgttcg

SEQ ID NO: 5289 - DNA, 1495 bp, Homo sapiens
tcgcaaacttttctctgcgccgtccttttccgcgtggaatgggacggagcagccctcccaggcgctgcctggctgcggaggggagcgggcagcgagagcctcgggtctccgcctgggttcccgggtctccggggcgctggcctcggtctccgcgcagcgtccagcgacccctgtcgggggttcccggcagccgcgccgccaccccccgcccggccagcgcgggaggaaaaggggctgcgcccgggagcgccgagcccaggctcctcccggtggcgtgtccgcgcctcggggtgggggtgtggtggggaagagggagggggcgaggccaggggagggtgcgaaggaggcgcctgcctccaacctgcgggcgggaggtgggtggctgcggggcaattgaaaaagagccggcgaggagttccccgaaacttgttggaactccgggctcgcgcggaggccaggagctgagcggcggcggctgccggacgatgggagcgtgagcaggacggtgataacctctccccgatcgggttgcgagggcgccgggcagaggccaggacgcgagccgccagcggtgggacccatcgacgacttcccggggcgacaggagcagccccgagagccagggcgagcgcccgttccaggtggccggaccgcccgccgcgtccgcgccgcgctccctgcaggcaacgggagacgcccccgcgcagcgcgagcgcctcagcgcggccgctcgctctccccctcgagggacaaacttttcccaaacccgatccgagcccttggaccaaactcgcctgcgccgagagccgtccgcgtagagcgctccgtctccggcgagatgtccgagcgcaaagaaggcagaggcaaagggaagggcaagaagaaggagcgaggctccggcaagaagccggagtccgcggcgggcagccagagcccaggtgggtgcgcagcgcggcccgggccccacgatcctcctcctgctcctcctactcctcctcctcctcggatgccgtggcctctccctccccctctccctcgcccgtcctcttcgccctgcgctctgagcgcccgttgagtcgcgcggtgcttcccctcctgggggccgccgctcacctgggcgccgagtcctaccgggcgcctacgcccagagctcagggcaagggacagcagtcccggccgcaccctcccagagtcccgggagcgcttcgctccctggcacggcccctccccagcgccttagcggctgagcccagcccgggagtgggacctgggctataggagtcgaggctgcgtgcgcgcgtgccccgcgccataagcgctttgcacgggggccgtgtgccctctagcgggaaacgctggaatgggccgcctggagggagagccggtcccctcggtgtgcctggcagcgcagaagtgggtggtcgagcaagaggccgcgtgggaagttagcttcggcgttttggggcacagggcaagcgatgtagagtgcgcgccg

SEQ ID NO: 5290 - DNA, 352 bp, Homo sapiens
gcgcctctggcagcagccgcccacgcccccggccctgcgcaccgggcttgctccgggaggggcgcgtgacgccaccgcggggcagccgagaggggaccgcgggctccgggcagggcaggcgctcccgcagctccagctataacacaagggagagaaagcaacgctttggttccagaaacttccatcgtcaaggccagttctggccagacgcacagccaaagagcccccctagtctagcggatgaaccgttcgcgagtggcaccccctaaaaccttggccccatctcccaagatgcctctttactgcgcaatccagaaagcacccggaccgccgccacccaccagcggcggcg

SEQ ID NO: 5291 - DNA, 1141 bp, Homo sapiens
ccgcccagcccccagcgctgcgctgtccccgcgctcaccggatgatcacgaacatgaccagcgagttgcccaccaagcccacgacgaacactacggagtagaccgccgtgatgatgaccgggatggccggggagatgtgcgcgggctccagctgcgcgtcctccgagccggcgctgccgttgctgtcgggctcggcccagccgggaaaccaggcgctgctgttggggggcaggcaggcgctcggggcgcaggtagggcccggctccccgcggaagatctggatcggggagtccatggtggggcgattgcagcaggaaggcgaggacaggcggcacctgcggcgctgcgggagcgaaagaaccggctggacgcggagaggcaaactttgcccgcgccctggccagcggcgctggggacccggagcctgcggactcccacccgggccgcaagtcgccgggggcaggacagggagaacggacttctcgctgcctttccggccagcaggcgcgccgctgggtgccagagaggggcgaagagcgctcgctccttctcccccagcccctgaggtgcctccctcaccaattctaggcaccggcccctggtggaactgtccccagactgcctgagtccccagggtcaagcccccttcccacctcccagcacggagctctacctagaactgcacctcgaaagcccaaagcttacctatggttcccagagacaggcgaaggcgaggttttttacgggacgccctggtaggtgctgaaccgcgcgctcacgagtcccgctcagctcttggcatcacctgctctcggaccccggccccgctctccgcccgagggctgctgttccgccgagcgcagcccccgcctctcagcgcacgtctcccactactggcggcggctctgcggggcggggcggggcgggaccggcgggacgcagccgggacgcggctgggcgctgggggcctgcgggcggagagctcgtctggtgcgcccgccccaggccggcaggtccctgccccgccccgcccgcccggagtcagcccccagctccccagcctcccagccccgcgtcccctccagccccgcaggctcgcccggcccactaactgcccgagcggcacaccgcctggtccccg

SEQ ID NO: 5292 - DNA, 3297 bp, Homo sapiens
tcgcccgccgccccgaagctgttcggcctcctttctagcccgctttccagcctcgcaaggttcttctctcaccttctccggcgaccccctcccgaggctccccggaggcgcctggacttctcccccctgcttcccgccctgccggccgcccggctctcgagggggcacgaggagctgccgggccgcctctcgctcctgctcggggcggcgctggcactgcccggccgaccctcggggggtcgtccgctgaggcccccccatccggtagccaagcccagggaagaagacgccaccgctgggcagagctcgcctatgccggtgagtaccgtggtctccactacgccccacacccagcctccccaggacaccagcctctcccgattcttcctaaccccaactgacccgctccgctggggctagcagtagggagggtggcaaggtcgggaaggccgggacgtggctgggcaagtcctaggacgggacattggcggctcccgggacaccgcccctccccgcgggaagacactccaagctactttttcctgggccatttcctttccatggtccaagaaaacgggagggagccctcgctcttccccgaggctgcctttcaaactctcagcgtgtcgctctcctccgcctactccgagcctcccccaaacgcgcctccgcctgctcccagcgctcgctctcccactcccctgccctctcggcaggcaagggaggaaatgacgtgatgttatttttgtgtcaggtcagtttccagcttcagcttagccctccgggctccagggaactaaccccgcggccccaccgggtcccactcccgaagggacgctgcgggctacggggacacgcggtgctgcgagtccggagagctgggcggctgggttccccctcccgctgccccctggtctactcctttccccggactccggagtccctggagaaggggacgcggagggcgactgccgagggtctcagcgggatctggagtcaggggttagttcccccccttatcccccgctcggttgctgggtggggcctccgcgctctggctagctgggagggggcgagggccgctttccagggcgggaagaccggaggcctaggctgcgccggggtggggcggggacagagctcagagaggcgccccgggccggggagaaggtagggggctgccctccagagacgcgcagtccacagacgcgaagctctggggaccaagcgccccctccatgcctgccgcccacccccgctccttcctcccgctcccttcattcacgaggtccgagcacgcagtccagcacactctagtctcgctcggccccgcgcgccgaggggaggcgatgacacagagggcttcgcggacgccctctacgcgcgcctggcttcgcatccacactcttgggacttgctaatgcggggctggagcagtggggctgcggccggggtggaggtcgcgccccgcgtggggcctcgggggtacccctagcacccgcggcggtggagtgcgccgccgctggagggaggcgagacgtgggattgcccggccgggtaaaaggagtgagggggcggggaggaggcagagcaaggggaggaagaggccgggagaagagggctagagcaaagaccgagagccggagaaaggcgaaaggcgcggtgagcaatcgccgacgtagagagggcagccctccgcgctgcaatattgagaaggcacccgcgggacgcatgcgcacggcggacggaggcgagccggccggggcttcctccccggccggcagggtggacggtgggctcgtgagtatcccagttcctcgaactctctttcttcgtctcgggctcgccctgaggcttcgtgctggaaagtggccgaggctgggaggggcgcgccgctcgtccggacctcagggtgtcgccgttgctgcggggcgggagccggtgcgagtcgggggttccttcccgcagtgcgagtttgggggagtggggctgcgagtgcgtccgcgtgcgaagaggggcatcgcgccaccaggatcaatatgtcccgggcctgccagggcgtccgcgattccacctctgcggcttcgcgtcggtgtcttggtggggaacgcgggagtctagtctttagaccctagaaatcgcattgaccacccgaagcgtatttcggaaagaccaggcgggtggaagcgtcggctttctcacgggatagggagaggacaaggaaggggttgggcgcccggggctggtggtttgagcgccgctgggaagggtaaggagacagagcctcctggaatcgtagcgcctccttttaggagaagtgcaaccagggcaggggcaccgaggggcagggtgaggaagtggacgccccacgcgtggaccctagaagaccgactaggtatgggcgttcactcggagcctctgttcacgctcttgaaaaccgaatgaacagagaagtgccctccacccttcgcctgcgccagggcagttaacgtgcaggcgccgccgggattttcctggaacaaacccgggcacttgatcttccgcaccctcggagctgccctgggaagtcgaaacaagtctgggcgcccggactgcggagactggaaagcagggggcggagggcgggagactgggggcgggaagtggaggtgcaggctgcagctggggaccgcggtgggcgttggaggggagggtctgtgtgcgcggctgtcctccagcgctgggggagcggacgggccaggggcctctagggaagcggcgctccgggaccggggtggctttcccgtctctgtgtgcgcggcgatccccacacccagctcgggcggaggagccctgagagaagcggctagctgagagtggggtgggcgttttggggaaaggtttgcgtgcgctgcggccctaccgctgctagagaagtggaagagagagagtgggcgccgggagggggtctataggcgccgcgacctaccccatctccctccacgcttgtgggggagtgagtggggaaggggctttgggagaggcggcgcgcgggcactgaggtgcatcgtgagcttcccggacttgacagcatcaaaggaaaatcctggcgagcagccagggccagcgagcgaccccagcagcagggacgcggccgtgcgagagctcgcggacaggcgagggggatcccaggggagcagctgctgcccacgggccacgggcgatgcacggagtggagaagtgaacgtggtctacaggatttctgtccggaaggtggagagcgctacaggggaatctcctcgattcctgtccgtctcg

SEQ ID NO: 5293 - DNA, 2213 bp, Homo sapiens
ccggctttaaacgcctctccagccacctgtgaaccgcgaaggagccggctttcgcggcggggaccttgccaccagtaccctcgcgggccgaggtcgttctcccggtcggcttcccgcctcacccgaaaaggaattagagcatctacccaagacggtgactggcagggcagatcaaggtgtcctggtctcggccccagccccgcggtgcgccccgcccgcttaccttgaccgggtgcaggtagccatcgccgcgcagggcgcccaacccggcgtccgccggcgcctcggcgtcgtcctgcaggctgcgggtgagatgcgcgatgtaggtggtggccagcagcagcacgtccagcttggacagcttggtgtcgggcggcacggacggcagcgtgcgctgcagctccaggaaagcgtgccgcagggtctgcacccggctgcgctcccgcgccgcattcgccgccgccggccgcccgctcccggaacgcgagccgcccccagggcccgccggccccggcccggtccgcccgggacgcgagtcgcggatggcggcggccaggggcgcgggctcggcgctggcgctgagggggctgcccgctgggcggccgcggtccatggcagcttcccgcgccgcgcgcgctgcaaaggaccgaaggtgcggtgaggccggggggcggtcgggcttaacccgagaggcgcagccccctggttctccccgtgcgcccaccagcagcccaacggggctaagggcgctctcaagcgagctcgttttgcctgggacgcgatttgcttccggacgtctggggagagttgcggaactccggagttcttgggcttcctagaaggataagaagaggcgcagtgccggctttgcttttcaggggcaaattaagcaaaaggtctactctacccgggaagaaagatctcggaagcacagctcaggatcagcactcgttcgcgcttgggtgactttatccaacccggcacgcacgagaggtggcgcggctccttctcgccgacgccgcggaaaaccacggctcaccagccgccctcggcctttcacgccaggggggatttctgcccgaggagcgggggacccttagcctcacctcggggtacggcacccgccaccgttccgagcccgagagctgcgcagtacgcgtctgacgggcccctcacctttcctggagcggctgagtggagctccgctccgtcgtgagggcgggcgaggggcgtggagcagggcctgtgtggccagggccgcgctggtcactccatcctcgtccggccgatgcccaagtcgacggctgtttccaacctccgctggctgtgacttttatgcgggcgccccgcggccaggcgtgtgtgctccgaccggctaaggcaggtcgggcggaggacctggcccaccggagaggctacgccgggggctgaggcggcttagagggtcattaatcaaaccctccggcggggcgggctcgggggcggggcgtcctcctggccccgcccctcggctcactgcctcacgctgctttccccgaggcgcctcgctgagggcggcgtgtggagagtttggggtgtctgccgccggctgcggtggggccgggctggaggccgcgggtgaggcctgtggttaacctcgcgctgccgaggtcttacctcctcgagtccagtctgattccaggccgcttccaggccggtgcccagctgaggcgggaacgctgcagtttggttgagcgtgacttttaggctctgtgaggaaaagtcgagcgcgccacatcgaggcgctagccgtttattctaccacaaggtaaaagattcatgctgtcctagttaccctaaagctgggagatacactgcacttcctaccagaccccgaatgctctcagtgtctgtaattctttaagaagttcctagagcagacagcccttggatcgtgggcacttctccccggggacggggaccctgctgaccgcctccgctgcccccgcgggggccaccgctctttaattatttgggcgaaacattcttttctggttttgcacttgtggactcacgggaagcgtgacttgcagcgaggcaggacccgatcccaggcttctttagaaagcggacgctgcgccccaaggcctgttcagagccgccccaggaagccgtgggtccccgaccgccccaaaccgcagcggtttctgcaggtcctggacccgtcgccttcg

SEQ ID NO: 5294 - DNA, 363 bp, Homo sapiens
gcgctcagcacggcgggcagcgccgcgctgcgcaccgccgccgaccatgagcgaggacagccgcggagacagccgcgccgagagcgccaaggacctggagaagcagcttcgcctgcgcgtgtgcgtgctcagcgagctccagaagaccgagcgggactatgtgggcacgctggagttcctggtgtcggtgagtgtccccggcagacgcagggggacgtccgggcggcgcggggcgcgggtcccggagtggctgcgggaaggacgcgcggcattgtctgtgcggggacccgggacgggtcggggcatcacaggcgcgggaatccacgtgtggactctgcgttcgcgggcgcggtgacccccgcg

SEQ ID NO: 5295 - DNA, 960 bp, Homo sapiens
ccgtcccccgacgtcccaatcagttaccacctccccgaaggaaaacaaaccggcccttgacacatccctccacgtgcagcgcccgacgccacgggccttgggcggctgcacctctcccctgccggccacggctcaaggccccattattgcgcgcacccagctcccttccaggtgactttcgcgtacctggcggcggcgccctaggcctcggaggctgcccgggcgggctggggctcgggcggcgctcgctgagagtcgcggcgcccctcagccgcttcccgggcgccgatcgccgccctcctgccccggggtggggcccaggggcatcagcagccgcgggctctcggccgccgcctgggaactcagggtcagatttagtttcacaacaacgtctcctcgtcacggcaacccaactggaggcagaagccggcggggcggccgagcggggcggggcgggagcgcggccgccgcgagccacggtggggagcgggcgcgggggaccctggcgggccccgggcagcgcggctgcacttacttgtgtcacaactgcggcgacggggggctgaggaaccggttcttccaaaagcaaaccgaaaatgggtaacagagaggccggggcagcgctaagaggggttctgcctcggtgtttagggcaaaaaacccggctccggcttccagaaattcgagccagcggtggctttttctttctttcctctctaaacgctcctgtgcctccgggtcgaggggcgcccttcgcgcggctccgagtgcacagcgacaccagggctggcgctggagaggggagccctcttcccagcacccctcgggtctcccccgtacccccacccacagcccctttcctgggcccgacgcccctccgctctgcagccggagcctgggcctggtgcccactgccccgcggggtgtctcggacgcctggcccctgcagcgttttctacg

SEQ ID NO: 5296 - DNA, 1404 bp, Homo sapiens
acgcggggtccccgggaaccgccgcctttcttcctcgctcccgcgctcgcgcttcccctcccggggccccggcccacccacccctggtgcggccccgccggactcaggagccccggccgcccgggctgcggggagggggcgccccgggccggccctagaagttactttgcaaagaggcagggggcgcggggccgcgcggggcgagctcgggatccgcggggaagaagccctccgggaccgcgcctcggccgcccgagccccccgcgcccgccgccccccacctcggtcgggggcttacctgggagcccgctgcccccggccagccgcccgcgtgtgcccagggccagcagcacgcacaagtgccagcgcacggccgccgcgcccatgctcaatgcgggccccgctgggcgtgcgggcgtgcggggcgcggggacccgaccgaccggccgctcccgcaggcgctgctcgctgctcgccgctccgccaccgctcgggctcccgagccgcccagccagcccggctgatgagctgacagcgcgcgctcattggcccgtggcgtcggaggggcggggcgtcgcccagggccggccaatgggcgccggcctccggccctccgaggaagaggggggctcgggcgtcgtcggggggacccttcccctggggcgggcggcaggtggggggtgtgggcctggccggccggctcgctaggcgcggggtctaggccaggctggggctgcttggaggctgcgccctcccctgcccgcggcgccccggcccccgccgtcgagagtggacgcccctctggggtaacccctcccggcccagaggcagcctcgggggcggggatcctgcgaaccggggatcccgtgaggtcgcccgccatccgtgggcagtgaaacgcgccagcgcgcagagcagactcgcctgcgctgccgtttgctggacgtttcttgagcacctactggggaccgagtgcgggcgaggcagcagcgaaggaaccgggaggggaaacctcgtgaagatcacttgaaaattgacgttcaaaacaaacgaactttttagcactcgtcaaaggacagtggcccgtcagtgtgcttgtcacggggcggccgcaggacctgcgtctggaaccgggcgggcgcccgggacggacaatgccgcttggcggtcggtcccgcgggaggcccccgcacggggctaacctcggccggcgaagttcgctgcccggaatgcgaggccgaggcctccccctgtgacagaccgggcggggccaggaggaggggcagggcgggcatcccggtccgaagacccaggaactgctctggcctggcctggggtctacacctgacgcctggcgagggttggcttcgggtctggtcccaccgggcctgggagggacgggcg

SEQ ID NO: 5297 - DNA, 1247 bp, Homo sapiens
tcgtggggcaccacgcgcggacccctgcctggcggctcctgcgcccggggctgctgagcccggggttcgtcctgaggccgcggctgtggttcctggccctcccggcccgcgtcactgtcgcgcggcgcccgctgcatcttgccttccttgcggcttcgcatgcccttggtggaacccagctcggcggacgacgaggaggatgagatggaagcctgctggaaaccgggcaaatcccacagaaaactgatgaggaagacggccgagagcaggaccctgggagtatccatggcgggcaagtggctgcgtctccccaggaggcggtggcggcggcgcaggacgcgcggggcacggagcggctggacagcggccggggcccggctcctcgggcggactcggagtgcgaggagccgggtcccagccacacaaaccccggccccgccacgccccctcccgcccctcgccgggaggggaggaatggggagggagggcagaggaggggtggggagggtgggaggagagccgggtggtgcgggccggaggtgtgggggagaggggccgcggtgcgccggtgtggcaggaagacgcagcgcccccgcgggacgcgcgcggggttgccgggcggtgcgcgcggcgcgggccgcaagcgctgaccgggggaaggcgggcgctgccggcccgtggccggggagcaaaggctggcccgccgcgccagggtccccctcgaactcccggaggtgtggtccctccgcagcgcggccccggctctcggtcctcgccagccgcctccactttcctgggagcgagcggccccggaggagggaagcggcggcggcgcccccaagagacagcttggagcaggcgcctctgctgcaggctgcgtgctgcctcggggcggtggtaccctccctcctcggccccaaccgccaggcctgccgtttgcgcccctcaggggccagcccggagccagagaagcctcgccctgggccaggcgcagggcccagctcggaacagccccattttctcggttgggtatcgctctccacaaagacaggcgtctattcccgaccctcgaggtcaggcaaaggccacgagtctttagagtttggatcgatgctaaaagctgctgcgctcccctgcaggccccagcctctcctctcgcagtccccaacctcttctgacgcagactttagctgctccacttcttcgtctgctcccgggatcctctccctctcgcggcctgccccccg

SEQ ID NO: 5298 - DNA, 1861 bp, Homo sapiens
ccggtgagcagagccggcgcagccacagcgcggagccgcggcgcccactggtcctcggagctgccaatcggcgtgtaatcctgtaggaatttctcccgggtttatctgggagtcacactgccgcctcctctccccagtcgcccaggggagcccggagaagcaggctcaggagggagggagccagaggaaaagaagaggaggagaaggaggaggacccggggagggaggcgcggcgcgggaggaggaggggcgcagccgcggagccagtggccccgcttggacgcgctgctctccagatacccccggagctccagccgcgcggatcgcgcgctcccgccgctctgcccctaaacttctgccgtagctccctttcaagccagcgaatttattccttaaaaccagaaactgaacctcggcacgggaaaggagtccgcggaggagcaaaaccacagcagagcaagaagagcttcagagagcagccttcccggagcaccaactccgtgtcgggagtgcagaaaccaacaagtgagagggcgccgcgttcccggggcgcagctgcgggcggcgggagcaggcgcaggaggaggaagcgagcgcccccgagccccgagcccgagtccccgagcctgagccgcaatcgctgcggtactctgctccggattcgtgtgcgcgggctgcgccgagcgctgggcaggaggcttcgttttgccctggttgcaagcagcggctgggagcagccggtccctggggaatatgcggcgcgcgtggatcctgctcaccttgggcttggtggcctgcgtgtcggcggagtcggtgagtgggccaggcggaggatgcgcgcgccgtttagggtgtttgaagctacgagaggagcccgcagggaataggggagcgccacctggggaacccccagtccccaagtatacaccggagatccgctgggacaaatgcgctcgtccggtcaccctttccccctcttcccttcctcagaaaagcgctgctcgctggcgttaccccgcggtccgcgggaatgggggcaccgagaattgcggtttggtctagccgcagaggcccctgaagtcactcccaacttcttcgccctcggcgggtcttgctgcgtggtctgggaaggacggaggggaaagggtggcaggaggggggagcctgggtcgggcccgcgagggaacggctccactccgcgcgctcctcgagaccagggatgacctggaaacttcggggtcccttcctccgcacaccatcccccccgcgccagctttcctgtttgactgcatgcaagttctggggagatgggggccagatttaagagacccgcgagtgtccagagagaaaagtttgcaaaagttcttttgtttgatgctccctgcggctagggcgaggtaaccgacactacgtggaatcgcagtaggcgatccctcaaggggatactgggggaggcacggaacgcgtccgaaaatgctgggacgccggccactggattcccagtcctgcggcgaccccctcctcgttgaggggtggaggttgcaccgcggggcgtcagggacgggaggacattttcataggagttacacgggagtgccgcaagcagggcgaggcggggtacgtgtgacacggcgctcggcttcgggtcgcctggccgctgggggacagaggcttccctcccgccacgctcgccctctctggccctggcggggcgcttctggggccgggaggagtctcgtctccggcggagcgcctgccggcacccagcttccctcccccgccctggcggtgggaacttgatttctccttttggtcgcgcttcgggggctggagcttgtttccccacgtcgcccaatgagcg

SEQ ID NO: 5299 - DNA, 3044 bp, Homo sapiens
gcgcgcgtgtggaaggctgggtggggtgcgcacacacgctcacttgtgtacgtacacacacacacacacacacacacacacaggcacacacacccgagctcagtcacccacattgcttgcccagggcgcctggaagagctggcgagcccgcccagctctgttcacccggccccgccccgccccctccgggagggctctccgggcggcgcccagccccgagcagagcaaaggacggcggcggccacctccgttctccggccgctggtttctcgtctttcctcgtcctttcattgaacccatctccgtgcttcgaaaatctgactctaacccgatctcttcgcgtctccgcctcttctttctagagtgagcgccaaaaagggcctgacagacagaagcctttggccccagcaccggcccagcccgtctctagacgattcttgctcctttcaccctcacagcctccagtggtcgcttcatcttcgcaccctcccggccaaccctaactctcctcgtctctcctcgcgctgtctcgcgtcctcccctcaggatccttccgcacattctcagcgtccagcgcggtttcccacaacttcctcacgccccgctcccctcgccctgtccccgccctcgacaccacctgcgttccccactcgctccaacctccctcccccgctatccccacttgtgggcctccagctctctgcccctttcctggcccccatccctgacaccccagggacccttcctccctcctcacgttctccctccttccaggatcccgccccgacacttcggggccctcccgctacgcgcactctttctcctcaggtcctgacacctgggcgccccctccctgtcacccaccttcagctccagccctgactctcgggcgccttgccacccttacgctccccgccccgccccggtccctcgggcgcccccactcgccgcctctacctccctacctgctacacctggcacccctgcccccacccctgctcatactcttcccccgcccccgacacctcgggcgccccctcacacgctcctattctccacacttccgtccccgaaaactcgggcgccctctcccttcacgctcagtctctcctccctccccgcccggccccggacccagcctggagatcgcgctcgggaggggcggctgccgcccgcggggcgcccgcggtgcccgggcctgggcagcgaggaggtgacgccgcccccgcgggatgagcccgggaggcggaggggcggaggaggtgctggcggcggcactgagcggcggcggcgcagggcgcgcgggccttccgcgccgactccatcgacccaaggggcggcggcggtggcggcggctgagcgaccctgggccgggcgcgtgatgaggaggggccggcgccagaccccgctgcacgtcggagctcgcctggatccgggcgttggcagccgaagggccctggccccgggactctccgccgctagcccccgtcatatcttctccgctttcgcttctccactctagccgggggtggggtgggtggggttggggtctccgcgggggtttccggccccgcggcccgctcccgggtgtgcctggaggagttctccctctgtggcgcgcgggagccctgtgatgcgtcagccggcgggacggatgagttgcttctccgggaaaccgtcctcgcttcctcacgaccctctcggctcccgcctgggtgcccctcgggccggcagtactccgcctccgggcgctcgaagcgagttccccgggggcttgttcgcaggcaccccttcccctccgaggcggcgcgcgcgctcccggccctgaccgcggccggacacactcgcgccccggtccgcctgtcgccctcccgcctgctccctccagtcaccccacccttagctgtccccgccaccttactccaccaccctcccccgcctctccgcgcactccgcgtcccggcctccagttcccctttcccttgaaccgctcacttcacagcccttcgcccccgggaagaagaaacatttcccgaagcgcactcctcagccctccttccccacgcgctcgccctcccctccccctgcttttcttgggggaggggggctgtcgccttggattgaaggccattgatttgtatgtatttgtcccagcgctggaggctgccccagccgccgcgccggtgccgccgctgccagtggagttgcctccccgcttccctagggtggttcggctccaccaaacatgtcggctcctgtcgggccccggggccgcctggctcccatcccggcggcctctcagccgcctctgcagcccgagatgcctgacctcagccacctcacggaggaggagaggaaaatcatcctggccgtcatggataggcagaagaaagaagaggagaaggagcagtccgtgctcaagtaaggacctggctccatattcccgcctctctccctgccctccgccccctcgcccactgccctgcggccgcctgcgcgccccagttcgccgccctccctcccgctggcggcgcccaggccacgagggctgcggccagcgccggccgcccgggctgttttaggggtgtctgagagcaggggtgtgtgtcggggagggagggcgccaaggccggctgaggtgagggtggcgagccttaggcggtgtgattttccttggcgcctttccggatttcctcgctggtcatcttggctccggggccccagcgggactggggctgaacccaggctctgtgcgtaccctctcctttcccgccgcgctgaggcagtgactggggcacagaatccaatatggccgtgcacaggtgctccctggacggacccgggcgaaggcgcgctggcaggggatgcggacgccaccctggtcccacgcctccgcggggcggctctaccagcaacgcgggacagagcagggctgcccacagtggctgcgagcagcgggcggcggcgcgggctaggggcctaagctctgtcgcggtcgggtgggtgtgcgtccgccgccatcttccagcccctccccctcggcg

SEQ ID NO: 5300 - DNA, 1603 bp, Homo sapiens
ccgcacttcgcccgaccaaggccggggccgtagtttgcatccggactggatttggatgcagccaatcctcctttggctgatggaatagtctcccctccccacagccccggcgcgcccctccctcgcgcgcctcgccgcctcccgccgcagaacaggagctgcgcggcccggagcggcggcggcggcgccggagtatccgtcccgcacgccggggcgaggggcgagcgagcgcgctcctcctcccgcgccctgcgcccccgcgctccccctctcctcgctgctcgctctcccgtccctccctccttctcttccttctttccgtgttatttttctcttctctttccccttttctctctccctgaccgttcgcttgtacattcccattctccccccgtcgctctcctctccccctcccctcctcactgtcacactctctgtgcccccgtctctcttctctcatttgcttgctcatctccgaacgtgaatccgcggctcccggaggagcccagcgcccggagcacctggagtccggccggcggcgggccgagcctggccagcggcggcggcggcggcggcggcggcgggagccgagggagcggcagccgcgaccgcgggcaccgcgggagccccagcggcagcagccgccgccgagatgtcccggcgaaagcaaagcaaaccccggcagatcaaacgtaagtttgcgcgcggggccgggagttggtgggattattgcccaggagcggggtgcgcgggacgggaaagcggtgggtgggtggcggggctaggggagatccgctcccggtcccctagatgtctcaaactttgcctgagcagtcgaagggacaactagacagtcatagacagacagacggccagcccgagcctcgggcaggagagaggctgcgaggagcagcccatgcttgccccgctcagccctcgcgctcccgggctgcttttttaattccgacccgcgcacgctgcgagtccccggcgctgtcgtccagccggaggggcagtcccgctcctttagacgcttattattgttgttgtcattgctttgtgcgattgacgtgggactactcttgggaaccacttttagtaaccagggtagaaacttctcagaaaagctgggcggtcgagacctcggggcgagggaggtaacttccccacgcggtggaaaatcagagcgtcagggtcccgatcctgggcggtgccagagccacaccaaacccgaagcgaaacaaaaagtaggtgtaaaagttcgcgcctctgcggcgggcggccgtgcgtctctgccctgcgggcgcgggctggtggctggcaggtcgtgtcctgggacttcgggcgggtccggctcacgccgccaggacgctcagccgagcggggattcgggtggtgtctggccctggtggcgcgcggagtcctccctgggaggggccgccagtcacttcccagcgcggaagctgtgagttcaaggcggtgggcgcgcaggggagtgcatggccctgagcccccgggtgcccgggggtcccgatggtgcttagaggacacggcgggtcaagagacaccttccgaaacaggcacgctcgcagagatcaagtcg

SEQ ID NO: 5301 - DNA, 1365 bp, Homo sapiens
gcggcgaacatgagtgcggaccgcacgacttagccctgagcgcccgattggcgcccggctcgccgagctcccagcgcgtctcgctccggctccccgcgcctccagggtacagaaaacagagtgttttgtagagctccagggtcctaaaggtggggactggggacccgcaaaagctggggtggagagcacagccctgaccatctgagcccccggagccagggcgtgagtgagcgcctccacacgccacccctgaagcccaccacgcacctttggcagagagggacccacctcgcttactgcgtctccatcggttgccttggcagtggctgtaatccatgcagttcagaatgatgagggcaaaggagaaaaggcgaaactgcatctgggcggtcgggcgggggagagacgcctctcaaagtctaggaactggagggttcgcccaaagagccggcgccggccgcgctgctggggaggactcagagggagactcgccactcacccccgggccgcaccggtcagttcagcgcgatcagcatctctccgccacgaacctgagagacaagaagcgaaaacagggtgtgtgggggatggagagagccccggggaggcagctgcgccttcgcacgtcccaatttaaagaagagagggaaggaggaagcgaacccactgcctagcacgagccgcggagcggcttaatccagagcgggcagctgcggacgagttggagaggaaggtgattataatcagtgaattagcaacctctgccgagccctaagctccgacccagcggcataatgcgttgtgccggcgctccggggaaaggaaagaactctaaaggcactgagagcgcagggctaaaagaacgctcttaggccatttggagtccacggcggtgtacccaagcgccgcagctgcggctgccttggtgtgggttgcctaccgtgcgcacgtctcgggcggcgcggcctccctaggcgcggtgctccatcccgggctcgggaagcgagccgcttggttagcacgtgggctggggaaaagtttgccgagaccggctgggagcgcctggcagctctggaattccagcggccgccgcggggttggcgacgccaggcaggagcgcggagcggcgggtgcagccactgggatgctccgtccccgcccgcgagcgcggtccccaggcaaggggtgcgcccgctcacactctctgcctccctaaccaattgtgtcgcttcctgcgctttctccacggtcacttcacagctaagatttctttctttccgagctgtagaaggcagaacgctctcgggaggacgaagtgatccgaagggatgtggcaagcgcactttccgatggagatgcagaccg

SEQ ID NO: 5302 - DNA, 419 bp, Homo sapiens
tcggggaggcgacctctggatgcgccctgtgcgagcaaagccgggagagcgagccccaagcacctggcagcggtgcccccagcaggcgccgaggaatccggctatccatttctggtgaactctgcgcccactgaggcattcgaggtacggatgtgtccgcctagtactcggagacgaaggagagagagcggggatatgcgctccagctctgctaggctccagggctctcacccttgcattcaaagcctccaccccatcccactccccgccactcaccttctgcttcggccacccggtgcggctccagcaccgcgcgctctcccggcacggttcccggagaaagtcccccaatcaccagctacggcacttgtagcctctgcacgccgctcggctccgccgggtgggcagcgcccgccacg

SEQ ID NO: 5303 - DNA, 3675 bp, Homo sapiens
ccgcgcagcccagcccgcgccggggcggtgggtgggtgggtgtctgctatgggattattcttagcgctccactctcttcgcaaaagtggcgcctccgccctcccggctcaggcacactcgctcggggctcgcacgcccggcccagacaccagcgcggtggagagcaccgggtggggtccccgaagggtgaggctcggaggcgccgcggagggggggctccctagagaggagggggcgctgcgggaaggcccccaagggaggctgcgtttaaccctcgacgccctgcacccagcccggcgcggcgcgctcagccgcctccccggactcctcccggggcgcgggagcccagcggcgcgcccagcccttacctatggtggtgatgaccgtgatcgcaaagtagaaggagccggcgaatttccactggacgccggcgcggtgcggttccgactgcaggatcaccagctccagctgccggtagtcctcgctgctgatgttgtacttccccttgatccggatctcctcggctttgagtttctcctcctcgcgcatctcgtggtccgactcgagggcgtcgaacacggcggcgcccaccagcaggtaggtgaaggtgcagacgatgagggacagagtccgcacgttctgcctcttcatggccgccagcaaggagccggcgcggggggcatgtcccgcaggctcacagccgcgcgcgtcccactgcagcgcccggcggccgccgccgcctcctcctccgccgccgccgccgccgcctccaagttgtaagcggcggcggcagcagcagcagcagcagcggggaggcggggggcggggaggctggggggggccccctccgctggggccgccacagccaccgccaccgcgaggcggctggcggggcaggggcggcgcgggcccgggctcagccgagaaggcggacaggcacaggaggctgctcgagcgccggggccaggcgtccgggaaccccgacaccctgcgccagacccggccgaagcagcccgccccactgcgcagggccatgcagggcggccccgctgggtaccgcgcgggccttgctgccctccgcaccccgccccccgctcccgcgggaaacgcagggacgggaaccggagccagaaagcggccggagggcggccgcggggcccggtacccctgtgggtccagctcgcgggtggcggtgcccagcaaggagcctgcaggtccgcgcgcccagcggaacctgcttccccttttacccctcctcgccccctctcggtggtggggaggaaaagtttgcgaagtggcggtgtctctggagtcccctgcaagcggggagggggccgagcaggtgcagcgggaggggcagcccgctccccaaaggtccgcgcgcccagcgcccacccgggcgcgcgggtgcgcagcggggtccccgccgggcgtcggccggtgcgcgaagtttgctcggctcaacccccaaggcgcgggagcggggcgcggccccaggacggcagggaccgcgatggagcggcttcgggggcggccgggggacggcgcggtggcggtcggccagcccgctcctccgggggcggcgggcgcggcggcggcggcgggaggggtcccgcgggcctcgcggagcagcggggcggacgcgggcgcatgagccgcgcgggggtcggggccctccggcgtccgggcgtcccgggaggcggccgccgcgctggtctgccccgggcgctacgtgcgtgcgcgccgttgggagcccgaatgtgtgtgtgcgcgtgtgtatgtgcgtgtgtgtgtgtgtgtgtgtgtgcgcttggcagccccgctccggcgggagggcctcggggagcgggggccgggctacgccgaggccgggcctccctccctccctccctcccgcagcctccagggcgcgccacctcccgcctggtccccagccagctggcgaggctgctgtggcagctcccgctgcagacccagcgcggcgcagggcgcacgcggagggagcccgggaggggcggcctgagccgccagggagggggcgggggcggagccgccggcgggttttggcgggggatgggaggataaacgcggcttcttgggtccttctagccccgctccccaagagcgcaagcagccctggcgggtggagagtttgagggactcggggttggaggaggaaaacgggattcagccagagatggcaggctgacagcttcaggcagattgggcagagagtggggagcagaaggggagggggccatgggcacacaggagagcggcagcagcggttcacgaagtcttccccaccccccaccccccacctagccacccggcgcgggagcgtgtcattggccagggacatggcctcgtggagtggtggggtcccgagggctgcctcggccccctcgcctcccagcggcacagcccgcttgggccagcacctgcagacccgagtcgtttccctggagagcgctaaggacagcatgggccgccacttttggagtcaggacagcggggaaagacatcgcaatcccccgacccagtaacctctctgttgctttactgaaggaaaaaaaaaaaatacacacacacacacacacacacacacacacacacacacacacacatatatatatatatatatatatatataatcactctttgatatatataatcactctttggttccccacagctgggcgcaaggtgcgccgtggatgcagccctgagccacgcgatagccccctcgagaccacctggggtaggaacacgaggctcgggctggggcgcacctattccctgcttccagatgagccctctccaggctttatctccttcccattttggcctcctttacctcctccccctccccgccctctccctttaggctatcgaggggcttttccttgaccttcggcttcctgaatcccgcctggagccctggagctccaaaaggacagacccaagcctcagagacccctgggctcctcttcctctcctgaccccagccaaggaagggatggagatgggaaagagttgcctggcggcaggctagcagctggccaaggggtggctggggaatcagacctaaccctcgggcagctcgcgggctccaggagaccagtcccttctgtgggtcgccccctggagcggtgctcgggctccctggcctcagggaccccgggcccagagggtctgggaccccagtgattcaccgaggcctcccagctgggacgctctgcaccccactttcagggatcacgggtgcccaccagggaaggggagcccgcgctgtgggctacgtctgagccgtcaggtcctcgctgggtctgcgggcgccctggggcgagggagcggggagccctaccccgagcaggcactctccccagattcattttggaaaccaaggcccccgcgctcggcaagtgagcctggctgccgggtgagtcaccgcgagcgggcgacaaggattcccagcagctggtaattaattgcgccgtggctcagcccacgacggaaccccagtcaggcctcccgccgccctggcagcggcgccacccctgagtcacagccgtcgggcctccgcgcggtccggaagccgcctgcccgcctcggcgccaccagggggcactggactccgacccacgcggcggccgcgcagccggcctcgctgcg

SEQ ID NO: 5304 - DNA, 3675 bp, Homo sapiens; identical to SEQ ID NO: 5303

SEQ ID NO: 5305 - DNA, 3378 bp, Homo sapiens
gcgagcgcggagccggagagccgggagcacaggcggccgcgccgcgtcctggcccggcccgggcccgcgcgccagcatcgtccgcagcgcgggcatccggaccctccgggcgcccggggggctccagcaggcgcgggggaacgggagggggcctgcgtgcgccggcgggtgctctccagggggcgtcccggcgaggcccagagcgggccgggggcggcggcggctggaggagccccccccacctccggtcgggcgcccggctcagccgccggcgacgcgaggcgctcgcggggatttgcaactcgccggatcgagtcctcgccggcggggccgctgctgctggggaaggtaaggaaggctccggcggggggctgggggcgcggcgggtgggggcgcagcgagggtgggagggggtcgggggaggggcgggcgcccagacttcctaacttcgccgtttggggcttcgcagctccgaggttttgcgctcagagctcaggagtttggacccccaccccctaccccctcagccccctgccttctccagcggtggcgatggaatgtggcaggtccccgcgagcccgcattgggcaggctgaggagggggcgaccctggacgcaggagaggctcctcggcgccgccgcctcctccccatccacacaccacagcctggcacccctcttcatcacatgcacagggcaggctggggagggcgttcccgctgtacccccagcacacacagacgctggcgggggtctaagggagccccccatggcccccaacagccacacatagacgcagcaggctccggagagcccccgagcgtgtccccctcctgctaatcacgtccagggccccctacagacattgtaagggcccgagacgtcctccccccacgcacagagctcggggcaggcaggagaaaaccccagactccttctcgaagccctcgctcgtagaagccctcgcctgtagacctggcattggcagtggagactccctggaggtactctcccccacttcgggcggagggctatttttgcgccccccacccccacgcgaacgcctggctcttccctccttgtctacctttccactgggtcggacaggccgcgcggataagccgctctcaactttgggccggccctatgccgtctccgctccaagcgccgagcactcccgggcgccgagcactcccgggtccgcgtcgccggtgagcagaggccgccggccctccaccgtcgccgcgctagcttggagccgcgcggagctgcctcgaggaacgagcacggcccccgccccctcctggggaggctgggagctctggacccggccaggagccctctccctaggtccccgcggccccctgggcgaggtagagagctcctccggcctcgggagggggcggcggagctgagaatcaccgcgaagcgatgcgaccgggagggcttgacggaggctgcggctccgagcccgcgtccctcctcctggccgcggcggctcctgcttggccactccccggcagcctgaagagaacgcctaatctggcaccccagccccaggccgctgggcaccttacccctttccacttttattttgggcttctaagtttcttggagcgcaggcgcctaggctgggacccgaagagccctaagccagccctctttcagcacccgtccccgccgcgacctccccgttcttcctccgggtctggggcgcagattcctgggctgcaactccggagtagttgaaaggcaggaaggcgtgtgggcgggtagggggcctgcactcccgccccagaggagccgcttgtcgtttgtgttggggagggagctgggaggtctgctctcccgctccatcctgggaacccacggagaccctcggtactctccccacagacacaaacacacgccccctcggagcgagagccgccgcgggggaacagcagaggccgcgcgggcggaggcgggggaaaggggagctgggtcccttttctatctgggagggaggtggtatacggtgtgtggggtctggggaggcgactgtcacgtctcctagaaccctcatgccttccactcgtctgcgaccccggctgccgaggaggcaacgagggaggtcgagccgctccctcccgtgggcggcagcgaaactctgcgcccgcacgccggggtgccgccgagtccggctttgagtacccagcaaggtcaagcaggcgaaggagggggcgggggttcctgggcgcgcccccgtccgcgcacagtcggggccttggaagggggtgtgcgcagcccgccgagtcagtcccgctcgcctgccgcccgcgcccggtccccggaggcggacgttgcgcgcgttcggggatcccggagcgcccggcgccccacgccctcccttcggctcgctagctgctccttggcgctgctttcagacttgttgcgcctcgatctggggggcagaaggctggcccgggagacccggcggctgagggccgagccgcgaagcccagggatgcgccagagaggcgcgcggctccgcgggtgggcgctgcgctggggggctcgagcctggggtttgccgcctccgatcccagggacgggcgcttgttcctgccggggtcccgcgcaggggcggatagagggcgattcgtcgcctcggcctcaggcagcactcatccggatcccgggctagggagggggcgcagccaagttgtggagccctcggaggcccttccctctcccgcaggctccggcccctctcggacctcggtggccgcgtccgtgaaatggggacgcgggctctgctctcggatcccttccagcccccgaccctccgcacttgtcccgagatccaacgtgcccggtccgcagcgtgctgggtctgcggcgtcagggtggcccgagtcccgagaccatctgcgcttgcggacacagccgcggggcctggcatgaagggccccagggagggcctagcaagcgcccggggtccgagcagcctcctgcggcgtcctccgcccccggtcggcccgaccccgcctccgggagtgggtcgtggggcgcggagcccgtcctccggggacgccgcggggctccaggcccaggcggccggcgcggggccgcagtggcggaaggcggagggccggcgcgctgccgctgactgccgggagagggcgcccgcaccgcgcccgcgcggccctgcccgccccttccgtctcctccgcgcctggcccgcggctccggccccatcttgggcagccccggccgccacctccctcccgcccgcccgcccgcccgctcgctcgctcgctcgccgtccgctcccgccgccgggtcccgtgacgcgcctcgcgtctcggccggagcccccctcgccggcccggcccg

SEQ ID NO: 5306 - DNA, 1108 bp, Homo sapiens
gcgtgctcagatgaaaagcggggcagtcgcggcccgtagacagcgggcggctgggtcagaccgcagagggaagtttccagcggcaagcctccccgcggggaaggctgtgtctgtcccaggagatgagccgcaggcaccaggggtgatgaggcccgggggaggtggatgtgggggatggagcggtcccaaggtcgtcagctccagccggcgccctgggccgcggggccggagagctccggagcggaccctcgccgcgctccgaacccgccccgcgcccccaggccacacccggctcgcaccctccccgctccacgtgcgcccacgcgcccctccgggcctccccctccttcccgcgcgggccgggggcgcgggccccggaggagctgggggcggcgggggcgcggggcgggcgactgccgggccccgggccagctctcgccccccgccccgcccccgatcgctcggctcccccgcccggcgctccctcgggctgcgctccgcggctctcggcggcggcggcggcgggcgcagagcgcggcatgggcgcccgggccgcggggcctggcggcggcgggcggacgggcgcgcggctgcgggcgcaggtgcggggcggcgggccggggccggggccggggcgcggagccgccgctcgggggccggggcgcccgcgtccccgccgccgctgacgctccgcctgtctccctcccgtgtcccgcccgcccccagaccctcctcctccgcccccccgcagctcgggccctggtcgtggcgcggctgccgcacggtgcccctcgacgccctccggacgcgctgcctctgtgaccggctctccaccttcgccatcttagcccagctcagcgccgacgcggtgagaccccggccgggccggcgggaggggcgccgggcaggggcgcgggcgggggctgccggcgggcctgcgggtggggagggcccgcacccgtcctgtcccggaggggtcgctgtggcccgcagccgccgtggcctggcccggccggcggggtccatgcgcctctggagagggtgggtgggcgccgagcgggtggcagtgtggagttggagacgggcctgggaggagtcgggacccccg

SEQ ID NO: 5307 - DNA, 1700 bp, Homo sapiens
gcgcggggtgggcgctcccggccctccagcccccaactccctcgcgcacccgggacgggtgaaggcgcccagctgccgagcatacccgcgacgcgggttcaaatcccgccggctcccaggcaccctcaccccgccacagcgcgggctgtttctcctcccttccccggaggaattccttaactctccagtacccataccataacaaaggaggctcggtccaccaatgcgcgatcgtagcctacagggacccccaacgaaccccggcccagagaatgcacctggccgtgccacgcgcgacccccgaggggcaggcggacgggtccaggcgcggacaaaggggcctctcggggcgcccaagctcggggcgggacgccgggagcggagctggccgggaactcaccttcgcagcggcccggctgtgctcctcgtggagcagaagggcggcgggcagcagcagcagccagacgctgagccggggccccatggtggcgcgcccgaggcggcgagggacggctgcccggcgtgcgggggccgcggcggacagctagctctcggaaggccggacttccagcgctacgcaccgtcccgggtgcggcggctccaagcggagacctgagcgcggcgggccgagctccccaatttgttggcgctgccccctcccccccggcggtgcgcgggcggcgcctcaaaggggaggaccctgcggcgcgggtaagaggcggcgggagcgcgcggcccgggagtgtggctgcagtgcgccgggacaccagggctccgcgctccgcactcaagaggctcccgcgtcccaacccctcgcgcccgcgcgttcgcggatccaggccgaggaccgaaaggggccgcccgagcccccggggccggcgcccagagagcccagcaaggccggccgccctgccggtgtgccgccggcgggtgcttctggaagggccaatgcgttcgggcagcagcccctgaagccgagcccgaggtgagagcgacccccgagcggcgcccagaccctggcccgagagcaccgacttggagcgccttgtgcaggctagggctgcacgctctcctgcttgggagtagaaagggggagggtgggagagcgaagaccgagctcctcggccaaggagcacccacaggggcctaacgggaggctctccttctttccgggtcgtgggggggacggccctccggtcacccctgcatgcgggccgcgcaccgcgctgtccccgcgtctcgcggaccgagaccggcggtgaggatgggctgcctccctcatcctgcgctaaactcgctttgtctgtcgcctctaggctaagtgggactgaccggggcccagagtggacgaaccgccagcatggggagagaccagcgcgcggtggccggccctgccctacggcggtaagcgactttctgcctggtccccgtgggtcacgcgcgcatggacccttcggtgtaactctcggggactgacaagccgggcccgcacgttcacgtctctcttcctccctttcccatgcaggtggctgctgctggggacagtgaccgtggggttcctcgcccagagcgtcttggcggtaagtcctggctcccgcgcttggacttgcgcgcccgagagtggttgggacgtttgagtggccttggagaaggcagctcgtccgtgcgctcccgagtgtgtgtgtgcgtgtggatgttcg

SEQ ID NO: 5308 - DNA, 692 bp, Homo sapiens
tcggcgacccggccatttcccgagggtctcaggcgtcccacccaacggccgctccccgttccctgtccgtcacctcctcgttctcctacgaaggcgcgaacgttccagactctcgccggtcctcgacagcactcattcagtctcccccctggagatcccaggctgtactctgggacagaaaagaaggcgggtacgaccgcggtgtcgggtcctaccttagccgctccttctcctgagggagccaggcgggagagaggggaaccaccgaggcctcggtcttcccgcgtcccagagcggccgggcgagtctcacttccggcctgtgacccgctgacctgtccttgtcccaccagtcgggcggtgaattggactgactggtgacccctggcaccaggcttccccatgggcaccggagcaggcggacaggggtggggtcccgcgagcgacacggaagggtcagtgtggcggagcggaccctgtggaggcggggtcactgtgctcctgagaagggtcctcgggggtggagtctatcaaggttgcgggggcgtggtcacggagcggagccaataaaagcggggcgtgcacggccgcgggccagtgcctatgaagggcgaggggtgtggtcacagggcgggatctacgaaggatgcaggggcgaggccgggtctctgcaggatgtgcggtcgcgggtcg

SEQ ID NO: 5309 - DNA, 1924 bp, Homo sapiens
ccgccgtttgctcaatgtccccgccagccttgtcggtccttaccgccgtttgactccactgtttttctcgtggtttctgctgcttctctaaattgtccaacgaccgttattcagtaaaaatgaatgaaacggggccgtgtgatctaggcagcctggagatgagattttggaatcataagctacattccaacgtataaaccgattttactcgttttggatactcgatgtacgcggaatgggcgctgtaaaatgcggctgccccgccggaggcatctgcttgggacttgctggcagccgccggtcccctctgcttgcgaccctcggcccagccgccgggaccctggtgcacctgttcctgggcgtcctctctactccccagtggccgccagctccactcccagcctgtggccccggacccgccggcctgagcgttcgcagagggccggtcgtcgccacagccccgcgtcccggcccccgcgccccttggaccttcgccccaggccggcgcagcccagcttcccgggcaggctccacgctaccggggtccagtgcgcggcgacgaagcggagagctgtgtccagactccggagagaaactccggctccgcggggcggcgcggggcggcgcggggcccggagctgcccaactccgccgcctcgggaaggcggcttcgggcccgcagggagccccggggagggttcccggttccgccggcagcggcgtcgaggggtgcctgggctcctggggaccgcgagaggaaaaagaacggaaatcgcaccggggaggaaggacgcgcagaacgcccccgtgaagcggggtgctccggtcaggcgtgcgcgggagcgcggtccgggggagtccggcggcgccgtcgcgcgcactcggcagaggcttcgcgggagaacgcgcagcccggggcgtggggcggggaactgcccgcgcgaggctttcggcgcgtctgggtctcggcgagagcaaagcgcgtcctggcaccgggggcggcggcgcagaggccgggaggaagaaatccgggccctggcccaggtcgggcttccacccctgcgacccgcgagaggcccaggcgggaaaggcggcgagtggcgtcagcggttccgaaagcaaacctggcccggtgctactgcccgagggtcgccgggcgcgtttcctaattcccccgagtctggaaaacggagacttccgtagcgtcttcttcagtgcgtgctgcgagtgctgaaggaggacccggtgcctggacgacccggagcaggggaagcactcggccgacgctgtcgctgtcatcggcgtcattggcgggcaggacagtggggcgggtaaggggcctccccgcgcctcccggcccttcgcgctcggcgccagctctttggctcccttccctgcgcagctctaggcttagctctcagccatttctcaagaagacgatcccgagggtcgaaggccgcccttgacccttgaccacggactctccgtgtaactcggaagagccgtgattttaaaacccggcctcggggttacagaagcccgagatctgggaggcgtccgggacctccctcccagaaccgcagggacccggcctgggatccagggtgtggcctctcgctctgcgcggtcgggaaggcggccgggtccggtcaccgcgccaagcactgcgcacccctgggacgcgtcgttgcggggggctggggggctggggcgcctccacgacgcctggtctgcccggccagtgcttggtgtcgttggtgggttcgtggctgcgacgggtaaacgtccgttccgcgagccgggcaaggcaacccctgcgggtcgcgcccgaaggccggacccctccaagccgcctgggagcttccaaacaggtggacccgaagctcctgtttgatcggagaataacgttcaatttactccgccg

SEQ ID NO: 5310 - DNA, 1991 bp, Homo sapiens
tcggtgcaccgtgctttggcaaccgggtcttggcgcctccgagagcggggcgaggggtgccacgcgattcccaggccgctctgtatctctcggtgcgcttgcagggaccctgcagcaaagccctggatgcttgcagccggtgcaagtttgcaagcagctggagagcggtggctggagtcggggggcggtgggcgtggccacgctccctcccaggcagtcccgggaatgttctgaaaagtatccgaaagttctgagtcgcgcgcgcgccaaaagaaaaggcacaaccccccaccactccgggcgtggcgtgcccagacctcgccactccagctgcgcctccggctgcagcgcacacgtctcctgcgcctcctcctccggagcgtcgctgtccgtcgggttcatccctcgcagcagtctccaggcgagagagggggccagagtgctcgcacttctcctaggggcaccatgcccaacgacgaggcattcagcaagccctctacaccgtcggaagcccctcacgcccccggggtaccgccgcagggcagagccgggggctttggcaaagcgtctggggcgctagtgggggcggccagcggctcgagcgccgggggcagcagcagaggaggcggctccggctccggggcgtcggacctgggtgccgggagcaagaagtccccgcggctgcccaagtgcgcacgctgcaggaaccacggctacgcctcgccgctcaagggccacaagcgcttctgcatgtggcgcgactgccagtgcaagaagtgcaacctgatcgccgagaggcagcgcgtgatggccgcgcaggtgggtgcgggcgtgcgggagcccgggttcagccttagtttttttttttttttttttttttagatggagtctcgctcggttgcccaggctgcagtgtagtggcgcgatcttggctcactgcaacctccgcttcccgggttcaagcaattctcctgcctcagcctcccaagtagctgggactacaggcgcacaccaccatgcccggctaatttttgtatttttagtagagacgggggtttcaccatattggtcaggccggtctcgagctcctgacctcaggtgatccacccgcctcggcctcccaaagtgctgggattacaggcgtgggccaccgctcccggcggggcccgagtttcttgaatgaagtccccccagcatggccgttgccatgcgggtcctgggttgtggagagatgcggcggtacttgccgacagcggcggcgcttggggtcctgggctcccggccacgctacatcgccggtctgggagcgccggagacgcgtctgatcccgcccgccgggcagagttgcgggcttcgctcggctcggggttccccacgatctctcaccctgtgtttcggcggagttgcgggggttccctctgctcccgggtccctgagatccctgatcccgctctcagggcagggaattccggggttcgcccctctgggcttccccgcgatcccagagcccgcgttccaacagaattgggagggtttattgcgctagaggagtcttcaggatcttcgctcccgccctccgaggtgaggctagaggggagggttcgactccaagggaatcccagggatctctagccccgctcttctagcagagaattaaggaattctctccgctttggggtcccaaaaatctccgaccgcgccttgggagcagagggtttcggggttcgatttcctcgagcgtccccagaatctctgactctccctccttgctgagttgcacttaaattagaaaggatcttggagggcggcagcgctggctgctaggttagcgggaaagggaggctcggccggctgctgcttacgcgggtaacctgtcggaaagccttgtttgtttttctggaaaagtcgctgcaatggacacagcgttgcgcggtttccctgcgcgcctggggcgctttttgtcttcgccctccgtggatggaggctgagcg

SEQ ID NO: 5311 - DNA, 1667 bp, Homo sapiens
ccggggtgcaaccgcaacactcccgtaggttcgagttctcccggagctgagcttctgcggccaaatgtcgggataaaagcggccttgggctcggaaaaacgcggccagatctggactggagggaggagaagagagagaagcggagcggccacctcactcgcttacaggcacccccaccctcactcccgctggtcctccccttctccgccccgcgagcaccgccgcgttctggagcgccgcagtctccagccgcgggctggggtagcggagagggcttggaggagggggccgcgagcgcccccgcgagagtggcctggctgcaggtggcaaggaaggtgaagtgcaggcacccgaggggcgcaaaggaggaggaaggcgtggggcggggagtgcaaggagacagggaccccaggggcgggggtggcggtgggaaggaggaggggttgggggagggcggcggaggtgttgggtccggccggctcacgagggagctgcagaagagctggctcagaccttaatcagagctgtcgccggctccttgcagccgccgcagcgcctccgcgaaggaggacgtgccgacccggctgcgcgcccaaggcagaggcccgcgtcggcgttggctgggcgtgagctgggaggccgagctgtgagcgcgaagggagctggagagacgactgcggcacctccggccgccccggagcacacacgaccaccggggctgcgggaccaagggccgcgtcgcccggaggccgcccctgagcgggcctcgcagccccgccgtccagcgctccctggccctctcccgcagccaggctgccaactcattcgggagcccggggcatgaacggctacggctccccctacctgtacatgggcggcccggtgtcgcagccgccacgggcgcccctgcagcgcacgcccaagtgcgcgcgctgccgcaaccatggcgtcctgtcctggctcaagggccacaagcgttactgccgcttcaaggactgcacctgcgagaagtgcatcctcatcatcgagcggcagcgggtcatggctgcgcaggtggcgctgcgccggcagcaggccaacgagagcttggagagcctcatccccgactcgctgcgcgctctgccagggcccccgccgccgggggacgccgtcgccgccccgcagccgccgccagcctctcagccgtcgcagccgcagccgccgcgccctgctgccgagttggccgcggccgccgcgctgcgttggactgccgagccgcagcccggggctctgcaggcgcagctcgccaagccaggtaagagcgtctgaggtgcgggagtttggccgggcgcgggggcaacttcggagtgccagctgcagctccacttgggaggactggaggcaaagttttgggacgtgggcctgtcggggctttccttcctactctccgccaggccggggcttcctctcccgggagaagccggctgagtctggacccagcgcgagtggcactcgcgcccgcagggaaggcgcctccgggcagccaaacgacgggactgtgcgtcagtatcgccaggtgccttcccaggttgaagggttcggaacgtgtcagattgagcagggagacaacggagttgagacaggacaaaattaaaacccacgtgcgcacactcactacggtggggtcg

SEQ ID NO: 5312 - DNA, 433 bp, Homo sapiens
ccgcgagataaatggtgacttctctcttgcaggcaccgtcatacctcgggtttagattctggacaggcgagccggctgcaccgaaggcccggtaggcggactctggcggagcgcttcagagagaagagtgtagaccgcgggaggcggagggctccctgccagcgtgcctcggccaatcagtattcacaccgcctgacaaccggccaatcagaggacgtaaagctccggggcctgagcggacagtactaggaaggggagcgcagtctgcagactgaagccagtggcgctgcgctgaatgcaactgcgcgcgcccgccgggtgagccagcgatctgagccaggcgggggcggcccgacctttcccgcccagcctgggtcagaggaagccgaaagcggcctcagcaaggtgaggcgcccgaggctgcagaagaccg

SEQ ID NO: 5313 - DNA, 896 bp, Homo sapiens
acgaggaccaaaggcacgaatttgcttccacgccacggcccgggacccagggtgcggggaccacgcggagcgcagcagagctcagggtaggagccgggaggccgcgcaggcagagcccgggcagggcggaggggaggccgcggagggccgggtggaggtccttaccgccagccccaaggtctgcagcatctctctctggtctttgtccccagggccgatgtgcctccgagcgaagtcgtcgtgtctgggcagaaggcgctccaggaggcgcgaggccccagccgcggcgctgtccccgccgccactgctgctgtcccggctccgcggcgcccagcacggccccgatcccccagccaggcggcggccgcccccgaccccgcggcccaggcgcagcccccacgccctggcacaggactgcatggccgcggccaccgtcccctgccccggcccgcaagggtcagccgcgctcttggcccctctcctggcctcggtcccccgggtggcggctgcgcccggcctggagcccctttcgctggacagtcggccggacagatggatggacgctcgcgggcaatgaatgggcgctgcgctcaaccaagacactcgcgcaaagttgtggctccacccaaggcacctgctccgcacactttaagcggcgccctggaggcgggaggtgggttggggccaggaagcccttggccaatgaaagtagacagagggggagggggcggaacagttcccgcccccgccccctcttcctaccctcttcccagcccttccgtggagtcccgcttcccctggaccggaggctgccatctccagtcctacccactccgacgctggctggtgccgggggccgggacgctccgtacgccgcccgccagggtgtggagccg

SEQ ID NO: 5314 - DNA, 1494 bp, Homo sapiens
ccggggtcttcccaagcggagcacctcaaaagccgcaccgcgcagtagaggtctccaggggcccccactcgcccccagtgactacggagcggcctctacctcccgccggcgcctggccacttctcctcccccgcagtctccgcttgatttccatgtgactgcaggcaagaatagcccagcctttgtgcctctgcaaagaacgcaaacaaaaatgtacaccatcaccacccaacaaacgcgcaactccgcaagacacaaagcgtctcccaaacatcgcttccctggtaacatccggcatcctggggctgccaaatcgcagacaaagacgcccatcagcgcggggggtgaggagactaagggagagacaagaccaacgtgctcccaccaacgggagcggcggttaaaagggcgccggtgccaggggtgagggacggggcaccggtaccaattagcggctcgcctcggggtccccgcggctaaggcgagaacgcaggaccaggagcattgctgcccactctctaccgcaacccgcacatcccgggaccacgtaacggcggatggggcgtccgggagcggcccctgcaggggagagcaacaggctcccgcgccctggaggcctggtctgcgctccgggcccccaggctaacaccccacccccagccccccgacaccaagactgtgcccctctgggtcaaggaaaaggaaaaacttttaaacctcttagtcagcgagagcaaaagaaaggggtggcgggggtgctgaaaggtctaggattatccaccgcggggctggggggagtggagacttgcgagtagcaaaggaaacttctagaccccatccttttaaaaaagccacagcagcggcttccgcgaagcgccgggccgcgcggggtggggcaagcgcaccgccccaccgccccacggcccgccgccacccctacccccacccccacccccacccccatccccgcccccacccccacccccaagcgccgagcccagggcgcccgcgcaccttccccgccggcgcgcgcgcagggcgcgggggcgcgcctcggcctctgggccggggctcaagcgccgcttacccggctcgcggcgcccgcccagggccgcgacgcgagggggcggaggactggggagcaggggtcgccggggcctctggatgcctcgcctcgcccacgctcactgtcttctcttctgaagtaacgacccggcgaggagcttcggatcaaaacgcacagacactcacgcgtgactgagaaacttaatcccgcggtggcccgacgccagcctagcgctccgccgcgccccctcccccagcgcgcgccgcacttgcgccgaccggggctgccgcggaggcggtggcggggcccaggctgctggggctgccgtgacgcctgcgaccggcggggcggcgggcgcgccttggccaatcaggggacgcggccgagcaggcctgtgcggggttttaaactcgctcctgggccgctcg

SEQ ID NO: 5315 - DNA, 828 bp, Homo sapiens
ccgcgacctcaccggggaaacaccgcggacagtcgggccagcagcgcccggagctcactccaggtctccaaacttgcagcacttcccagagcgcgcgcgctcggagcgggacctgcttgctccagtgcacgccgcggagcgaaccatcgggctggcgggggtggaggggtgcaggcgtgggggctgcgggccgctcgggccttgggcttctcctgccgccgccgccgcctcccgcccccggccaggagtcgcgcgtgacgcggttcgccgcaggagcctcgaaggcgcggcgccggcgagcccttccccggcaggcgcgtgggtggtagcggccaatttgacagtttcccgggccgggcggccagcgcggaggcgccacgctcgggtcgggggcgggctgacgccgccgccgccgcgggaggagggacaaaggggtgggtccccgcgggtcggcaccccggcggttgggctgcgggtcagagcactgtccggtggtgcccaggaggagtaggagcaggagcagaagcagaagcggggtccggagctgcgcgcctacgcgggacctgtgtccgaaatgccggtgcgaggagaccgcgggtttccaccccggcgggagctgtcaggttggctccgcgtaagtgcctccttgtgccgcgcggttgggaggagggtcgtgagcgtgagcgtgggagcgctgggggctctgctcgcgtgctgctctgaagttgttccccgatgcgccgtaggaagctgggattctcccatccggacgtgggacgcaggggaggggtaggtttcaccgtccgggctgatgactcgtggcctccg

SEQ ID NO: 5316 - DNA, 2705 bp, Homo sapiens
ccgtgcttggtggcccgggtggggcgcagctgcgggaaatgcacccggagctgtgccccctcccggcgaacagcctgcgccacccgccgcaccgggaggtggctgggggctgccgagcgagtggtgaacgcgatgggtggagagcgcccgaaacgaggtggaaaagggggcgggggcgaggcacggcgccttcttgccccttcttcagctacagacgcggcggcggcggctgagtccctcagcctcggtcatgtgatagtctcgaagcgctagctgcgggggtctcggcgtctcggggaccattacaaaacgcagccaggagagcgcgtcgctgccactgccgtcgcctctcctcctcaagacaagcccgggagaaaggcggcagctgcggcgcggacggctgagcctccccggccagcactcacccagcattcgcagacgccctctccagcccgccgctcgctcccagagtcctgcgccccacactcctcagcagaacctgcgggcgctgccgcttcagaaaccaccaaagttttttctcctcagcgacagcctagggctgcgcgtctcttctaaccccggcgacgctgcgagcctcggagaaaagagaggcgccctagaagccaatcttctctctccttaccctgatttttcactccaggaaaaggagaactccagcgcggtctggctaagtgcctggccaggggcctgcgtccagggcactggaagtcctgctgtcactggcctccaggacagcaggcgcaaactcagatttaaagggccagagtctctactgcccagaccttcctcccagccatcttggtctgggtttccctcggacctagaaaaagcaaagaggccgggaggaaacacggccccttgccactctcctctgcagccagctccagcactcagtctttggccacccgggggaagacgcagagaaggcggcggtaaacctggtgcactccgcccgcgactgtgcgcgccagtcggcaaccgtcggggccagaagttgccagcttccgagagctgagtaggcccgaaaggccaaggtcggagacaccaggcaattcggagaaggcaggagagagaagcagagagggcctggagggcgagagggcaaagtggcgggactggaggggccgagtgggaattagtgggggcagccaggccccaggaacggagtgcggagagattctgtggtccagtgcgggccggagggcggtggaggagccgggggcgatgccgcggccggggaagagctcgtacagcgaccaaaaaccgccctactcttacatctcgctgaccgccatggcaatccagcactcggccgagaagatgctgccgctgagcgacatctacaagttcatcatggagcgcttcccctactaccgcgagcacacacagcgctggcagaacagcctgcgccacaacctctccttcaacgactgcttcatcaagattccgcggaggcccgaccagcctggcaagggtagcttctgggcgctgcaccccgactgcggggacatgttcgagaacggcagcttcctgcggcgtcgcaagcgcttcaaggtgctgcgcgccgaccatactcacttgcacgcgggaagcaccaagagcgcgccgggcgccggtccgggagggcaccttcacccccatcaccaccaccacccccaccaccaccatcatcaccacgctgccgcacaccaccaccatcaccaccacccaccccagccgccgccgccgccgcccccgccgccgccgcacatggtacactatttccatcagcaaccgcctactgctccgcagccgcctccgcacctcccgtcacagcccccgcagcaaccgccccagcagtcgcagcctcagcagccgtctcaccccggcaagatgcaggaggcggcggccgtggcggcggcggcggcggcggccgcggcagccgcggtgggcagcgtgggacgcctgtctcagttcccaccctacgggctgggctcggccgccgccgctgccgccgcggccgcggcgtccacgtcaggcttcaagcacccctttgccattgagaacattattggccgggactacaagggcgtgctgcaggctggagggctgcccttggcgtccgtcatgcaccacctgggctaccccgtgcccggccagcttggcaacgtcgtcagctccgtgtggccgcacgttggcgtcatggattcggtggccgccgccgcggccgccgcagccgcagccggagtccctgtaggcccggagtatggggccttcggggtcccggtcaagtccctgtgccactcggcaagccagagcctgcctgccatgccggtgcccatcaagcccacgcctgcgctgccgcccgtgtccgcgctgcagccggggctcactgtccccgcggcttcgcagcagcctccggcgccatccaccgtgtgctccgcggccgcggcctcgcccgttgcctctctgctggagcccacagcccctacctcggccgaaagcaagggcggctccttgcactcggtgctagtgcactcctaggggacccggcgggcgtggggagaccagcggggtgagagacgccgggcccggaaccgcccaaaccacccgacggggagagggcgccctggtcaggccgggcagagctggcgagtctcagcctttgctggaacggaaggtatttaaatagacgaacaaccccg

SEQ ID NO: 5317 - DNA, 704 bp, Homo sapiens
gcggaatgtgggcggggcgcagttggggagcttgcggggaatgtgggcggggcgcagtggtgggagggcgcaggagtgtgggcggggcgcagttgggggagggtgcagagacctgagggcttgaggttgcctggctggccccgctcccagaggcgggtgccgcgctgtcgcccaggtatctggggtctctggtgtctgagtgtctcattgtcggcgcgaacacaattgctccagccacaggcgaggcctggccaaggtgtgggcgcatctggggcaggtcttgagaggtccagcgcccggtggtgcggacagaggcggggcaccgcggcgctcgccgccgcctccccgcaggtgatcatcctcctgcaggtgtcctcgggtctcaggtggctgcgtgtctgcgccatggttgacattctgggcgagcggcacctggtgacctgtaagggcgcgacggtggaggccgaggcggcgctgcagaacaaggtggtggcactgtacttcgcggcggcccggtgcgcgccgagccgcgacttcacgccgctgctctgcgacttctatacggcgctggtggccgaggcgcggcggcccgcgcccttcgaagtggtcttcgtgtcagccgacggcagctcccaggagatgctggacttcatgcgcgagctgcatggcgcctggctggcgctgcccttccacgacccctaccg

SEQ ID NO: 5318 - DNA, 950 bp, Homo sapiens
ccgggacggagcgggccacccgagtggtaaaccttttcccaatggatgcgggaaaagcgcatttgtagttccctcctcaccgctgtcaagcgagctgattgctaaggagtgcgcatttgcttgcctctaacgtgacagtcgcgggagcgccccgcaccccgggcttcagggaatgaaggagtctgccccgaactggccccagaacccccagcccccagggcggcccgcgcccgcacccaccttgaccacgtaggtgactccgggccccagcacctggtcgctggcgtgcggcgccccccgagggggcctgggcagcggctcgtcgccgggccggcccttcctggcggcgctcatggccggggcgcggggcgccgagggcgcactgccgtccggggcggccaggctgggcgcgctgcagctgcccgagagccgcgcgcccgcccgctcccgggcggccgacgacaggccgcggaggcccgagctggagagtttcaggtgggacaccttgtggagcaggtggcccaggctgccgggcccatcgtcgggcgccttgcgcagcgcctcgccggacaccaagtagggagccgccgccggggtcgcgcgcgccgccgaaaccttgcctccgccgccgctcaccgacaggctgtggagaaggtcatcgaccgatgtcaccgagtcattcctgaagcggttatacttggtgcgtggaagcatgcccctccgtgggctcgctgcatccgcccgggcgctgctggtgccggccccggcgcgggctgccgcgcatagcaggcgagccactgtccccggagcgggacggagagtgggggccccgggacagccttctggagaacgagagcagagcaagaggatggtgccctcccaccgttaaaagccagcacagcggcggccgcgcagccccggcccgggagaccgctgcttggggttgcacg

SEQ ID NO: 5319 - DNA, 4861 bp, Homo sapiens
gcgccgccgccctgagtatcctgcggaaaatgtgagaactctggggagccattgctgctgcaaggacccgcgggcgggctaccgcgctggtgggggggctctgtccaaaccttgcgtcctcgacttcccatccgcctcataaagggttggtgaagaccatctcaaggaccgcacgaactggtccttcaagtcccaggaaaccgaaacaacaaccgaggcggctctctgtccgggccacttccggagcgagctctgcggcggacctctggctcccgctcctttgggcacccgcggtgcggccagaccgctcctgccagcgactctctggctggcaagggagaggaggtggagttcagactggcccctcacgcccagagtggaagcgattcctaggatcctgcagccaccgagccgcccgccgtgcctagcccgggcttgatggtgaagagcacagctgccttcgacagagccggaggaaaggaagtttaagaagcaactgcccgcgttccgcttatcttgccgagcccacccccacccccaccctcaccccctgcggattcagaagctgctccaccgagcccgattgtgtcataaaatattttattggaaaaaaagtcaccgtcttcgcaagagggggtaggggccccagcgacatcggggacccggcctccaggccgagccgacgggttgccccggggcaatctcaggccgttgtggcctgagcccaaccgctgggtccccgacgtccagaagcgggtgtgtgcctggaggctccccggccgggagggcaggccccagacggggtgggggtgcaggcgaggagcggggcgtgaatacgcgtggagcgctctgcgccacggagctcagggtagagactgtagcttccgccgggctggatgcgagtctcccaggttagagcccagaagcgcgctgggacctgggtctggcttttgggtctgtgtccttcctcgtttggccccaattgtccgcattcaagatcataataaaaaggcttaggaagtaaacttcttggacgcggaagggccggctcgcgggtttccgccgagtgagggggctgcgggtggcgcgggcatcccaggccccgcaccgtataccgccctcagtcctcgcggctcctgtcgctgggctcgcccggcacctccgccggtttctctgcatccttggcgcgctcctgctcagtaagctgctcgctcgttggaattgagttcttcttgggccgccccttgggcttggtgggagactccaggccgccgccctgcagcacctgcacgggggaccgccagcacctgggtgagccagcacgtggactggggacccccgaggagacttgaacccaggtaggactaaggagtgcagggtccatatgaggaaatggtggggaaatgtcccgggaaatggcggccatttgtccaaatgccgcctggggagcggcccggcctggggagcataagactgccaggaggcctgaaggtgccgcgggaaaggacgaaatgttggcttacccaaggggcagaaaaaactgagaggattccggtgcgtaccaggcaccgagggaatcggggggttgggcagagtctcagtggggagaaagaggagagcagctctgcatgcaccggggcatggcccaggaagctgaggggtgggaagccaccaggcacactcactattttcttccacttcatcctccgattctggtaccacgtcttcacctgcaactggctcaggcccagggactcagcaagatctattctggaaagagcagggcgcaccctcagcaaggcaagtgaccacactcccacagcccgctggccccagccttgtaccgccctacctgtccggcgtggaaaggtacttctgcttctcgaagcgtttctccaggcccatcagctgcagctcggtgaacacagtgcggctccgacgccccttcttggctttggtgcctggctccccagggcctgccgcctccagcttcccgcggagctgcaactcgagcggcaggtgtggcgcacccgcggcgccgggcagcccgggccctgccgccagcaacgcagagctcagccctgaacagcccagcggcgccagtgggaacttgaacaccgccgcctgctcggccttcagcacggctgcgaagaaagagaatgaggacccgggtgagctacggccgcgctcctctgccccagggactgccgcaccacgtgccgcgggggtgctcgcgcttggccagtgcctcccagcgcaaaacctccacgccctgccggtcggcgccggtggcgcagatggagaccctcctcaacgttgccgttccccagatttgggagggagtatctcctcgaccctgtccgtgttctgtcctggagttccccaggcctcagctgcctctgagatctcggggttcctgatgaacatgtttgcagctgcgagaaactcggagtgtgtcttgtctttcggggaaagtagaaaccaaaaagaaaacggcagctggtcctaagaagatggcgtttgctccaaccaaatcagccttgctgcgttagaaaaagaacatgcacggagcgtgcacatttgctcttccgtgcgtggcacaacagccatgcggtggccaggagtcatctgggccggagttgggtgcttcccggaaattccaaagtaccctgagaacctggaaattattgttcacgttttctattttcagacgcttccccatgcagatgtttccattttcttcagtcctaaaatgattgtgtgcccgcttcaaacgaattagtagcaacagagcagatggagacgaaaggtagccgaatggccgagtcccagctggacttagaaggagcgcgctggccctgccgtctccaggctagggagcaccgactaggaggtgggggggtgcagggaaggcgacttgaagggctggggtcccggctacagcgtaggagcctcccttccccgacaggcctgtcactgaggtgcgagtcctagcctggctggagtcggaaagggcagggcaaggcgcaggtaaatgtggggcagaggacccgtagggaaaaggtgggagatgggaggcaggccgaccccaatgagagaagcgagggaggccgaccggcagacggttggaaagcgagatagggaaagacaagacgagggtggagtgcgatggagacagcaccatcagggcagagcaggccccgccaaattagaagaaagggcagaagctgaaaaggtctgcgcaggccgttcaagccctgcagaggcccagccgacctgaaaccagaagggacagccaggcagctgctcacagtcaggcctctggccccaaggcaaggccgaagcaggtccgcactgcggccaaggccgcgttcctcgcccgctggagctcccggggactccgggccggcttgggcccgcgtcagcacccagccctcgggagcgcaggcctcctccccagaggtccgacttccctgggttgggcagccgcggccactcccggccatccctctgcggcgaagcccaggcgcccgtggcctgaggtcgcttccacccacgagagtccgtagcctggcagtgcgcctgcactggggatgctcactcggggtccccgggctggaggccgaagggaagcagtgaaggaaagagcgaacaccctccccgggcggcccgcgggcacgaggcctggtttctgtgaggcctggagcttgcaccctccgcctcccgcctggagggctccgagagacggtcccagaacctgcgctcccagagcagcttcccggggctgcttcgatgccggaggaggctcggggcgcccccgcggttcagctcgctgtctcccgccaagcccggcccgcgaccccgcggccgccacacgtacccaggtggctgtggaagggccgcgccgccagcagcgcctgcacgccgaacttcagcagctcgcccgccgcggcagcggcggctgcgggcgcggcgcccttgggcccgggtggctccgtgaggatctcctcaatcatgaagctgcgatagcggtgcggccggtggtccgcgcagccctcgggcgggccgaagcgcgcggcgcccggctcccccggccgctgcatcgcggcgcccactgctgcgcccgcggtttggcggcggcggcggcgacggcttggctccggcgcggggcccgcgcggggctctaggccggcccgcagctcggggcggcgcgcgggcgccggctcatgccccctcccccgccggccggccgggcggaggcgcagggcgcgggcggggcgcgcggggctcggccggtcgaacccgggactgcgccccctccccacgccgccgcgcctcttgcccggccagccccgcgtcaccgccccgccccgccccgccccgcgccgccgcccccaacccctaggctgagccggagggagggacccagaagggagggaggcggaagggaggccaaaaaggagggggccacgtgaaagaggccggccgaccgagaccgagggagactgagcggagcgcacgccctggaaggagagagccggagagttcgggaggcaagacccccagagacgagagtcggagggatcaaacgacacaggtgagagaaggggcagaggcagacggcgtgggccaaacaagattccagacagtgatgtgagggcaccagagacgccaccgagatgtgcgcagagagaccaaaagaggcgtgagagccagcgggctgtgacgtgacggagggcacagaggcaggcggggcagaggaagggggcggtaaagaaatgggaacagctagaaaaccggcggcttgatcggcttttaggtagccccggaaaggtcgggaggaggaggggcaaaggccgcg

SEQ ID NO: 5320 - DNA, 999 bp, Homo sapiens
gcgtaacggcctgtttgcgctccctgcggttacagccgacacacgctcgcagacgcacgcacggacaccccgctttccaccagcgcacgaagacgggacgcgcgctcacagccccagggctcggccctgcaccacgagctaacgcgcggtccccagggaggtggcgcagaaggcatggcgcctctgcccacggcgtcccggtcctggtagtccctatagagaccttcgttgatggcccaggtctaaaaggctttttcctccgagcctgcgttcctccagccttcccgctgggccagggctcaccatccttcctcgccggcgagcgtgggcctccctggaggcgggggtggccctgcagaggcagccccaggtgcgcgctggagaggccggcccgccgcgcgggagacactctttccaaagtggaagcgctgcgtgggcagcagcgcgggccgggccctcggatcccagtctctgttgctcccgagacccccgccccgcgccgcatcctccgagctcagcgccctcgggctgcgctgggcgcagtggctcccggtcagggcgcagtcggcctgggcgctagagcccctctcagctcccggcctagggcggggaagcgccagctcccgcagcccctgtgaaaggtcccctgtgcctcctgcctaggtgcgcgctgtggcatctctggccagaagcacctttggcggcctgttgggcccctcgcagcctctggctgagactctgccgccggcgctaacgggctgcgcccgcgctcccgctctgtccccgcccgggtcccgggctccgcgtgcacaccactccttggccttttccaccaaaacttcctgatctccagttcgatgctgtcgtcgcggttcccggaactgctgtcttcagacggcgagccggggctgggagcggccctcacggggacggactccctccggaggcggaggtggttctcctgacgcgaaaggcaggggcgcgccccggctcccagcg

SEQ ID NO: 5321 - DNA, 1750 bp, Homo sapiens
tcgcggctccagggcccggcgacctccaaggcccccgcctcaggcgctgcgggcaaacagggcctgggggccccctcccaccgcgggctgagcccccgctacctgtcctttctgtcgcgggcatccaagtcccggaacctgcgagtcaggcagcgctccacctccgcggcgtcgcccttgatggccaccctgtggatcttccgcagttcccagtccccgatgtggtacccccgacccgcgtactcttggtccatggagctcaggagcgcctggcccaggcgtctcccgaaactgaagagtttcctcatggtggcgacttctcagacgccaaccacccgctactgagccgccgcggctcctcgtggcctttccaccccgaccaagttccaaatccgcgatccccctccccaccccgctatccacccctaaatccaagatccaccaccaaaccagcaatccacccccaaacccaagatccacccccaaccccgcgatgtagctcagaatccgcgatccagcccggtccaccacagccttcagcagcgacactcgcagcctccgacctctcagaccgagtgagcttaactaagccgttactcgcgtgccagcagttgggcgctccgacctctcagaccgcgtgagcccagcaaagcggttaggcgcgcgcctgcagctcggcgctagcccggactccgggagccgctctcgagctcgcgtggacggcagagggcggctgcagctcgggcgcaggcgccgctggcttgcgggttctcctgggctcgcgcaggacatcccggaatcgcaggcgcgcatcccttcccgcctgagggcccgcctggccgtgactcccgctcctctcctcctccgaagagagatggggccgctggcaggggctctccgcagccaccggggatggggctgagggtcggttcctgccccggtgcagccgccgcgggcagaccgcctggcttggccgcagccacagcgacatctagccccggttctgcgaggctgggcgcgccagccagcttgggagttgcctggcgcctgtagctgggcgcccaggtggtggagcatggcctgggcggcctctggatcgcgagtgcccctggcctgagagcccgccagaccctgcccccacccggctcctcctctgccagagctcgagacctctagccaggggccctctgcaaccaccggggatggggctgagggccggttcccgcccctgtgcagctgctgcaggacagaccgcctggcttggccgcagccacagggacatctggccctggttctgagatgtggggagtgcgggcgggctcgagagttgcctggaggctgctgcctgcacacagaaggcggctgcagcttgggtgcccaggcgggctggaggtgcatggcctggtcggcctcgggatcgccagcgcgcccagcctgagggcccccaggtcgtgcctcccgcccactcctccacctgagggggattggggccgctggcatgggcactcggcagtcaccccgtgtggggttgagcggcgggttctcggttctgctcctgtgcagccgccgctgggcagaatgcctggcttggctgcagccactgggacacctggccctggttctgcgatgctgggagcgcgagcgggctcggaggttgccaggcagctgctgcctgcacacagagggcgactgcagcttgggcgcccaggcggcggagcatggtctgggtggcctctggaatgcgtgcgcg

SEQ ID NO: 5322 - DNA, 391 bp, Homo sapiens
gcgcaggtcgtagaactcccccgcgaaggtgccgtaggaggagtcgtggcgcggcaccgcctcgtcggcgcccgtgtccccccgcgcgcgtccccggggtccccggccccccgggcccgcaccgtcgtccgcggggctggctgcgcaggcggcgggccccgtcagtagcagcaggagcagcgacgcccagacccccgggtgctgccggggcggccgcgccatccgtgcgcacagatcccgcagccaggccgctcgggccgcagcgggggcgccgcgggcgcgggccgggactgagcctccgccgaggccaccagcacgcgcccgcgcagccgcggagcctcccgcacccccgcctccctgcctcggtctgcgcatcctcgctccagcaccg

SEQ ID NO: 5323 - DNA, 817 bp, Homo sapiens
ccgggatagagacgggcaggcagcggtgggtcgaagggcccggggactagggcccgggtcgggaggggcgggcgccttaccgcggcttgctggaaggcgcccttggtgtaggtgccgccacctcggtaggagatggcagggatctcttggaggagcagcgcgcacttgtgctggcgcgcgcggcgggtggagatgtaatcgacgcgcggcaccacgtagttcttggacgagaaggtcacgatggccacgcgcgtggccgtgggcaccacggggaagtcggacagcagcttgcggacgaacatgagctcgctgcggaagttgacttcgcccacgctggacgaatcatccaccaggaagacaagctccaggcgctcgctgagctcccgcagcagccgcacgcgtcgccggaacgcctggcccagccgctccactctgctccccgccgcttcgtcgccaggagcgggcggcgcggggatactcccgggggccccgggcgcggtctcggggaagaggcggaagctgaaattgcgcgacggggacatctgctgaaaggtcgcccagcccgaaacgagcgccagaccccagcaacaaaaggccaggcgaggccacatcgcgctggagacagagcggctgccccggagcgcaggcggcggctcgggcgggaagaggcgctgggcggccggactcgcagaggggcgtgcgcggagctgggcgcggggcagcggccaagagcctcagcgccctttcatctgacactggggacagacacaatccagactcctcagcagctcgggaactccggagggaacggcgcgcg

SEQ ID NO: 5324 - DNA, 814 bp, Homo sapiens
gcgaagaaagtcgaggcgccgaggctcccaaagctggcagctccgggtggcggtgcaggggcgaagggggggcggggggaaccgtcggacatgcggctctggagttgggtgctgcacctggggctgctgagcgccgcgctgggctgcgggctggccgagcgtccccgccgggcccggagagacccgcgggccggccgacccccgcgccccgccgccggcccggccacctgcgccacccgggcggcccgcggccgccgcgcctcgccgccgccgccgccgccgccgggcggtgcctgggaagccgtgcgcgtcccccggcggcggcagcagcgggaggcgaggggcgccaccgaggagccgagcccgccgagccgggcgctctatttcagcgggcgaggcgagcagctgcgcctccgggccgacctcgagctgccccgggacgcgttcacgctgcaagtgtggctgcgagcggaggggggccagaggtctccggcagtgatcacaggtaggtgagggcgcctcggcgggcgctgcaccgtccctgcggccccagaggctcgcgggtgtctgggcgcgggtggcgggcgggtcgggggcttgcgggcgtgtctgtgcgagagctgccccgcgagcggcgcagagacatccgggcgagctgagagcctcactttgctccatcggtggaatgggcacactcggaaggcgtagctgctccatccctgggaggaacctggggagccctcctggcggccccgcggaccctcggccagtgagggctggttcccggagcctagggcacgtaacccgtgctccg

SEQ ID NO: 5325 - DNA, 1429 bp, Homo sapiens
gcgcgcacaatgaagtagttgcctgcagcgtcaattagttggcgattctgaggttattgcgtggccctgctttggccgcctctaataacgggacagagcgccgggcaccgcgcactgatcaatcaccctccttccgcggccgcccggctccctcccctctcccccgccgggtctggcctcactttctccgggcggcttgcgcttcctccctccgcggccccggctccgtggcgccggcagccccgggagccccgggaagtttgcgcgcggcagctccgcagccggcagccgggagccccgcagccttcggggagcgccggggctggtggcccctttgttggaggaggcgtggagggagcgcttttgttctgagttagtcacggtggccggctggaggctgctacctcattatgcgccgggtctgcttgtctgcgaggaagcagatggtggggaggtaggcagcggcgagagtggccagacctgaattccgttcacctgtcacctcccacaaaaggcaggttcgggggacttaggcattcgttgccactttctgggggagggggaggtcgaggggccgccgtttccggcgcctgcgaaggttccgtacctgtcggtgcccgctccccccaccccttgcctttcccttggctgcagcttctcgcaccgcgtaaatgtcactcacgtgtcaggatgtgtgtttacagcctgttcctctgcttgtttagtctcggcggacagggctcagcggttgcgcgacgttccccgccgctgggggagattagcaaagttacccgcctctggaccccggggcctgggcccctagatcccgccccgcggcgggagatgcgtttgagccttttacagacggagcgcgtcccagcctgacgcagagggatgaatagacaagcgcaccgggcgggaatcccgactgcctgtgtatctggggtcggcccagcgttggacgtgggctgctggtccgagaggtggcgacggaatcgcgtgcctatatgtatgggggagtggaaagtcgcagggtgtgtttccacgtttcttgagcagcccgcggcaagagttgctgagtaccccaccccccgcccccagatcctaaggcagcccctcgagctttccaaacgtattgtatccagccctcccgagagtggagttgcaccaaggacaaacactctagcgtcattacaaattttttctgccccttgggcgacctccagatgaaccctggtgactctcagattggattttcattccttactttctttgaaagaaagtgccccagatgcgtcaataaaacatgcctatgtattcgtgtaggcgtccgcatgcctgcgcgccggccgtgtgcaggcgccgaagcacacgtctgtgtgaacacacgggcacgcgcgtctttgggtttagtggtccttccctcgcg

SEQ ID NO: 5326 - DNA, 7708 bp, Homo sapiens
ccgggaagagcgagaagctacacgctgggctgcagattgggccctagcgggcttggagcgtggatatgctggctggcccccctccccgggagtcacagctctcgccggtctcgccactcaggctctgccgggtacccaggaggcttgcacggccgcctgcagcccgctgtgcagagcccgggccgaaggcggagctcgatgggaaacggccggccgaaggctcttgcaactctgccacaggcctgccttcccgggcctcccaggcgggtgcctgaggccgcggctccaggccgaggggagaccgcagtgagacgagcatccccttgctgcgccttcttaggatagagggtttaattttcctttctgaagatatcgcaggaagctgttcgtatcttaaaaactccaaaccccgcgctctccctcctccctgcctcccccccacccccgccctccagcctcgcccaccagctcccaccatctcgactctcctctgctcctcttgcctctcccctccctcttgggtctcccgccttcccggagcacgcgctgccagggcctggggcgccgagcggccaatggcacggcggcaggacgtgatgtcaggcgcggctgtagaaaaggcgcggaggcttgcgctggcgcggactgcagagccggggctgggctaggcgcgcgcttggagagcattgcgcgcggctgggcccgcggccggcggctcctcctcccactctgctcctcctcttttttctcctcctccacctcctcctccgcctcctcctcctcctcttcctcctcctcttcaattctcccggtggctcgactcggctcgcaggcttcggagaaacccctactccagtcgccgactcagcgcccaagagggtcgccttgggctgggggcgcaccccagggaggggaggggtccaggcagctgggccgccgcggacacctagcggcttcagggtgaaccccgaccgcagccgtcgccgcctcgggcagagtttgcgcccttgctttgcgccccgggcgctgaagccgggcgggcgatgcccgcggcgtgaaagcgcccgcggcgggcgccgacctctgtcctagtctcctgctccccccgccccgcttgtcccgtgcccttgtgaccctggctttggcgccgtcgcccaggcgccccgcaatgtagctgcccctgcgcctcggcgggaggcgtcctgccccgcgagcgcccggggcccggagcccggcctgggggctcagccgagctcgggcggggccggggccgcggtggcgatgcaccgggcccgttagcgccaggagcgccaggcagctgaggcggggggcaagccctccctcggaggagccgcgcccccggccccgccggtcccgccgcgatgctgttccacagtctgtcgggccccgaggtgcacggggtcatcgacgagatggaccgcagggccaagagcgaggctcccgccatcagctccgccatcgaccgcggcgacaccgagacggtaggcgcgcggctgtggggtcggggctgagagctgggatggggccgggccagtcagcgcctctgctccccgaagtttggggagcgtccttcgtgccgcacgggactgggtgctggggatcctcggtcagaatgcaaggccggtggctcccggttcgggggaaacccggctgctgggacgcagaagggaaacaaggttgaaaccgaaatctcggccctgggggtagaggagagcgtttcttccgaactggaagcgaagtcccatccgcggcccggggcggctcccttctcaccttgcccggtgccggggtcgacagccccgcgctctcctccacctctcggctccggttgctggcggcgccgcgagcggcgccagggaagggcgaaccagctgggagcattggggctccagccggcttgggccgctcccagctttccggcaatcggggatcctcctcaacccccagcgcagtttcagaggccgaagtcttcggggccaacatttgtcgttgatcgcgtccccagacccttgactggtcagacttagccaggccagggctgggagttcaggctccggcctggccctcgccgaaggagactccatttggatctctacacctggctccgcgggcccagccccaaatagccagttcctcgcctcaggcctccctgggggccagacgagcagacactgcccgaccagcgggcccagaagtgacctttaggaggccgcggaggtggggagcacgggagaagcttctctgctccgggagcaggagcagcggcgccagtgtcctcccggcctctgagcgcttcttcggttagaccttctctgctggtcagtttggatagggaagtatttgggttgaacctgtccttcacccacggactttgagggtgtccctgcaccccacttacctcatccccggacccaagagggccccagcccgtgtggcagaggagccagaagttggctgacttgtcctggccttaacctctggtctaaggatccagggatcactggagctggggcccaggaactccgctgtctctccaaagaggattctgtgtggagggtgacttaatggtcaccttatcccccgggtggctcatttaagaagcagtttagggaaagctcttggagggcttgactggagtagctgtcctggtccctaaacacagcccgagcattttgggggaaaggacagggaggactggaaggaagagaggtaagcaccagagccatttaggccaggagcccggcctgggcccgtggctggcgagggctgcgcaggcaggcctgggttctgaaccgcccagaaatggaaatgggccttttggggtggggggaagcgcgccgcatgtcctggcagccccctccgcgttcagggtagccaaggccacagagggagttgtgggtgccggtttcccggcggcggaggggccgctggctgacgcaggcgctgctgtcttccgcctccctcccttcgcagaccatgccgtccatcagcagtgaccgcgccgcgctgtgcgccggctgcgggggcaagatctcggaccgctactacctgctggcggtggacaagcagtggcacatgcgctgcctcaagtgctgcgagtgcaagctcaacctggagtcggagctcacctgtttcagcaaggacggtagcatctactgcaaggaagactactacaggtagcccccccacccaactgcccctcaggacccctccccccaatctcaggcacagtcttacagtttggccctctcctttccgtttagtcccaggagagggttcactactcaggactcccccgctccccccccaagttctccaagccaccacaagttgggtgataaccttttaaagcagcaatttggggagctcttggaaaggtctacgaagtaggagaaccagaaaaaaagcagaagctgccctcctgctcggagcttagaccacaaaaaagcttgagttgggatccttgctcccctctctctttgaagtttcttgagttaatccgaggttatagaaacaggcacccccaaacctaggcagcccaagctggagtgaaacacagctggaaagagagctgtgggagtgggtgcatttccaggtcttttgagaaaatgggaatgaaaggtggccaagatcaaagaaccagaatcactagtagactccaagttctctgtttctccttctccccagttttaggattagggtctatgtatattctctctgtctctgtctctacgtctgtgtctctctctctttccctgtctctgtgtttcttccaaattataaaagtcagtaggattcccaggcgctggtttggagggaggagtaaaggttgaggagggggtaagtggtaagtgtctccctccactcccaggtaaaggctttcctagggcttgcggagactctgggtgaagtagaagtctctgtaggcataagtgtgttaagggaaactattttaggacaggaccaggcctgggtcaaaatctagttctctctcccccccatcctccaaataaaggccgggttgttcgtcttgaggaggggattgccccccgcagcagcagcggcacctggaggaggaaaaggggggtacccaaccgtgtgttcccacagcccctccctccatggtccctacaggcgcttctctgtgcagcgctgcgcccgctgccacctgggcatctcggcctcggagatggtgatgcgcgctcgggacttggtttatcacctcaactgcttcacgtgcaccacgtgtaacaagatgctgaccacgggcgaccacttcggcatgaaggacagcctggtctactgccgcttgcacttcgaggcgctgctgcagggcgagtaccccgcacacttcaaccatgccgacgtggcagcggcggccgctgcagccgcggcggccaagagcgcggggctgggcgcagcaggggccaaccctctgggtcttccctactacaatggcgtgggcactgtgcagaaggggcggccgaggaaacgtaagagcccgggccccggtgcggatctggcggcctacaacgctggtgagtgcgcggcgcacgaagcgcccccatagggttgggggaaagtgtgcggcctcgacggccgggagctggattgaatctctgtgtgctgggcaaatagcgagccttaagcaccggacggcctcgcagaagggacattagccccctgggcttccagactgtgcgtcctcggctggagcgggaggagagggtgcagtggtcccttgctgctccgggtgcagggccttgtctctgataaattgtttttttggagatggctttttggtttgggcctttgccccactttgctaggcaggaagtggcagggatggagaaagcaaggcggcgctgacgccaaacaggttttgggttggcgcggctgagggccgggaactggggcagcgaaggaacgaggcagggcggcgagggtcccaagagaaagggctggctgtggcccggggcgccgagctcggcctggagtgcggcctgacctcgtgaaatgtcccaagggcggcaggcttggggaactcgggcttggggaactcaggaaagcaaaggctgcggttccttttgctcggcccgatcctcctttaaagacaggtctcagttttcccggactttttcctccgagtttcctggcgcctgctggggtgagggccgtgaccctcggaagcgagccccccgggcggggacgagaccggagcaggcctggcctcgcgccggggtggggtggggtggggtgaggtggggggcttggttcggatttccggcatctttgaaccccaggccattcccggagaagctctgccccctcccgcgcccctccctgctcaggacagctgcagaggttctgagttccggcaaatgagccgtcaacatctgcccgaagtctgcaaggcccggaaaggtttatgactctccgggcttccgaactagagtttatgtgcaattattttctttctttcgtttgcaacagaattagatttggagattttgtgttcttcttccttttccctttagtctaatgcacaagcagaaaaaagcaaaaacaaaaacaaacccaagactgtgcagagggtgctacggcgggaagaagtcagttattttcatcttaaagaatctgagttgaatagagagggaaatgaggggcgggtgttcgctccaacgaaatcgcttggaggatcatggggcgtgtgtccctgtgtgcggaactgggaggaaaacgcagcccccagtttggtaaatggtgaagcagcggtaggccggtcggtggcgcggatttaagatttgctgaaggcactaccacagatgtagctctctggaacttccatccctcctctcctaccaccccccaaaaaaagacaaaaccgagttcagaccggctcccccaacaccaagccgcttctatttatcaagtgggtcaacttccactcggaagcacctcgcggggctcggctccagggcacctggtggctggggagctgtattgttttcctgggcacggaggttcggcgccggttttaggattgtgcaaaaagagagtagaaggtacagagatttatttctgctttttgctgttcagccgccgtttgccccagcgaggtgggctggaggctgaatttcaagccttgtttaacctctacaagagacaccctccattcagccatctcactttctctctggcctccctctctctttttttcctttccgttctctccgtcctttctctctatctctgtctctgtgtgtgtcgtgtttgttcccgtgccctcctctccgaccttggccggggctcctagtcctgagagaaacggcgttcggtgcgccggcggtggctatgcggctggctctttcggggctcccgggactaggttggggaaagagggcatctccccggcctctcggggcccagcccagtcttcctagatctggcgtccgcccttccctcccctcccgcactggcaggagagaaatggccgcagtgtgggccgcggggcagctaggactggaaagcggggaccctggagggtgcgatcgcggacggggtgtgcgggcgcgggtcgtgtgcgtgtgcgtgcagggttccgaccacggggacacgagcttgtttgtggcagtgtcccacatcctgtggcccagccacgacgaccccttgcaaagcctcttgctctggggacagtccctccgaggcgcggcggcaccttactgaagggcggcgagctgggggccgagtggggagggggcgccgtcggggcgccgggcgctgggcttacagcagagccgcgggccgcggggtcggaaagtccttccggggcggggccgcagcggcctcttcccgcagcccctcgggcccgggccccggtggaacggaaacctccccctaccccgggaggggctgccagcgggctgggggtgcgaaaacggcggcaggagcgggcgaggggcccgggccgcgcactttgcgcctgggtttgcgcgccgcggccgcgggagtcccgcgcggaccggccggacgcccggcctcccccagccccagctttttgtgtgtgtgtgcctggcggcgtaattactgatttgattccaatccattatttagacaattgaacctacaatctcgtctttagtaaaatgaggcgaagtcagatttgattacaggttcagtcccagcgacaagagctcgaaacccgatgggttaataacagatcacgagtaaattattcatgattttacgagctctttagctccattgaatcggcctaattgagaggaaaaaaaaaaaaaaggagagagaaagcccgggtcctccccctcccctcggcccctcgctcctccccggatccgatcctggggaatctcgacccgcccccgggcactgggggcgggagtgagggggttcggggcgccggccaaacctgggccccacggctgcctcccccgccgccgccccctgcccttgcctctggccggcctcggcctcgctacttagggccggctcctttccctttttctccactccccttctttccccttttctctactcccccgccaataacggcttcggaaaaggcctcccccgcagggaccgggtctcccggagccccgggattcagctcggccaccggaccctcgccacaagctgcgcctgtttccgggactcgctttcccctccg

SEQ ID NO: 5327 - DNA, 3969 bp, Homo sapiens
ccgggagtgtgggtgtcccgggggcgtgggtgtcccaggagtgtgggtgtcccgggggcgtgggtgtcccgggagtgtgggtgtcccgggggcgtgggtgtcccgggagtgtgggtgtcccggaggcgagggtgtcccgggagtgtgggtgtcccgggggagtgggtgtcccgggagtgtgggtgtcccggaggcgagggtgtcccgggagtgtgggtgtcccgggggcgtgggtgtcccgggagtgtgggtgtcccgggggagtgggtgtcccgggagtgtgggtgtcccggaggcgagggtgtcccgggagtgtgggtgtcccgggggagtgggtgtcccgggagtgtgggtgtcccggaggcgagggtgtcccgggagtgtgggtgtcccgggggcgtgggtgtcccgggagcgtgggtgtcccgggggcgtgggtgtcccgggagtgtgggtgtcccgggggcgtgggtgtcccgggagtgtgggtgtcccgggggcgtgggtgtcccgggagtgtgggtgtcccgggagtgtgggtgttccggaggcgagggtgtcccgggagtgtgcgtgtcccgggggcgtgggtgtcccgggggcgtgggtgtcccgggggcgtgggtgttccggaggcgagggtatcccagaagtgtgagtgtcccaggggcgtgggtgtcccgggggtgtgggtgtcccgggggcgtgggtgtcccgggagtgtgggtgttccggaggtgagggtgtcccgggagtgtgggtgttccggaggcgagggtgtcccgggagtgtgggtgtcccgggggcgtgggtgtcccgggagtgtgggtgttccggaggtgagggtgtcccgggagtgtgggtgttccggaggcgagggtgtcccgggagtgtgggtgtcccaggggcgtgggtgtcccgggagtgtgggtgttccggaggcgagggtgtcccgggagtgtgggtgttccggaggcgagggtgtcccgggagtgtgggtgtcccgggggcgtgggtgtcccgggggttgtgggtgtcccgggagtgtgggtgttccggaggcgagggtgtcccgggagtgtgggtgttccggaggcgagggtgtcccgggagtgtgggtgtcccgggggtgtgggtgtcccgggggtgtgggtgtcccgggagtgtgggtgtcccgggggagtgggtgtcccgggagtgtgggtgttccggaggcgagggtgtcccaggagcgtgggtgtcccggaggcgagggtgtcccgggagcgtgggtgtcccgggggcgtgggtgtcccgggagtgtgggtgtcccgggggagtgggtgtcccgggagtgtgggtgtcccggaggcgagggtgtcccaggagtgtgggtgtcccgggggcgtgggtgtcccgggagtgtgggtgttccagaggcgagggtatcccagaagtgtgagtgtcccgggggtgtgggtgtcccgggggtcgtgggtgtcccgggagtgtgggtgttccagaggcgagggtgtcccgggagtgtgggtgtcccaggggtgtgggtgtcccgggggcgtgggtgtcccgggagtgtgggtgtcccgggggagtgggtgtcccgggagtgtgggtgttccggaggcgagggtgtcccgggagtgtgggtgttccggaggcgagggtgtcccgggagcgtgggtgtcccgggggcgtgggtgtcccgggagcgtgggtgtcccaggggtgtgggtgtcccgggggcgtgggtgtcccgggagtgtgggtgtcccgggggagtggatgtcccgggagtgtgggtgttccggaggcgagggtgtcccgggagtgtgggtgttccggaggcgagggtgtcccgggagtgtgggtgtcccgggggcgtgggtgtcccgggagtgtgggtgtcccgggggcgtgggtatcccagaagtgtgagtgtcccaggggcgtgggtgtccggggggcgtgggtgtcccgggggtgtgggtgtcccgggggtcgtgggtgtcccgggagcgtgggtgtcggggactgcagggacatgggcctcccctcccactcctgccgcccagggcacctcctgtgaggactcggagtccgtgagttcccacctccttgagcccgattctttggtgtccccgcctgcatcctcagcctccttccaaaccagaccagttctctaggggcgtcgacgtgtgaaactgattttaaagaaaacaggcagtggcctttctctcggccccacgtggcccagtagcgctcaccttccgtcccttcttccgcgctcagtaaccaatttaggccgctcctgcagaactcgggctcctgcccaccggcccacagcgtccacctgaggcctcgtcctcccagcaaaggtcgtccctccggaacgcgcctcctgcggcctctccagagcccctcccgcgcgtcctctcagccccgctcgcctcctcccggggcctccctctcccgcctgcccccaggcccgtctcccctcgcgggctgaggcaggttcgggcagcacggccgccccggggcgggggtcactctccaccaccgcgtggtgcccacagctcacggcgctcccgggtgacggtcccctcggctgtagggcgtcctgaagagcggcctgctcggagctgagcgcacggggttgcctcgccctgggcgtctctggccctcaccagccccgtcttcccatgggcaaaacggcggtcctgtttgtccacaagtaaccgtcggggttacggaggggccaggagctgcggcggggggctgtgctctcaggaccggccccaggaggatccgcgcgaggtctggagctctcaggggtcgcgggggacagaggggccccaagcggaggcggggaaggcggcagaagcccaggaccgccaagagctggcgaggaagcccggggctcgctgtcgggggagccgggcaggggccgcgcctcggaccaggacggaggcctggggaaggcggatctggccgccggagacgcggtgcgggtggagacgagggatttggatttccgcgggcggctgtacggatttccacgcgcggttcacgtgggccccagggggttgcccggcacccggggccgcgccgccttctcctcgccggcatcgacccgcagcctcacgtttacgcggcggcgcccgcagcccccttcggcccggcttccgcgcgtgcccccgagcgcgccctcgggatcagcccccggaagcagagaggccaggccgggaaggatgggcgacgggggtggctgacccgggagcacggcagggaggacacccagccaggcccgcgagcagcgccgctcccctcctccaggacgggcgggaacctgcgatgcccccgccgcgtgggccgtggggcggtctccgaggcactgggcggggcacgcggtgggcgcttcacggaactcgcatttcccagtcttcgtaacccaggaggaagcccacggcgtcctgcaccggcgccggcgcgccaacgcgttcctggaggagctgcggccgggctccctggagagggagtgcaaggaggagcagtgctccttcgaggaggcccgggagatcttcaaggacgcggagaggacggtgagcccagcctcggggcgccccgcgccgcggacactgcaggcggcggtgaaccaggccgcgtggggccgcctgcgtctctttggctgcggctgtgggcggcgaacacgcagcggcgcccgcgcggcgctttctgcgggggtcgctttccgcccggggtgactccgctttcctgggcgatgccccccacccccaggcacgcgctctccccgtgcggccgcaccgcgcatgccggttttcacatcagaaaatacgatttgcaaagcacacttagggtgtcccccttaacttcccaagggagtccccccagtccccgaagggtccagggcagcctgcgcatcgcagacgcgcgcggctcgcagaagggacg

SEQ ID NO: 5328 - DNA, 2490 bp, Homo sapiens
gcgtcccttccccgcccgaggcccacccagcgccagcgcccggttctcttgcagcgactgggccctaatgtcgcacgaggggccttcgcgaaggccaatggtactatcccctcagcccctctcccacccccaccccctaccccctcaggctgtggggggtcaggggtcgaggcccgcgcggcgcgcaccttccaggcgcatccccaccgtcaggcatttctggaagcggcagaagggacagcgcttgcgctgcgtcttgtcgatcttgcagctctggctctcggtgcacgtgtagtgcttgttgttctgcaccgtgcgcttgaagaagccctgcgggagctgagagtcagcgaggccccgcagcgcccgtctgccgcacccctgccgcgcgctcgccgctcaccttgcagctctcacacgtgagcagtccgtagtggtagccggacaccttgtccccgcacacggggcacagctcgtccaggtcctcgtcgtacgaatagtccatgcccgcggcgtccgcctgcggagggacagcgggtcagggagggccggcggagaccggcagcctggggtccccgcggccgccgccccagccgctgtcgccggcccgtcgcgtaatcccctctctgtgcccaggcgctgccgccggcacccaccgagcgccccgcgcagcgtcccggggtgggtccggtgcagtccccgcgcccggccttcccctgccaggccccacgctcccgccccgtccggggggctcctcccgcgcggaccccgtcgcgcccgatctggggccctcgggttcgatgcgcttcgattgggattcgtttgtctgagaacaaaaccccgattctgagaaaaagagatgggctcagccgcggggaagacgccaggggacccaggagcgctggggcgcccggcccgggtgttctgggaacccgacagagacgaaggaggcagagacagagtccgggggagccagagatgggaagaaactctggcgagagacaacgaccgacgccaccgggcgcagacacgaggccagtccgagagtgccagagacacagacactgagacgcccagctagagagaacccggcggggacgagacacagggagggatggagagagacagggagacagagagagagagagagagagagagagacgagagagagagagagagagagaaacgaggggtgggggattggatcagagactcggagagacagcggaggcccgaagagaaaacccaagagagactgacgcagagccagagacacaacgatagacgacagacagagacgccgagacgagaggagccccggagagacgaggccggggagctacagaaacacggagagaaaacctggaggcggaagcgcccagcccgagggtcggggacaggggacgcgcggaaacctgccgggcaggagcccaagcgccaaggcgaggccccgcagggtcggacccagacgggggcccgggccgcaggaggcggaaaacgacggcgccgggaccgagagcccgaaaacgcagagccgccgggaccccctccccgggggagacaaagccgcagcagcgacggcaacgggaggcgcagcccgagccgccgctgccaccgggacgtcgggcggggagacctcgggcgggggtcggcgggctccgggaagccgagcccgaggcgagggagcgacctcgggcggagaggcgaagtccggaggagggaagcgcgaagagccagggcccgggacgcgagagggggcgcgacggcggctgcggtcggcccggcgcccacctggtcgctcctgcgagcagcgccccgcgtcccgcccgcgcggagcccgcacctctcggccgcgccgccgccgccggcgaggagccgcacccgggcgcagcgccgcccgcccgcgatgacggccgctcgggccggggacggggaggcgggggcgcggggctggcggcgcgggggcctcggctcccccctcccgcctccccgccccccatcctgcctccctgttcccccccgcaccgccgccggggccgctccgaggcgcacctgggacccgggcccctcagccgccaccccgccctgcgccaacccgccgcgccggggccgggggccggcccctctatatcggcgcgtgcggtatccgggggcggaggcccggtcgtgtcctccccccaagcccggcccgcgccggcaccctctccgcagtccagctcgagtcttcgccctcatcctccaggccccccagccgcagcccggctccccggaccccgagcgcggccagagagctgcggagcccgagtgccccgcgatctgggcaggtatagggcagtgggggccttgggtcacccgcctgcagtgggaggaggcagctcctgtctgtgaacccagctgggtcgtggcgaatgccacgcgggtggctggtcgcactacagcgtggaagtgggtaagggcgagtggcgaccgtggccgaggctcggattcacg

SEQ ID NO: 5329 - DNA, 5370 bp, Homo sapiens
ccgtgctcgagggaggcgggtagcgcagaggagagggtgcaaggccctaagaagaggagcggggggactagggcggggctcaatggagctggggcgtccgcagactggaaggagccgggacccccgctccagagcctccctttccattctcgcttcttccagtgattccgagcccccgactcagtctttcccccaggtagagagaatccgaggctgtttctgccgctgaaatctgagcgggagagcatcccgaagccgcctgcgtggagcgagcagcccccgcgtcatgggccagaggcgcccgggagaatctgcgggtcacggatcacacccgcaggggcctggcggagcaaggtgccgttcgccgcctgcgggcaggagccggctctgggcctcggcccctgctgtgccgtccagtcggccgcttcttcgcttcttcggcaagggaagcggtggagaggcgcgggagccccgattgtgctggagagatctgggacccctgcgcgtctgcgtgcgaaggacccgagaccggccaactcagctgggagcacgggacacgaggagtgaggacaaagggcaaggaacggggcctatagggagggtgtgtgtgtgtgtgtgtgtgtgtgtgtgtgtgtgtgtgtgtgtgtgtgtgtgtgtgtgtgtagggggaatgaatggacagcggggaaggcatgcagaggggcccaaggggtgtggactcagcagccccaccccagaccagagaaggcagccaggctctggcgtccaccgagccagcgcccctatctgggcgcgggccgcatggcggcagaccaccctatatccgccttggtggcgtgggatatgactggcaggagcgcggaagaggcgctgagaatgcatgcgcacccggacagaccagacgcggcacggagggggtacttcccacaagtcctcctgccttgagaccaggccttcgagtggtccggggaatgcgcctctgggcacagccagcggccccagatcggcactggacgccaacccgagttagagaagcctgggagactggatcgcaggggccctcattcagccaaggagggggaaaggagagctgtagggtaggagaggccaggcacagggaaggtggggaggggatggagccttgcgccaggagttgggggtgcagggcctgtgacgagagagtattaccatgtgcaccctgaaggagagggagagggtctgggcctggaacgaggactctcgcctgcaggcagtcgcccagccccggttgcagggatggaccgcgaccagcagagggcagaaagtgcctggtccgcccgccggccccgagccgcgctccgcgcctcgggactctggctctgtgcgccgaagccttgcccgcccggcttctccctgcagcagccgcgcccccgccccagatgcccggagaaggcggctcaggcccagcccaacttcgcgggtccaggcctggggtttccaggtcaagcaaagaggggaccgagatgtgggagagaaactccacattgactgtccactctccccgacctagccacacaaaggcgcctagaaatacacgaaggcacaaagccccccaccacacacaaacacacacacacacacacacgctaggagacacgcgagcacacagaagcattcagaaccccggagataagcacagatacgcaaagctgacagagacacccatacagaaaaggatcgcagacacaacacagaggctgagacacgcacaaagacttaggcccccgcatgaaatgatgcggacacacaccccagacacaggcacgaaggacccacacattcacatacacacgggtgcaggggactcagacacagatccacagattcacccctgggagtctggaaggttgcagggacacacataccgtgtgtgcagagccaaggagcacacggaggcaagagccgcagaggcgggggcccgacacgcacagacacacacagatacccaccgacacacacgcaggtagggtagggcgggagcctctaatcctccacaaagccgggcccctccgcggggccccgcggcgcagggggccacttctgaccaagcctcccgcaggttccaaatccgatccgccctttcgcctccagcgaggtcaggggacccgccccccatgccctccgcccccgcccggctccgcgccgctgcctcgctccgggaggggccggggccgccccgcagcggatcgcggggggtcagcccgccgctaccccgggccgcaaccgcccccctgctccccggtgagccgcgcgtcggtggggaccacgggccgcagacagccggtccgacgctgtggcctctcgcaccggacgcgggtgccaggcccggctggcgcggaagtcggcagctccatctcgccagctttcgcgtcccgttgccgaggtccactttgcccaggctggctagagcactgtccttgatccgcgcgtcccagcgacccctggccgggcacccgacccgccaaaggaccccgatcttggcagccaacctaatttcttcagagccgctaccctggggccaccactccctcctagcgcccctcactgcaaaccctaggaggcccgggtcttgcccactgctcctgcccctgcccggggaccccttttccagccttagttgtcctctaaactctcggtcgcctgaacccaggcctgaccttccttgtcgtcccagtgtcccccattctcgatcccggggccccaacctcccatcggctcagtcccccgcccaatctctgccaggcccggagctttcccagacccctcacccacactccaggctcactccccgttcctgggcctgggccccccttgcacgagtccagggccagccgtcctcgccttctgcccgcccccgtccttcgttcctgggagccggccctctccgcggaccaagcggccccgagcaggcgccgccgcccgggggactccgactcagcccccgcgacctacctcggccgacagtcgggggttcccaagcggccactcccggccggcgccgtcccctggcggagccgccgcgctccctgccgtccgcgcagtctggcctcgctcggggccactcctcgtagcgctggagctttacaaaatattaataataaagaaggcagaggagaaaaaagaaagccttcgctccccaactcccaaatcaatttttcaagggggtggagcagagggatttgtttcgaagacgatcaaaacttctgcgaggggcccgcggggcggccgggccggggagccggggcctgagctcggggccaggcgcggcgcggggcgcgggccaggggcgcggagccccggggcgcgcgggggggcgggacggcactatttgacgtggagccggcggcgcatcccggcgcagggataccggccgcggggttcaaatgtcaggaagtttcgggaggtgaggcggcccgtatccctccgccgccagccccagctctaaacccggcggctcagcgggcgcaccatggcactggagtagcgcggggagcgcgcccggagccccgcggcccgctgcgccccgcccgggaccccgctgcgccgcgcgccccccccgcggcccgcggggccgcccctgcacccccaccccctcccccgcctgccgccgccgccaccgccaccgccgccgccgcctcctccccgcggctccgtctgcagcagccgccgccgccgggttccgggactgacaagcaggtgacagaggagccggcgcgcgtggctgcaagtgtccgggagagcgcggcgcgggctgcagccgccccggcccgcccgcacgacgccggggcccggggccagcgcgtcgccgctccacgatcgccgggggccggcgcaacccctgccctgcgggggccgcgcctccccggttccagggccgcggcggcggagagcgggtggacgggccggcgggcgagcagcccggccggcggggtccgcagcgcgccccgcgtcccatggatatagcaacaggtcccgagtcgctggagaggtgcttccctcgcgggcagacggactgcgccaagatgttggacggcatcaagatggaggagcacgccctgcgccccgggcccgccactctgggggtgctgctgggtgagtgcggggtcggaacgcccgagtggtctcgggcgtgggatggggcgtcgtccggctgtggacacgggcgttggggccaacggataaaggaaatgggtttgcaggacatggggaggaggcagagacaggactcctggagtgatcgccagagggccgcaagtacgcctccggcaggcgtcctgaggggacaggacagctccagtcgccacccaccatcctttccaggcttaggttctagagctgccactccgatgtggtaggtggcgggtggcaggggtgatggaggacctagcaatcaccttggcgagcttgggagaggcgcaaggtcacctggggtgggggagattctaagagaaaaacgtctccctggtcactcaaaccacagattttggggagatcggggatagaagaccacgaacgccaccgtggggcgtgtcagccagcgagcgccccagcctcacctcgcctgtcttggtcccagccggccaccctgcgccgtgctcgttgtcatttgtcttaacacggagcgcggattctccggagaaggggagagcacagcgccgagccaaggctcgaggcccgcggcctctccacgccggagcccgaggactgggacggactagccggggccgcccggcccctggcgcggcggtccggggagcgcaggcggcaggcggtgatcccgggcggcccgagccctcggggccgagggctgtgggcccggtgcgaccgggacgccggggctgggccgggcggcgctgacggccgggctttcgccctgtgcgctacaggctccgactgcccgcatcccgccgtctgcgagggctgccagcggcccatctccgaccgcttcctgatgcgagtcaacgagtcgtcctggcacgaggagtgtttgcagtgcgcggcgtgtcagcaagccctcaccaccagctgctacttccgggatcggaaactgtactgcaaacaagactaccaacagtaagcgcttctcgtcctccttccccgccaccgcccggcactcgagcccggtcagccccctgccgggcccggcccgcgcccgctctgccgccggctctgtgcgcggctgggccgggcagctccaagggttccgagagctgcgcgtcttggggctggggcggaccagcccagcccagcgggcactgatggggtcctgggagcctccggacggcccccagttgccatccgttgtcccggaatcctgcgctgggccggccg

SEQ ID NO: 5330 - DNA, 3120 bp, Homo sapiens
gcgggagagcttccttcgacgtccggacacgcggatggggcggctttcagcggcctccacccgcgcacccctccaggcccacctctcggcggttcgtgcagcatgttctttactgggagtgggatgacaccatgcataggctcctgggctccgcagccgagccgcgggcaccagcggcggttgatgaatttcggtgtcaccaggggtttagcccggatttgggaaccgcgcgctctaatacgcgcacacggtcctgccctttctaaagcgcagccctttcacccagcagctgatttatggaggaattcgatcctgggacgcgctaggctgaagcccggagtccagggccctgcagcagctttcgggcttctcagcgtttcggggacccttggtggctcgggggctctcttgggctggggtcggggtgccccgccaggtggggccttacgcggtccagaaagagccagtgattctccttggagccactgcaggctcccgctggagggagtaagactggcggggagagctggcattttcattccttgttgagcacagccctcgcccctccccaagccctcctgccgaccccctcgggctggccaaaagcagcaagttcgggaggtttgtttattgagagaacagaaaattaggggttgcgggggagaatctaagacccttttcccgcctgagaaacgtgcgaagtccctcagctcctggaggcaaccaggcggcccgaaagccgagttcccggcgcggatgctagggccgaccccagccccctccctcctgcgccccagcccgagggcggcgagtggcaggtttttttttatcttgtttttttttttttggatttggtttgcaggggggaaatgtggttgtatcaatccacaaatatttactcttaacagacttgtatctgtggagatttcgaacaaagacagtttagggggattacaaaaaccctaaaccccgtttttctcccggacttggtgctttaaatgccaattataggcgagccatatccaacagcaacggggaaaggcgagcaggctccggggagggaggtggggggagagtccggccattaaatgtaacttttcattatgaaaaggatttcgccggttttatcttctaataagattatgtcacgaacacaagtacctaggatggtgctgagtgacagggctctgtcgtttaatcagaggctgtgccgctcaaaccgcggggccctttgtcccacggagtgaacgacggaaacttgccatcctaatccccttattcatgtcaagcacagaaaagaagccgagcaccttacaaccgtgtcccctccaccccttccgaggacggcgggaagagggggctccggccctgtagccccctgacgcttttcgtttccgagcgcgcttgggcctcaggagccggagcgttgccgtgggggcgggggaaggggtggttttgcgggtgccttaattggcagcgtctggaaaatggggacagtgaccccacgactagaggatgaatggggggagggttagtgggatgtgtttgcctcctctgaccgagagcacgggtcctgctctgtcccctcttcccaggaaaggtggcactccgggtgcacacccaccacccccattaaagcgggattgaccagaagagagaggccgaatggagatgccaggctggggccctcggcggggcagatttcgttggatccctgggactaatgtcgcagcgctcgcactcctgcaggtctccagggttggccattcccggctgcatgctcggcccctttcttccgagggtgaattcctttgttccacccccacggaaaccctcttctccgccaggcccgtggcgcctttctcgccacctccgccgccgccgccgccaccctcgtcccaccgtttgcagggctttcctgcggcgctctggccgcagagacccagccctgtctgccgactggcccttcgacgtcgccgccgtgcctgagccccgctgcctgctcggacaagcagaactccggcaggcgcagcgggcgccgaggcttgggctttagccgtggcgctcgcctcggcgcagtggggagccgcgggcgtcggagaagcggccgcgctgttccgggtcactgcaccggctgaaaaaaccaaaagcaaaaccaacacccagaaacgaagcctgcgtgcccccgggggctccgttttgctcccctcatggacatgggggtggggagctcgtggggtttcagcccaaaggctccagtcagtggaaccggagggggacttcggaggaatttgtctctgatgtcccggctccctggcctcctattagaactcgtagaggatccgctctggagtccccgtgcgccctggcagaggtcggggacgccagagtgcacgcagtctcctgcgcgccgagcccaggctccgggcgcagggaggatcgggctgagagcagggtgtcacctcgtaaaagcgacaggcaaggactgttttatggggagggagaaggagcaggaagtgatgcttccatctctgacagcatagggaccgggagctccgatggaggaaaccctttccgggcaggacgagtagagggacaggacatggccggggaccatgggattcgctgccattaagtatgggacgggcaggcgagagcggggaaggggaccgatggagccagaagccctgagctcacctcccgcccgtcctctcctggagccccctctgcaatcccggctcagtcggcaaccggcccttccttccaggtcaggggtgggggagagactttctccctcgaaacacttgataccaactttgtttttttggcaagaaaaataagccttgtttggaaaggggtgggtggggggcgtcgagcgagcgagggaaggagcaaggaggcggcggcggagcaaactctgcggattaggtttcagcgcctccgccccacccccagccccgcggcggtgatttgtgtgcgggggtctgtgaccctgcaagcatcaaacggcccgcgggaaccggccgagttcagagggacagtgggccgaagggcggcctaagacaacgcagatggttcctatcagcccggccgggcccgcagcgtccgccggtccgtccg

SEQ ID NO: 5331 - DNA, 3120 bp, Homo sapiens; identical to SEQ ID NO: 5330

SEQ ID NO: 5332 - DNA, 7861 bp, Homo sapiens
ccgctctttcggaagccgtgcctctccccctctgcttccttcatctccgagtctttgtacccctgcgtctccgactcggcctttcatctgctccctccacctcggcatcgccttgcctcagtctcccccgacccctgtctcgccccctctgcttccagaagcctgcgcctctgtctctcccaccgcccggtctcctggtgtccccggcgtctctcccgtcgttcccgccgccttgatcagcctgggctgtggcgctggcatcgctggcctggggaccggggtgtgggcgatggaagggggttcgagaggcgcaggggaggggcttcccctcctccgcccctgggcgcctggggagactcgcgtgccagtcacctgccggtcggggcgccgacttcgcgcctacgcactccacgtgggcgccccggggcgcgcctttgtctctcccgagccttgaaagctaattacattgggaggggacaggggtggggtgggagagggggccgctgtccccattcactgagccgaggccgccactccgccggcagccccgcgcaggcctggccccgagtcacgtctgttgaaaccgtttttttcggcctcgcccccacccgccttggcagccagccgcgcctttgtacgcgccggcgggggcgccctggaaccctgaaccgtcttacggggaacgggggtggggggaggggagcggcgcgggccccacgcgaggaaggaatttcctgggccactgcgaaagattgaggctcagaaagccagagagagacgtgcgaggaggaagcggagagggtgtgcgaagctggagagggagtcggagcgccagcgaaagaggggagcgctggggaaggaggaagagaaggagagggggagaagagagacgcggatgctgggcgcgcgacggcagcgggcggaggaggggagcggccgggaacctgcgcgcaggggaagccaggacggagcgcagcaccggcaggggagggttgccgaggggctgtgccgaggagcccgggtgggggcggctggaccgcgggccgcgggactcacagacagtgcgaggcggcgcgggggcccctctccctatgcggggctggggcgcaggggctgggcggggcgggtgggcgtctgagcgcggcgcgggcgcattcttcgccttttcttcctcgggctcattccggccgatcgatacctgcgcgggacctgcccccgccgctaatatctttttaatgagttcgccaggcttaaagcgagcgcgatctgccctccagggtggattttcccccggcagatgtttcgggaggaggaggcgcgcggagctcccgggaggggggacaaatctctccctccgaggggcgagaacaggagactttcttctaaagttcaaaagaaagacgggctttcactcggcccccaaaaatgtatttctcggcggacaatgggcttctttctgcgcctctgagggccggcggggcgggcagggcggggacccgtgcgctttggccccgcctgaccgactcgcacccccctcccccgcacccaggcccgggccccagagcgagggcgcaggagccgcgaagccggccgcccttccgagcgtccccctgaagcgcactgtcgggacctggctctcccggagctaagccccggcgcaccggcgagaacgaaagcgtcgtgcggggccctgggctgtcccacacgcccccgttctcataggtgcctcagccgggccgaagggacgcgcgctggtgcctcaaggggaggacgaacggacctccgggcttgggccgcggcctccttcccctcggcgctccgccctgagcggggcaacaactagaaattagccaaccccgggcggctgccgggccctgagactgtcttgcccgccccggcccagccacccctccgggtcgcccctgctcttctcctccacttccccttcaatgtccctccgtggggccgtcggcctgccgcggcggccctctctccactcccgtgggctcaggggaagagggcacccgggcggcgaggatgacctccgaagagccgcggcaaattgattcgttccgcccggagccggggccgcgtgaatgggggcccgggcggcggcggcagcggagaagaggataaagatgttctccctgaaagggggagggggcgcggagcgggaagcggggccattcactcctggcccggcccctcgggaagccgcgccgaagaaagggggccgaggcctattcaagtcctacgagccgcccacaatggaccgatatactgagggcctctctattaacgcccatgaatattaaagagatcgccaagtggcggccagcgggcgaggggggcgacggagcctgagagctccggcccggccgaggggagggggcttttgcgcgagcacattccgcgcctgggccccgcggaaaatgacaaaataacacgggtcatccgctgggaaagcccggaatgtttcccctcgaaatctcctcccggggagatgtgagcacagggtcttgctccctatttcaatgcaccttgagactgggcgctacctacgggctcctttttccccgggcgggggtccaggtgggttttgccgctagactagaagcacaaaatgtgagcgcggtggagatttgggcgcaccagctgggaggacgttctgcgctccgcttctgcccggctcccagtactgctctccgggcttgcgggtccggaggagaggaatgggactccctggccgcagtccgagcccgtggtcactgcgccagcggaatccaagcctctaactctaagccggggttcaggacccaaacgctgcaccccagcacggaggatgcacagacctgagggcttcccgcagtgggacgtggccctggagagggcaaaatcctcggggttgtcgtggggtaaagtgatcttacccaaagagagaccaagcaaagaaacctcagttcacaaagtccaactcaaaccattgcacagacagggacaccgaggcccagagaggaaaggggcagtccacaggacacacagcagtccttatccccctttggtgtcctggaggaactgaggtcgctttcggggcttgggagctgccgcagcgcttggctcctggcagcgctccccgacgtcgtctccctcgctcctagcactttgtcctctccacctaggtcttcccagaagccaagaagtaggccccggtgaggctcccctgcaggagccatcggactccatacgccccctcagactcgagctctggccagggagccgatgcgacccacaagctgcgtcgaaaaatgagtggagggttcggcgaccctaacccacctccctcctcagcagcgctgccctctgctggcgccctgcccaacggtcctgccttctgccaggtgtgcccttccttgggctccagcctcgggcggacccggacgcagggtctgaaggccagctaccgccgccttcctccctttgcgtcccaacggggacgggggatgccggagactactggcaggaactggggaccaggggtctggagtctggacgccaggtgtgagaccctcttagccaaggcgcgtccgggtggtggaggggcgtctatgccaacaggcgtttggacagggtctcgctcatgggaggtcagctcgctgttcttccacccaagtcctccgcgctgaggagaaggtctagggagtccacacagtccagcggagactaatccgtgagcctgacccacgccgagagggtccaggcacctctgttagcggcatctgaaattgtaggctggtgatgggagccagaagtgcggcaggtggggtgagctccctcacccagcatgtcagggcctggggtccgaggcttgaggctgacactggggagccgcgaagcctgcaggaagcggggccttccgctgggctcagcagctacctgcttcgggagaggggatcgctgggctccgaggtgcctcgaaaccgccgcaaagcaagtctgctcctgggatgatgggcaggaggaatagaggagaggaagggaaagaagagagaggcagaggagaaagaaagaactaggaggcaagaaggaaggggcgccgcaacgccaccggcttcccgaggttgcagctcagcaaggagccggaaagccgggccgcaagccgaacccgcactgaggcctctcgcggagctgcctgcagtttctgagggacttcgctctcaggcacgcctgctcccacctaggaagggtctcgggacccctttcaatccccctatatcccgtaggaaattcttttcccagagacaggctgccagggcgattcctgtccgcccatctcgacccccgacctggccccgcaagggccgggagcctggccttccatgaagctgtctcaggccgggaccagccccagccccgacggccgctgcggccccgcctcggcagccccgtgagcccgcggaggagtttcgcacccgaccgtgcacagcgaccgagttggcgcggcccgtatgaagcgaagcgccggcttcagcagcgcagtctgagcaggggatccgcgtggcaactagggctgcgcgcgagctcggggcgactgtggcggcccggggagtgcagggccggagagggaagaggacgcgggctctggccggggagggagagcggtgcagggctgggccggccagccggggcagcaaagtaaaggtgaacgccgggctgggccaggccggtgaacatagatcaggcctgaggggagcgcggggcccgaagccaggcgtcccctcttgtctagcctggtccctggagtcctagagagcctcgccgcaccccctccccttctccgtcccctcctctcctcagagccggctgagcctccctccctgccctgcgcttcccacggggagagaaggaaaaacaggaggggggaggaaggaccaggaaggggagagaggagtggaggggtactgtttggagcggtccgcgcgcccccgcccctcgcgctctcgcgacgaaggctcctcgagcccagccgggtacaacaagtctgtcctccgacgtcagggggtcattaataaccaattaggagggtcactgcggctcctataaaggcgctgagattttgccaaggggaagacggccccggccgagtgtgcgagaggctagcgcgcgcctgagccccttgctgccgcttccctgcaaccacccgcctctcacccaccctgcaccccccgcacccgcctccgcctccacccgcgtctctccaccctccgcgccgcctttgccatctctacagatttcaccatctctcttcccctctccccctcgttcgctttcctcccagtcgccccctcacctcccgctccctcctgcgtcctcctcctctccgtcctccccctgctctggttccttctccatcgcagcgctctcctctcgccccttgggctcccctctcgcccgcccacctcccccgtcggcccggccgtcccccggcgccggggagctccgggccgcccatgatgggctccgtgctcccggctgaggccctggtgctcaagaccgggctgaaggcgccgggactggcgctggccgaggttatcacctccgacatcctgcacagcttcctgtacggccgctggcgcaacgtgctcggggagcagctcttcgaggacaagagccaccacgccagccccaagacagccttcaccgccgaggtgctggcgcagtccttctccggcggtgagtccagccgtcggagcccggcgcaatccctcctcccggcgacccccattcccgtcctggcgatgcgcgagacgcggctgggatacccggcctcgctgctactcgcgccaacctgggctctcccggcgctcggtgcacctcagtttccccatgggccaaaccaggacgcgagccaccaagcagctccgcagcccacccggctcaaggaccgaccccggcgaccccgtcgctcggccccgacgcccccgccggcccctcccttcccctcctgcgcttgagctggcgggttcccggcatttacagccttactaggcgtgtaatagcagttgactcaaaaagaaggggttttaaattcatttagttaacttgggcttgacccacgaaagttcccacttaaaccaagaactttaaaaggcagccggggctggggagggggtggagggagggcgggcggggagaaaaagccgcggggagagcgagggagagaaagagagagcgagaaaagtttcttttctttaagatgtctcaagttcttattcctcattcatcaacccgcaaacaatatctttccctggctctggcatctctgcgcgtcgccctcttttccccctttacgatttctgttcctctcttaatttaccgtgaagactaattccacttccattcacgctatgtcaaccatctaatcccccttttttgtaaggggaattcctcggccccttttaaacaagtcccctccgcattgagctacaatttactgctacagcattcttccagggctaatgaatttagaattagcaatttctttcgaatggagccgaatgaatgcgatcactttaacagcgtgacaaattgcccgccgcgccgcaatggacaccgtttaacccccccctttcagccggcccgctcgccgggtattttcccaggtagcttagaggggaaccttgtaagacatggaggccgcccttgtgcgcctcgccgcttccagccctgccgcagatgcccgacaggggaaccctcggggagctgggggccgccgcggctcctccccgcccagagagatgacatcggggtttgtctgagcccgggcgccgccctccctggcaccccagggcctgggagcagagagggactcgggcgcgcccggggtcacacagcgagcgcagagcctggccagctgctgccggtgcttctttggcacctccaacacctgccagcccgaggtctgtccccagcgctgatcacggcccggctcctctgccagtgcccagagcctggacacacagtgggctcccggaagccgactaggcgaaagagtctccggttggccttcacctccttgcaggacctggcctcagtttccctgtgcataaaaccgctcgctgccgttggctcattaattcttaaacttatccggggcagaggatggaagaagttgcgaatgctttgagaattcgcggagagactaaaaacccacttctaaaaatgatccccaacgcaccactcgctttccagggcacggagggtctccaggttgcaaacagaggagaggtcgttgagcctccgcacatccgacttcctccacacccgggtggcttctctggatttggggccgacttgggtttggctggtctgggcaggaccgaagccggggtcccggcggggaaggaagggccgggcctcggctgcctcgggctctgaccggttttcctggccccgccgccgcagaagtgcagaagctgtccagcctggtgctgcctgcggaggtgatcatcgctcagagctccatccctggcgagggcctcggcatcttctccaagacgtggatcaaggcgggaaccgagatgggccccttcaccggccgcgtgatcgccccggagcacgtggacatctgcaagaacaacaacctcatgtgggaggtacgcgcgggctggggcagaggggcgcaagggccggcgaggggcgctggtcgcgggtaggactcgggcgtccggccgtcgccgcttccacccgggctgagagcggcggacactcctggcctggacgccccctgagccgggactctaagccgcccgagcctggagctcaccccgcctctaggctcctcccaacccgtgccgaaaatccg

SEQ ID NO: 5333 - DNA, 1434 bp, Homo sapiens
ccgggtgtgcgccctcccagggccctcactgcgcaccgcgggccacggcagaccaccccagcccccgccttgctgtgcaggtgtcaggagtgccggttggctcccttcctcccaagcaaggccttagggcaccgcggctgccctgggatcgcaggggcgcctttagctctccaccgatgccccgacgcccccctggcgctggaggccctcgcgagtctggctgcttttcggagcctgccctgcctgctgggtttcaggcgacggcccaggctggctgggaccctcgaatcaccgcggaaaagggctccagtaggcaggacggcgccgtctctctgccggcaacctttgccccaaagcggaccctctgcggggatcggagagggatgccccggcgtgaggatgggagaagccccgggacgggagggccgcgggccgtgcccccagctggagtccccgcgccgccgccgggtattttatgatctgggggtggtggtgtgtccgtctcctcatgtcaccctgatcccaactcctgggcggactggagtttgcagacctcgctgccagcagccagggggcggcggggagccgagcgagaggaaaaatccacccatttcctgggcggattgcgtcggtcccgcccggccgagccccgcctcccggccgcggcccccgcgcgcagcccgcgcagcgctcagagccggacggcgcttcccggtggcggcggaggagcccggagggacgcagccgggcaaggcagggcgcagggcgggcggcgcgaggcgcagggcgcggcgggcagaggccacctggccaccttccctggcgcccggggaaggcgcggcgatggccggggcgcgcggggcggcggcggcggcgggcgggcggcggcgggccgagggggcgcggggacacagccaggcgcccctgcccgccgcggtgcccgccgcctgaaggccgcctgggcgcgggagccggtgccagctcggagcgggcgctggaggcagctcgaggcgcgatgtcggtgccgctgctcaagatcggggtcgtgctgagcaccatggccatgatcactaactggatgtcccagacgctgccctcgctggtgggcctcaacaccaccaagctctcggcggccggcggcgggacgctggaccgcagcaccggcgtaagtgcgcccgccggccgccttggcgcggctcctcctcctcctcctcctccccctcctcggtccggagccccgggctgggcgggcgccgcgcgggacccgagtcgcccagggaggcggcggggagcagggcgggcaagggcaggcgtcgcgggccggcgcagcggtggcgaccctgctccccgctcccccagcctgggccactccatctccgcccgcgcgcccctggggcggcgtttccttcgtctgggcccctcgccgcggggccg

SEQ ID NO: 5334 - DNA, 5053 bp, Homo sapiens
ccgcgggctccctgggacccctgcgaccccgccgacgcgcgctcgtccccccccgagctccgcgatccctccgcctaccggggaaggagacctcagcgtcgctgtcctgcccctcctgaacgctgtccttgtccgacttggagccgccgcgggagcgcttcatgttgcggaaatactgcccccagcgctgccggccggcgtccttcttcagcctcttctccttggcccggcggttctggaaccaaacctgggggcggggcggggtgagcggccgcccggctctgcgggggcccccaaggccgcgggcgggagggaagcaggggcgagcgctgacctgcaccacgcgcatgtccaggcccgtctcggacgagagctgctcgcgcacgtggcgcgccggcttgggcgaggtgttgtaagcgctcttcagcgtctccagctgcttggcggtgatggtcgtgcgcggccgcttggccgtggcctcggcctctgcgcggcgggcgagcggtgaggcgcggcagcccctccggccccggccggacccccagccctcccaccccggccggcgcggggacgtcggggcctcaggtgcccacccccatcccgccccacaggcttctcggaaggcgcgggcgctgggagcgattggcaaaaacgggcagcacccgggctggggtggagggggcgccggcggagggcgggttctgccgcgggggcgggggcggcgccttccctaaaatcgcacctccacggcgcccccgccttcagccttggctcccttctccaagcaccctgatttccccgcgggctcccctttattctaagggtgtgggtatggcccagccttcgcggccaagaatttagggcgataattccgaccaggggcgaaaagccgcacacttcggaccgaacgaagcggttcgggacgcgggtctgtccgtgactccgccgttcccggcctcggcttcctgctgcctacaccgccctagcccaggcccccttagtgagcgcttggggagagaatttccccggacgcccccctgggcgtggcctcagccccatttttttcagaccaggaaaggtgggagcgtcgtcccctcggctgacctcgctgcttggcggtttcgtagtccgccttgcacacgagccggctgtcctccatgaggtagaactcgtcgcccgtggccagctgccgcttgcacacgacgcaggcaaagcagtgcaggtggtacacgaagtcctgggcgcggcgcaccacctgcgtgggcgggatgcccagctggcacgcggcgcacttggtcccgaagcgcctgcgggacgcacagggccgggctcagcgcggaagcgcgaggctcatttcgccccgagcgggttggagagaggcaagcggctgcctgggaaggcggccccggaggaaggctctgtccggccctgcagggtggtcgccagcctggccgccggggcagagctgcccactcccactgagaagggaacctcaatctcagaaagacctcggggagcccagccgccattgcctgcaggacccatgctggatctgggaaggtgaatccggagggagaggacccatctggggccagtccctcacaccccacagctggagccatgaaggccactgggccagagccgctgggtgccagcattaggaactaaaacatcaccaatttcggaggaactaagtccagtagaatcctacaaataggggtgtatcttctctaatgactgcttctgtgatttaggtaataaattgcttttttttccaaataatacttgctgatgtcccagccaggcccagccacccagggagcacccatggagaggccccacccttaatttggccaggccacagggtgccctgcctgggtgacaggagtgggctgggattgcgagagacgcaggcttcgagggcctggccttggtgattgtgaggggaggagtccctggggcaggcgtgccctccgctcccacactgaggtgaggtttcggggctcacttgaaaaagtcgtccttgcagtaaacgctctcccctcggctgaagcagcgctcggccagtggcgtgtggcagtcgctgcacttgagacacttgctgtgccagtggcggtccagagccttgaggatgaagcggtccaggatgtgctggtcacagccagcgcacagcgggatctctgtgggcacgaggaagttctgggtcacctcgtagaccaggaggcagtgaagccaccttcccaccccaacgcgagccagtctcccctccggcccacaggactcagggctgccgaggggtcctcctttccctacacaccctcttccccagccagcttaagtggccccgcaagttccgggagtgtgcaggcaccgcatcctatgtcaggagctaaggggaaactgacatcggtctaaaaatgtgtgtgagcaagaaagcagcccaggccatttcacgaggctgaatactcaattacaaaatgttgccagtgccaagaagggtgcatgtggagctcaaatgaaaaccccaccccagggggatctgctctctgaagcccggcaggaaacatagggaaacgggtcttcaccatcacctggagctggggcaccccatcgggtctccttcatgttaagcgtcatggccactctttctagggactcctcgcaaatgtggctgccctgcctggtggccctgtctgcaggcctccggggtaaatatcaatgccttccccatcattgggcagccgcaaaattacttatgagtggactggacaagccgatccactgcctttgtgtcaggcgtgggtgcccccaacaccgtcagagttactcaaacgtctggcttcccgctgcttctgccccccacaccccacttcggtactgcaggccccctggaggaaccacactggggaggtccaagggtgccctgtgggagcctcgagtctgtgagcgggttttccaggtgtcaagggctgaggactccctcttcacttagaaaaagtctctggaagagaggagtgcccgctgaagggaccgggatttactgacatattgcacccgcctccctggctgtggaccccgccggctccagcccatctcccagtgggtgagagacaccaggaaggggctccctcgacctccggcggaaaaaactgggctgcgcctccccacgcagtggcgggaaaccggcgatgaatgcgccccgcatccggcaaaaccgcagctccgggtgcggagcgtcgaggacccgctgcgcgcccggggtccccatcgtgggcagcgatcgcaggcgaggacccggctcggagcggggcggcccgacaggccgacacagcgcggattcagcaccgcggaccggacagcgcctcggccgcagctcgccgccggcgcccgcgtcgggcaaaagccgccccagcccaccccgcgccgcgcccgcgaccccagccttacgctgcatggcgactccagccctggcgggggctcctgtgtcagggatggcggggtcggcggagcctggacgccagcccgcccgctccggccagctctcccgagcgcgggcgcgcagtcctccttcctccctccctctctccgccccccagcccccgcggccaacccctcccaggaaccgtcgaaaaataaataaataagtagggaaccgcgagcccccacagcctggatgtaacccccttcccgccggccggtccctctcactccccactggctccggggcctccttccccatcctgcggctccagctggcccgggagtcgaggagaactgcccaggttccctaagaaccaaagtgctgggagctagagtggtgccaccaggaagctggggggcctggagaagagaggctttttcctacagacgggccctgagcggggataaaccgagcgggtgtctgtgggcgcagacgctgaaacctgacttcggggagaccgacggtcggagttcagctcgaccttggcccctgcatctgactctgttccgctggaacgtggaaagagtccggctggggcggccttcttggggaccctcctgtcccgtggtcactgccccgccactgctccctgcgcctcctccagcccagggagctggctccgggctgcagaggtctcctaagcccaccctggacccccgagagctccctggccggagcagcgcagtgccacaacctcactcactccctgacaacccaggccaggggccctgcaacaaatacaggctgaggcgcccaggcgcggacgttccggggtcctcgcgcccactcccgcccagatcctctagctcctgccagcctccgcggccaggcccggaaaggcctgaggatctcctggtctccccggtgcagccactcggcccgggcacccacctcggcgcaggtccgccctccgcgccagcagtgctagcagcaggtcgcctcccgccgactcccgggccgggcccagctccccgcgcgcctccatgggtcccgccgcccggcgtcgccactctccagtcccgaactttcccgggcccagcgacgccaccccgcaatagccccgaaccggcgtccaagcgactccgggtgctgctgggcgctgcgcccgcgggccgccctggggcccggagcctctggccgagcggagggcggagcggccggggggcggggccgcggggcggggcggggccgggggtcgcggagaccagcccgggccactgcggactctgagcgcctttgcgccgggacctgcggtgcccagaggccgccccgcgtgcccggcccgagggcgggcaccggtaagggagggcccaggtcagggcttcccgccagcgttcgtcccggccccgcagcttcctgcgccggagcggcccagaggcagaggcctgagctggagcacacgccaggagggctaaggttcccgggagaggggtcgagaaggcagcagggtcctcccgccgctgaggtttggcctcgggagcagcagatggtcggcgggagctcaacccgaaacgcagaaggggtgagtgtggcgccgagggctgcgtaccggaaccgcaaggtgccggaccg

SEQ ID NO: 5335 - DNA, 6343 bp, Homo sapiens
tcgccttccactgtgcgcgatcggaggggtcgctctgcagtgggcgctgtgacgggggcgcagtcactgacgtctcctggggcaacacctataaataaggcccaaatgcggcccgtccttccaactgcggacaccagagggcgcagccccaggaccacgcccccactcccctaccccacccggaaaggggtccacccgagccgaccccgccgtcactagtcgggggaggggaggccctggagcttcacgcgggagctcccgccgcgggaaccacaaccacggctaagcctttctggcccgcccgccccatcgcagggagaggacggggggacgggcaggacgggcgcctggacagctgggttcctcccgcaggtgcttctgaccccggcatggaggaagcgcccgcgttctcggcccaggcccgcagccagggctgctccgcccgctgcgccccaggtaagccgggccagcgtgggggagtagcggggcctgggctgcggagggggccgccctgacccgcgtctccccccagggcaaaagccccgcaaggcagtgtgagctggagccgccagcctggggacctcttttaagatgacccgtacggaccctccggacctgctggtgtcgaccgtgtaccaggacatcaaggtggcgaccccgggacccgcgtccaagtgctcgccatgtgagcgatccgtggcccggcctgctgagcccgcgcctttcaacaagcgccactgccgcagcttcgacttcctggaggcgctggacgggccggccatggagaccctgccggagccaccgccgccggagtccgctgtgccgcgcgcccggacccgcgaagccgagccacgccgccgcgcccgctccaagagtgcgccccgcgcgcccccgggcctgacgcccgcgcccgcctcgccgccggtgttgccccgccgagggcgggaggcccagcgtgcggcgcgggccgaggcatcgccgcgccgggagcccgcgtacccggcgctccgcgcccttgccaacgagctgcatcccatcaagttgcagccgcagcggggcggccccggccgcgtcgcgcccctgtgcgccgccgcgggccgctgcgcaccgcccgagccacccgcgggtcccgccccccacgtgcgctgccgcctggacatcaagccagacgacgcagtgctccagcacgccacccggggctcgcggtcctgcgggcccaccgaggccgcgcactgggcccgccccgccccgcagttccacggcctcacggtgcccgggccccgccacatggcgctgtcgcgcaccccgacgcccagcgactcatactgtgcggatccccgggcgttctactgcgacgggcccctgcctgggccccgggactacgccgagcgccgcagtctgcccttcaccaccccgccgggccccacccagttcttctatacagaggagccccaaggcttccggggcagctttgcagccagtcccggcccaaccttcgacgcctactaccccaggccctatccgtccgaggagctctcggggcccagtccaaggcgcatgggcggctactacgcaggagaggtgcgcaccttcccaatccaggaaccgccctcccgctcctactatggggaggctccacgagcctacggcctgccctacgggccccgctatgtccccgaggagccccgggcccactccaccgcccgccccttttacacggaggacttcggaaggtaccgcgagcgtgacgtcctggctcggacgtacccgcacccgcgcagcagcccggcctgggcggactggggcccgcgaccgtaccgcaccctgcaagtggtgccgccctctgaccccgacccgttgctcgcctcctggcacggcggcaccggcaccagtccgccccggctggccaccgacagccgccactactcgcgctcctgggacaacattctggccccggggccgcgccgagaagacccgttgggccgcggccgcagctacgagaacctgctggggcgcgaggtgcgggagccgcgaggcgtgtcccccgaaggccggcgcccgcccgtcgtcgtgaacctgtccacctctcccagacgctacgccgcactgtccctgtccgagacgtcgctgacggagaagggccgcgcgggcgagggcctgggccgcaactggtacgtgacgcccgagatcaccatcactgacaatgacctgcgcgccaccgagcgcccgagcgccagggcctgggagttgcccgggggccgcacgcggccacctccccacgcggcccccgacggccccacctctggccgccagcggagcctagagcagctggacgagctcatcacggacctggtcatcgactcgcgacccaccgccggccaggcctcagagcccgcggccgactgcctgggcccccaactgcgccgactgctggactcgcggcccgcgggctccggggcccccgcgctggcgccgccacgctcgccccccgcctcggccggcagcgccgaggagcccgcggccccgggagaggcggccgacgcgtcccccgaacccagcgccgacgaggacgacctgatgacctgctccaatgcgcgctgccggcgcaccgagaccatgttcaacgcctgcctctacttcaagtcctgccacagctgctacacctactactgctcgcgcctgtgccgccgcgaggactgggacgcccacaaggcgcgctgcgtgtacggccgcgtgggcagcgtgtgccgccacgtactgcagttttgccgcgacagcggcccggtgcaccgcgctttctcgcgcatcgcgcgtgtcggcttcctgtcgcgcggccgcggcgtgctcttcctgggcttcccaagtccaggctcggccgacaacttcctgcgctttggcctggaggggctgctgctatcccccacctacctatcgctgcgtgagctggccacacacgcggcgcccctgggcagctacgcgcgcgagctggcggccgctgggcgcctctacgaaccggcagagtgcttcctgctcagcgtgtccgtggccgtgggacccggcaccgcgccaccggggacaccggccctgcccgcgcccgcgccacgcagccacgggccaacagtgcgcaagttcgccaaggtagcgctggcggccggcagccccgcgcggccgcccccggcgcggagccgcgagcccgacatggagacgctgatcctgacgccaccgccgggcacggcgggcctggatcaggacggcgaggcgggccggcgcgcgcgcgaggtggccttcatccacatccagcgcgagctgcggctgcgcggcgtcttcctgcgccacgagttcccgcgcgtctacgagcagctttgcgagttcgtcgaggccaacaggcgcttcacgcccaccaccatctaccccacggaccggcgcaccggccgccccttcatgtgcatgatcatggccgcctccgagccgcgcgcgctcgactgggtggccagcgccaacctgctggacgacatcatgtgaggcgccgggcccaccaggcctagcccaggcgctggcccgaaccctgccctgcccactcaggccccgcccggcccacccagggccgcccccgagccccgccagggccccaccccgacttcttctaggccccgcctctaattccccagccttccaagctccgctcagttcggcctccagctccgcccaggcccccaccccccggcccttcgtccccgtagtgttcctcacaggcccttcgccttcccacccccagcaacccctctccctcctccgggcctcctccctctcccagctcgccctcgaggatccccagaagaagtcggtcctcgccctcggtgctccccgctgggaggcggggtgggcctgaggaccgccgagctctgccttcactcggaggggtcactactgcacagaccccacccgtagagatccggtccccgtcggtccgcggggctctcgctggagcctccccgactccggtttcccctcgtccagaagcccgacgtaaccaaagcccagtctgtcactttaaacacgccccgccccgcctcccgcggctgtgttgcctcctcgctggagaacaccctggtcgacctctgtgcgtccgtgtgcgcgagcgcgtcccgccgaggcggtgggcagggcggacggtgcgcagtgcgttcccgctggtcggagccagcacactaaccacgccacgcgccctgccgtcccttcgcctccagccgctgcagtctgggccctgcaggagctgggaaaaaccgcagggaggtcttcaggccgatatgcaagtctcccagccgaaggggcaggggacctgaacaggggaagcagagcacctgggcctggccagagctgacacctggctaggagaggaaggaccaagggacggggcgttcccaggtgggagcctggagggcaaagcgtggtgcgagcaggtgagggagagagctagttggtaagcgtggaagcccacccgagggggcttgacctgtcccgagaggtccccgcacacccgctctggccgcacgccgtactgcgggcgtggaggcgcaagcccggcggcccggcctccacctgtcccccaagtgcaccctggtccgcgcccagagctctctggagggtggggtatgcgggagaggggtggaggccaaacgcaagggccctcctggagtccccagccctacttcggagccaggggagggggcaccaagtgagagaaattgggcacccccgcctccgctcctgctttcgcacccggcacgcccatctcgtccccgcgcgtctgcaccggccaggcgtcccgcttgcccacccgccgccgcgccccgcgccccctaccccagggcctctgcattcggccccacccctgagggccggccgggaacgcccctggaccggaataatttccagggggcaagagctttcgaaccaagtaaaatagaacttgaatgtagcggctgccgttgcctccttgtaccggtagcggggttggggacggaagccttcggtcggtggagaggagaaagggagaggccttcgggcggtggacggggaagagagggagtccttcgggcggtggagggggtggagagcgaggccttcgggcggtggagagcggggaggggggaggccttcgggcggtgggagggggagagagggaggcctttgggcggtgggggccacggggagggtggtcttcggactacgtgcgggacaggaggtcagggctggcaagtccctcaggcctccctcgttgccccagcctcgcgggccgcctaactgccccgttccaagggtgccaccggaccccgctggagaggaacttctccgttggctggatttcatcaccacccattcccgattccacgtttcctttaagcggggctggcggagccgcaaggcggcaaggaactggattgcgattggtcagcacgtgcctcggtcggcggtacaattggctgaggcgctgggccttgggaagcattccccgacgggattggtcgtcgctctcgcagagcccgcctcccgcagtacaagcggcccccgggtcgggtgggaggaggggactccgggaggaggaacatggcggtggcggacctcgctctcattcctgatgtggacatcgactccgacggcgtcttcaagtatgtgctgatccgagtccactcggctccccgctccggggctccggctgcagagagcaaggagatcgtgcgcggctacaagtgggctgagtaccatggtgagggcgggacctgcgggcatgccaggggcacgcctggcgaggcgggggcggggctggcgggacggagacggggctgacgaggcaggggcggggctggcggggcgggggcggggctgcgggccgtagcggactgcgctctgctccgagtcctgcccctgctaggtttgacccaggctgaggtcctgggcgggaagggcgtgacacggcctgacaccctccccagcagtctcccagttcccgcgccctccccggttccaccctccttcgctcattcatccctgtcccagcctcaaggggcttcgtctctcctggggaaggggctgttcagagctgggatttcagaccccttcggctgggagttcctcccgcggcctccaagggcggccagggcacgtcctgaggccgccctcccatcccagcggacatctacgacaaagtgtcgggcgacatgcagaagcaaggctgcgactgtgagtgtctgggcggcgggcgcatctcccaccagagtcaggacaagaagattcacgtgtacggctattccatggtgagccgcagccccgtcccgccctgccg

SEQ ID NO: 5336 - DNA, 1089 bp, Homo sapiens
gcgggaaacgccgtctcccctggcgtctgagatctggggtcccctccccacctggtctcctcgctcccgccccagccccgtgcgccccaggagggcaccgccgagcgccgggtccccgcagggttcgggagactccgcggaccggaggagggataggacccccgagctttgggggcgggaagggagggtggaaggaggaggggagcggggttggggaaagttggagcttcggtatcttttctccgggccaggccgtcctcggggccctgcgctgcgtctccaagtgctgggaagactccgcggggaaaggtctgaggacgcggccggctggcacaggtgtggcggcttcagagggccggggagaacccatggcttcgaggctgtggactagaaatgtccctgattagaagctgagaacctttggccagggaggtggggcggcggggaggggtcgtcaagccggtccagagcgcgcccacctgcgccacaagggagaagaggtgccccccgcccccctccgcccaccgccgccacgatgcgccgcggacctcggcgacccagcccgggtagaagcgcgcgctcccctcctccagcctcgtgcgccggcccctgccccgccagccccgctatggtcccccatccacccccgcgggagcgcccctgtccccccatcctgcacttcccccagagtcgcgcgccagtttcccgccccgtggaagcgcccctctcccgacttcggctgatccccgctcgccgccctccccgcgggtgcgcgcccggcccctccctcgcccggggcgggtctgcgtgggcggtgctccgggtcggcgggcggagctccggttccccagccctgcgccccggtggagcccgagccggagccggcagaggggcgcgggcgcggacgcggcgcctggcggggccctgggaggctcggacggggtcctggcgttgagctcggccggcccggagcgcggacccagccgcaggggcggcgatgggcaccgagggacccccgcccccggccgcctcccgcggacgccagggctgcctgctggtacctgcgcgggtgagtgcggcccctcagcg

SEQ ID NO: 5337 - DNA, 1020 bp, Homo sapiens
gcgggcgtgaggccccgccctcgccgctctctgcccgcccccagacccgcggcccgcctggccgcctcacctggccgatggcgttggtggtgagcacaggaaggccattatagtcccaatccttgaggcaatggttgaagtccggcggggcgaagccgctgcacgaggggtcggtactggtggcgacacggctggcggcgctggctgctagggcagcgctggcgacgctgacgccgctggcattgggaggctgctcccagccagaggcattaggggggaaggccccgtagtggcaatgcagcgggggcgccagcgtgaagatggggtccgaggccatgcccagagccacgaagagcaccggcaggcagcagaggccgagctgcagctgctggccgccgcccagcgcccccacctgggcgagcagcgcctcaaagctgagggggcctgggggcacggccagcgacaggctgctgcccagtccgtcgccgcccgcgtctccctccccctcccgctcgcgctcccgctcaccctgcagctgctccgtgggcaccgcatctccgagggtcccgacctgctgttggggggcagggggtggcaggagaagggtgaagcggaggaaaccgcagagcaagggcagggggcaggtgggagggagggctaggaaggcagtcaggggcgagggatgcgcaggaggaaaatgccagacgctccgcgggggcgggggtgctgggagaggatggcgtcgccacctggggctcgggcacttactccgttggaggtgggggtgatctctacagtgttgtcgattttgccgccgcccccgccattgggctcgggggtcccggtggccacccggggagccagcttgccgaccgcaggggccctgccggcccgcgccgaaaggatgcgctgtcctctggctcagttgcgcgccggctgcccggacacagacagctcgaagagatcccgctctgcagctctgcagccgcgggcgcctccttggtctctgcgatctctgcg

SEQ ID NO: 5338 - DNA, 6343 bp, Homo sapiens; identical to SEQ ID NO: 5335

SEQ ID NO: 5339 - DNA, 1109 bp, Homo sapiens
gcgaagtcacagtcgcacagccaggggttcccgtccagacgcagggagcgcagcgcgggcagcgcggccagggcggccacgctgaggctgcgcaggttgttgtcgttgagctccagcacctgcagcgactccagggtctcgaaggcgtcctcgtgcacgcccaccaggttgttgttagccaggctaagcttcaccagcctcccggccgagcggaaggcgccggcgcccagctgggtcaagttgttgtagctgaggtcgaggaacacgagcttggccgagccgctgaacgtgccctcctccagcgagcgcagcgagttgttcctgaagtccaggtagaccaggtcgccgtagaagatgaagaagtcctcggggatccgctggatgcggttgccggccaccagcagcttgcgcacgtccagggggaaagggtctggcacgctgggcagcccgcggtcgcggcagtccacggtgtgcgggtcggtgcaggcgcagcccgcggggcacgcgtgcccgggcgcgagcagcagcagaaggctgcagagcccgagcgccgcggcggcgcaggctggggctcgggggcgcatggccggggggcccgcgccggccgcggcgagaaggaagcggctctcggagcgagccctggcgcgggacggcgcggtgaggcactggctgccgggcgcggggagccagagggcggcccgggcggggagggcgtgcgcccgggcgtgcgggggcgatggagcgcggcgcggacggactggggagccgggacagcagggatggagaggggaggggcggggagggaggggcgagggactcaccaaagggtttacccggacaggaaattaacccgctagaaaaatctcttgggagaggcgggagcggcaggggtggccgagtggccgtcgccaaaacgcggccccaccctggcagctgatttccgagatctggcagtaagacgccgcgcgcaccgggcgggctgcactcgacgtctaagttcagctaccaagcccaggagcggtttccctaaggcgtgtcccgggcgtgcgccctgccccctcgcgcccgcctggtgccaaagcacgctccctgcacgccaccctatgtcg

SEQ ID NO: 5340 - DNA, 1109 bp, Homo sapiens; identical to SEQ ID NO: 5339

SEQ ID NO: 5341 - DNA, 1384 bp, Homo sapiens
gcgggagcaccagcggcccacgccgaggaagataggcgctccctcctggggtgggcagcgcaggtctggcctgcgggtggggggtggagagtgagaggcacgcggggcaccagctcagctcccctctggggatttcgtactcgcagtttaaggaaccggtggagcacgaactccactcctgagctggcgcaagcgtctcccttccatggagatccaccccggctcccctctgaggccccctttccaagcaccctctcttccgagcacccagcacctccccaaccttagcacggctcggggcaccagttctccagggcgggggctgccccaccgctcaagggaggggacagagggccggcctcggtccaggcgacccctgcccctcgccaggggcgccaccttggccccctcccgactgccgtccgccgcctccgcccccccggggggtgtgtctccgaagtacgggggcgcgggaggccaagggtgcccccagcctccgaccgagaccccctcccgagccggcggcgaatggtaggctccatttaaagagtgcctggtggcgcgcggtgtccttcttggagcagctctcggcgcccgcccgccggggtctcggcgatcgctgctcctcctcctccttctcctcctcttttttctcctccgcctcctccccccgccgcctcgccaccgccgcggctagggctggaggcgccgctgtcattcctgtgccggaggaaccggcgctgccggtgcctgggggtcggggcgcgggcgaagccgggccgcggaggacacaacaggtagagccgggggtgcccggccgcgcgccccccgcgcatcatgcagctctttgtcacctctctcgcccccaggccaaaatcctgagcatgatggaagacaataagcagctcgcgctccgcatcgatggggcggtccagtcggccagccaggaggtgaccaacctgcgagccgaactcacggccaccaaccggagactggcggaactgagcggcggcggcggccccggcccgggcccgggagccgcggccagcgcctcggcggcgggggactcggcggcgacgaacatggagaacccccagcttggagcgcaaggtaggatcgccccggcgcccagggcggaggaaggcgagcagagcacgcccggcctcggaggtggccggggacccggggtcccccacacccggggcgaaatcgctttgcattctggcttgtaaccctttccgcccggcggtggccaccgctgctctccggctgggagttgcaggctgctgtcattcacgaaaacccgagcgcagtgtgcacggggtcacacggtcacaccggccccggccagcctgagcgaggcgcagccggcgggtcccttccg

SEQ ID NO: 5342 - DNA, 1384 bp, Homo sapiens; identical to SEQ ID NO: 5341

SEQ ID NO: 5343 - DNA, 835 bp, Homo sapiens
ccgtgaggccgtgtgtgagcccttgcgtgggccgtgagtgcggcagggagcgcggtgtccgggggccgcctgtcggtgtgtctgtgcgtgcttgtgcgctagcctttgcctctgcgagtgcgtatttttaggaccgagtctgtctatatgagcctgtgtctgtgtgtgtgcgctcccggccctgcgtgtgtctgtgagcgtctgccggggcgcgtgtgtgctcggaaccccgcggtggtgtgcgggtgtgtccgtgtgtctgtgcacgtgcaggcgagcgttcccatctgtgtgtgtgcatctgagtctgggctatgtgtgactcagggaccagtctatgagcctgcctgtgcctttgagccgatacctgtgtgtgactcagggacgagtctatgagccgatacctgtgtgtgcttgggtgtctgtgtcgtggtgtgtccctgcaagcgtttgtgcctgcaggtgctggagtgtgtagctgtgggaatgagtgcgtgtgagtgtgcggaaggggcaccgcgcgagggagcgccggtgcggaaggctaagcgagcccgcgccctccacggacggtgccgccaccccctccctccgccccgcgctatgtgcccctgtgtgcccgcgccgccggggccgtctctgggctccgggagggggctgagcgagcggccctttcctcccagggaccccgggcccgccgccagccctgggcacacccgccccttcctccagcggccccgctcgctgacccacgggcactcgatgggcactcgggaggcaatggccggagaggatgggcagttagcgggagggactgagtggcgccggcttcacg

SEQ ID NO: 5344 - DNA, 2248 bp, Homo sapiens
ccggctcccgggcggccgcccaggaggagacccacccgctgggtttctgaccgcctcctaggaaaatctcaagtacggaaaccaagcccgacaccggttccggcacctctttcacgccgctggcagcccaaggtccgccctgaagaagagctgtagaggaggaaggtggccctggctcggcggagtccggctcgcctggtgccaggcgctggtgctggcgccgagtgaacccaggcggcccaggtgtccggcctggtggcgggcgcagggcctgcggtgatggaggctccgtcttagcccggccaggcccagccctgccggtcgtcggcccgggacatgcgcggcgctcaggcctgcagggtgccttgggcggccacaacaaagttaaagaccggagtaagagtctccggcgagaagagacgcggagaagccggagccccggaaagccgcgcgcagccccgccagccgccgccagctgcggaggaattcgggctaactttaaaaaccgctggcgtccctgggccgcctgcccgggccgcactgggcggcctccatcgtcccttccctctacctgcactgccccaggcgggagagaggccttggccccgagggaccagctgcagcgggcagcggggtcctgctcccccaacccccgccccatggcacggggctgaaccggtaccaccgaggccaagggcgaccaccaggagagaagaccggctgccctcgtcatgcgaatctgtgccctgcgacctcgctgcggctgctcgagctatgccagaggtggggacgaagggcccgcggggagtgaggtgggcagaggagagaagttggcgccttccccagggtccccactctgcggagaagcccgatcgcagaactcggtcggctgcggttcatgctggcagtcaccgcgaaatgcgccctcgactcgggatcgcactggaaaccttcgccacactgtgccaggtctgacctcccaggagcgcgccaagggcccctcgcccactgcggcccggcggcctcctccccaataagtaaggcccgtgaccccgactctggaactttgtcctcacagggaggagctcctggtggtcaccgatcggctcagcagctcggagagaggttaggaaaatctctccggaacgcgttgggaggccccctcattcccgccccctcccgggcgcacggagacccccggctccagggagcgcttaccgatccggatgacgtggggcatcccgcgcgagtccgggatccagaaggcgcacacgaggagcccggcccagtattcccaaaccagactccggaggcgccgccagggagcggtcatcgttgggcgccgccgagcgtgcccggggcgcggccgtggcgggctccctggggcggcagctctaggcgcgggcgcgcagcagccccgaaggcgccgcctggcccagccgcccggctcccgagcgccgctgcaagtggggggcgccccgcggcgccgcgcacatcttactggggggccgccccgccggcgcccgccccgcctggctgccgcccacgggctgcccgcgagcgaggctcctgggctccgcccggactccgctcggactcggctccggctccgactcgcgtcggctcggctcccgcgcgggctcccacctgccccggctgccgggctctggcgggcgggctgcacgcgtctccggccgctcctcctccagccgccgccgatgctatcgcccgggctcgcacaaagccccggagtggagttgcacgcgcgcacactctccctcccagccccctcccctgcgccctgcctcccgcctcccgcgccgcccgccgcccgcgctccctccgcgcactcccccgcgcacacacacttcacactcacacttgccgaggcgcacactcgcgcgctcacacctgcgcggggggcggggaaggggaccctggccccattgtagggggacgcccggagaacgaggactctcctcgcttcccagacgtccccacccgccccgccggccccagtcccttctactgcgagggcacggagcccgggagccaggcgtggagcgcgagagctggcaccgcgagctgggagacggcggcagcccagcggccggaccagctggaggagacgcgcccgccgggagcagcgagaccgggagcccgccgtctgcggagcctggcctcgcggctcccacgcggcgggcgctggctggacggcggtggcagcgggagactgacccgggaaccg

SEQ ID NO: 5345 - DNA, 3541 bp, Homo sapiens
ccgcggggagcaggggccgcgctatgcggcggtcggtctgcagcagggcagaagccccttcccgtctgggtgtgtgggagcgcagacccctccggcgtggccgggaaccaagccggggctcggatgaaacgaaacgaaaaatgaacactcgaattttttttgttagttttttttttttttttttgcttttttttggggggagggtagggtagggaaatataaggggaaaaataaattaggctagattaaagctttggctatttcctgcttttatacacagacgcggctctcgcgacctcccctccggggccccgataaatacagtatactgcgatttaaattaagggcgcgggcggagttagaaggaccccaggagccgagaggctccacgaataaataaaaaccgtaaaaaaccaagcccggagaaaggggaaagcggggtggggcgcatccttataggagagaagaggcgtgtagcgaataaagtgacagccccccaccctggacccgcaggctcaggagtccacgcggggagaggggatggagaactctcctcgcttcgtcctctctcccggggaatccctaaccccgcactgcgttacctgtcgctttggggaggccgctgccgggatccggccccgaacagcccgggggggcaggggcgggggtcgtcgaggggatgggggcagagagcaggcggcgggcaggatgcccggggtgagttggcgagttccggatcttcgctcctctctcccggggctcgggcgacgcagcctaccgggctgtcttcgccgctcaccggagagggtcgtccgggtgtttggttttgttcgaaagtttctgggcttttttttttttttgtaaaatccaaagcaaccgaacaaaaagagtccaggccgcgcgggcgggctgcgcgcccgcgccctgcagcgcgccggcgggggcccggcccgcggggtcactgcactgagccgggcagtgtgtggtggtggtggtggtgcagcgccgccggcgggggcggtgggggcgcggagggtggcgatgcgccgcccccgccaggccctagctccccaggcgcgtatacatcgtccatgggcgggtggcccgcgccggccgcaggggtcatgcgcttctccttctgccgccggttgcagaaccagacgcgcaccacctccttctccagctgcaggctgtctgccaagccggtgatctcgtgcgccgagggcttggggcacttgagaaagtggctctcgagcgcgcctttgacccccacctcgatggacgtgcgcttcttgcgcttgcggccctgcgccgcgatcttgtccaggttggtggggctgccgctggacgagtcggtctcctccagccacttgttgagcagcggcttgagcttgcacatgttcttgaagctcagctgcagggcctcgaagcggcagatggtggtctgcgagaacacgttaccgtagagcgtgcccagcgccagccccacgtcggcctgcgtaaagcccagcttgatgcgccgctgcttgaactgcttggcgaactgctccaggtcgtccgagctgggcgcatcctcgtccgagtgctcgcccaccgatgagccgccgccgcccgcgcccgggtgcaggtgcgccgccgccgcgtgcaggccgcccgcgtgtgcatgtccgtgtgcgtgtccgtgggcgcccagatgcggcggcggcgacggctccagctgcgcctcgtggccatcctcgtgcagcgcgtggtgcaggcccggccccgcgccgccaccgcccgccgccagcatcccggccaggccgccgccgccgccccccgggtaggccgcctgcgcgtacagcccgagcggctggggctggtggcccccgctggccccgggcgagggcgacatggccgggcccaagtggtgcgctgtgctgccctgcgcccatgccgcgcccgcgtgggccgccccctggtgcaccaggcgcgcgtggaaacctccgccgccgccgccgtcgtcggctcggccggtgccgccgccgcctgccttgccgtgttctaggtgcgggccgccggcccaatcgccgccgccgcctcctcccgtgggtagccactgggggtgcgctaggcccacggggtggcccgcgcccgcgcccagccactcgtggtgcatcagcttctgcacttcgcggtacgcggcccctgcatgcaatcgctccgcggccgccgccgccgccgccgccgccgcggcgtccgggtgcataagcggcccggtgcccccggctccgccaccggggccccgcggcaggtactgcgcggtggtggccatgccgccccgcgccctgcgccgcgccgccgccgccgctccgctccgtctgcgggccccgccgcctcgctccgccggcttaaagccccgacccgctcggcgctccggagccccaccccgcccgccgcccattggctgcccgcggagctgcctcccgcctcccctgcccggcccccgccccgcgcgcccgcccgccaccctgcccggccgcccagagctctccattgggcgtcgctcccggggtcccgcgcgccggccgtgctgattggccgctggggcttcattcacggcccccctaccgtccgcgtacacactcacgccccgggggcgcggccgccacgtggggagtggcgcgggggtggccctgggaccgcaccccctctcgtcctggctgtgtgggccccgctttcccccagcgctggagactccgagcccggccggtcccacattccacgcgagctgaattcccgcccgcatcccgcccgggcagcagggattgccggctccgggaggcgctcgggctccgagaagcggctcagccccgcgcccctccctcctcagtaccgctgccggcggaccaggattcccgcgggtcctggcggctgcgagcgcgaggcggcgcggattcgcggctcggttccggcgcgactgctcaccgcgcccgcctcgcctcccgcggctgccagcgtgcactgggcgctcctcggcgcgtctgcccggcccgtctcggctttccttctccttcctctagtcccagcgtcacaactccgccgacctcctctgccctgagagcgcgtccggtgcgggcggagtcggacggactctggcttcacgcctcgcgcgggcacaccttctcccgggcactgaggcccaggtgagtaccgcgcgggcagctggggctgggacggcgggcggcagcggttctacagtcctacgcgagcccctggtacccggccgcgctccggggttccagaaggagaagatctcgaggtggagactgtggctccggggaaaacgctgctggcaagggcgctagttgggggtggacgttgggcccaggggtatctgacctgcgccgctgcagccttctcgctccttctcccagcttgaacggctcatcggctgtggtcgtggtgggatcacgccccgggagaggagaaggatgggctcagggaaggggctcgggctctccagaaatccggcgtgcaggccgggagctgtccagcctcg

SEQ ID NO: 5346 - DNA, 1513 bp, Homo sapiens
gcggggcgggccggggcgtcgctgcgggacggcatccaagggcgcgcgctgcgtgctgtccccgcggcctcccgggcgccaccggctcggccaggccccgggagctgcccgccctaggccgcgggggcgccccgggctcgcaggatccgaaaattcccttcccgggccggggcgggtgagcaggcgggcgctgggctgcgctcgacgcctctccaggccgctcaggagagcctcgagggctgggagaagccgccggggcggttgggctggacgagcgagtttaggggccaaccgtctccacccgccggccgcgctgcagagcggtgctcccagggctggggtctgcggcgaccccgctgggaggaagggagagcgagaactgagacgcttgccccaagttgcctggagccaaaggcccccgagagcgtggccgtggggctgggtcgctggagtggccgcttcggcccagacactcgcacccccggcggtgcggcggttttcacgcgcgcactcactcagcgcgcccgggggtctgaggtcgccgctacggcgcctcgccccgggcagcagcaaccagcacgcaggcacccctggaacaggcgggactgccttcccgacgcgcggcctgcgcccaggcggcggaggggcccagcccccttccagtcctcggctccagggcgcagggccacgagctcccgctcccaccctcggcccctggcacccggcgccggctccgccgccctctctcacacgcacccttggcagggccccgcggggcgccccaaagcttgggggcagctcccaggtgtctctgggaagggaaagaaaggccacaaagcaaaagaaggagcaaagagaaggcgagggaggagcaggggcccgggtcctgtggactcgcctgggctgggagtggggacactgagagggctgcgaaggctccgggggtcgcgcgtggcccgcaggctcacccctggcccgcggctgcccttccctccccttcctgggctcctggcccctctcagtgctgttcctttctcctcccctcaggccctctcctctcccgcgcagggctccgtcctggggattaagagaaaggagggaggggaaaggggaggggaagggaaggggcggaggagaaagagggacgatccttccaaaggcgggtgttgagtttcagctcaggaccctcgggtccaactgcctgtggtaccccccacaccccccacccccgtcccgccctggccctgccccagtccccggcgccttcctcctccggactccgctgcatgcctcgcttgcggtggtccgatcggctttctccgggagctttcctctccccgccacgcccccgtctccccggccgtccccgcgcctctcggcctccctttcattagccccacatctgtctttcccatgggagggagcgcgcgccttccgcccagcggggcccttagcagagcctctccaatcctcggcgcctcccctacacagggttcgctgggccgttcttgcg

SEQ ID NO: 5347 - DNA, 3541 bp, Homo sapiens; identical to SEQ ID NO: 5345

SEQ ID NO: 5348 - DNA, 558 bp, Homo sapiens
ccgagagcgcaggaccaccaagagaggccgggccacctcctccgccgtccgctgacttctaggggctgggccggcgcacagcaagggggttggaggtggggtcgccctctcccacgcggctgggtttccaggcggtgtcctgggccgagccgcttggagatcctagatcagcatgtgggtgggaaagggcgccccgtcctgggcccccccgcccctgcgcgcagagcagagacgcgcagacccgctcccactccgcttggctcccttggagcagccccggcggcggcagcgatgggctgggaggggccggcacgctggcctgcgcgggtccccagccgcctcccgccacccggaacccctctccttcaagcgttgaccgccgacccacagctccccttcaacccggggcgagcggggttcttaccatacacctcccctctccgctcggttccatccttctcccgttctcctctaggcttcacggtttgcaagcacccttgcaaataactcctagcccacccacaccgtctcgtccgcactttccgagagccaggcacg

SEQ ID NO: 5349 - DNA, 7244 bp, Homo sapiens
acgcccagccagggcgcagagagagcgctgggcgaagaggggtcgatggcccgcgggaacagggctggggttcctgtttggggaccggccggctgccaggcccctcgccctactgcttctccggagcgccgttgaccataggcccgtacaggccgccgccgtaggtcggctccttgtgcaccgccgcagcagcggcggccgagcggtcacgcatgagatcgctaaaggcgtagtccatgggtgggcggaagccgagcgtgggcaccaagccggcagtggagtagggcgccatgaaggccagaccgcggctgtgcgccgccgccgcggagtaggccaggcgcagggggctgaggccgagcggcgcgcccagcgggtaggcgcccgcgtcggcaccgaagtgactggcgttgggctgcagcggcgagaaggccgagcggctgctcagcgagcccagcgccccaggcgccatggcgccggccagcaagggtctgtggtgcggaggtgcggcgggccccgcctgcagcggcgcaggcagcccaggccccccggcggcggcggcggcggcggcggcggcgtcgacgcggctgggccacgcgtcgtctgcagctgctgcagcacccacggcggccttatctgggggcgccgcagggcccaggccggccgccaggcccccacggtggtggttcagcacctgctcgatggcctgcaccacgtcgccgccgcagccctgcaacaccagctccaggacgcctcgccggtggcctgggaacacgcgtgtcaagatatccagcggcgtccgctgccgtggacccgagcctccgcccagccctggcgccggcgcggcctcaccctcttctttgtcagcctctgaaccggattcagagcccagagggctagcggagcccgggctgtcctcctcgccgccgccgccagggccagcgctgcctgggcagctgccacctgcctctttggaggcccgagctaggggcgaaccagaaaaggactcgccatcgccgttctccgagcctgagccgggccgcacctctggggacgacgtcccgggccccgagtctgcgccgtcgggtgataagggcttcaccggcggcggcagcgggctgcccgggcggcctgcctgcagcagcgtcttaggaaacaggtcaaacttctgcaacttggcctctgggaggggagaaaacgtgtcgtgaggagcggttagctagaagacagcagtcacagcacctcggccctttggatctcagtttcctctccctcagccccacagcccttattcactaggctccagtgcccctctttctttttgctctagcattccttccgctctgagcccctacagccctgaccccagggctccctctctttctgtactcctcagaaccccaactacctgtgccctgtaaactcgatgttcagtgctgctttccccacgtctgtgccccaacacctccacccttaactgcccttccagtcctgccctgccgtggagaagtggccaggtccagggttcaaacaagagacaacataacttctgcctaaccacgctgtacagaagagcccactgtatagaaaatgcctgccctggcagtgcagcctgtaaggaaaggcgccttggttatctaggaggtcccaagcttctctacaggcagaagtacagcccctgtttctaatccaccctttccaaaattgagacctgagaagttcttccctcccaagtttagagcggatccctcctttccctcaacggctctggcctaatttcttccctccccacaaaaagccacgggggtccagaaaaagagggtggtgctaggcaggcagtaggaagcgaagaggaaaagacataggaaagcagacctgagaaaccagggagggtgcggaagaaactagaaggagggagggcgcagcaagcggttgtccagagggcgttaggaacgcgagaaggggaaaagaaactagggcgtctcagaacctagggcgtctcaaaacctagggtgtcagttaaagggggggggattccttaagggagttgggaaggagcagagggaaagggcctgtggagaagcgcagagcgaacgaagatgcgcaggtttccacctggggagaagacgaagcaaagaagcagggacctgcctgcgtttgggtagaggcgagtaaaaaaattaaagcgtgtacatttcggcccgatgcaggagaaaggggtaaagtgcaaatgctccagaagcgggagaaaggagagtttctgtacccacgctccatacccgaggctgggcgagcggtgaaccctagcagtcgcggcgactggacacgggggttctactctttctgaaccgagacaagcccctgggccccgtgccccagagctacgatcctgctgcccctacctgcggcctggccgcgctctcacctgagccccctgcgccagctgctccgcctccggtccccgcgggcgctcccgctccaggtcccccgccgtcggcggcgcacactgaaccgaagacctcgtaggcgggcctcggggggatgatgccgttggcggcggccagcgccagcccctcggcagtgccgtagagcagctgcagctcgcgcgcctcgttctcctcctgcgcctgctgcctgcgcagcgccacctgcgccgccatgacacgctggcgctccgcgatgagcgtgcacttggcgcacaggcagtccttccagcgacagtagcgtttgtggcccttgagggccgacaccacgccatggttgcgacagcgcgcgcacttgggggtccgcgggtacttctcggctgcccgcagcaacagtggcggcccccgcagcaagccgcctgccacgctcaccggtagcgatgcagcggccgccgcggctgccgccaccgacgccaccgacgccacaggcggccccgtcgctgttgccgccgccgccgtcgccgcgccgggcacgctgggcagctccgagcgcagctccatgacaggacctgacgggaaagaaggtgggagaggggagagacctggtgaggagcacaccgcgcgctaggccaaagcgccgccttgaggaacccaagctggagagggaaatttgggccgcggaggctgggctagaggggccagaattgctgggaggaggtgcagtcggaacctccttgtgagccctagcaccttcaccccagtctggccatggctgctcttagacctgatatacacgctaggggtaagattttgtctgaattagtgattccgctggaaaaaataaagagacatgtaaagtgtgaaagtcactgattcagatggctgtaatgagaatttggaaaagttaagatgataccccaaagcttagcctaattggggtgagacgggtgagagaaatgctcgtttgacgggactgggattagagcgacagttttggcccagaagttaggctgatgccaagggcaaaacaggaaaacccggagcaaaacggtcagtttggtggaagggtgaagaggagagagatgtgaaggcgcagatgtgaaggccggttgggccggagttttgtttctttttgtttgtttatttttaatgcagtttggggcagaagctttggagagaaaaatcaacaacagaaagaatagctttaggaagcagagtgaggacgaggaaacaacttgggcaaagttaggcccagtggctctgggacccgtaaaaatgtgagcgccaaaagttccacggtgagggcctccagagagtgagagacaaaatgtatgtggaatttagcttaggactgggaagtattaaagagaaaaattcggccaaagaaactttctgtataggcaaacccagcccaaagatgagcttcatgggcaaggaaaacagtgaaaagcagctgatctgggtgtccgggatccaggggccgcgcctgggagaggggaatgtgtaagaaaaaaccccacaggcaaatgctgggggaggggattgggtaaaacctgtggtgcagttttttagcttcgcagtctggagtagtagtcggggcggaagacgtatcctgcgaaaagttaggcatttcgggagggggatctttctcgaagaccacctcacactgccctcccctcccctccgggtttagggacagagtcgtcagacacgccctccccgtcttggggtcccaggggacccctctcgagcgcaggctcctgcgttctgatctcagagttggggtcctaggacacggatggcccagcaggccgcaccaagccaggggagtcgccttcgcaactggccataaacggacaccagagtccctcccacgccgcagccccataaggcccaagcaggcccagctccccgcttctgccgcggtctcctctgcttcccgcgttccccgtccctgccagagcccgcgacagagtccttgtgtctccgtccgagagtcccagacctcctctctatgagcgttgcctcctctcccagacccttcgggcgtccctaaggcccacggggcccaggcctcctcaacaggggccgcagaccaggtctccacccactgctctccctgcggccctcaactacctgccttgggctccgggatcctcctcctccgctggcgctgcacgcgcctcccggctccactggcgacgctggagctcttggccgcttccctttgcccccggccccttatctgaccacgtcaccctccttcagtcaccatgtccgaacttccggacccctcagaacgcagcgcagtccaaccctcccttcagaaatccgggtcggaggctcgtctgcgggccgcgtggttggaacccgcgacctgactctcgccgtgccgggtcccctcgcggtgcgcgccggacgctgcgcgcagccggggcccagttgcccggcgctgccagactctcaatgagccgctcgcccgctctattgttggtccttagggctccattagacagaattggacaacaatgtggcgcctgccattggccaggggaggcagacggcgctctgattggccgggcccgcgcccggggagccccgcattctgcagtgtccgaaagattcgaaactccaaaagctccactgcgtgcctctgggaggggagggggcgcgccaggaaaggagtggaaaaaagtgggcgaggaggagcgttgaaaatttcctgacaagtagtttccgtgcgcccgagagcgtgtgaattgctcctaattaccgtgtccggtgcgcctctctgcgtagacttgtgtaacctctcggcttctggggcgccggctcggctgcaccgctcttactggcctggggcgcttggcaaagccgagcttcccaagtggctctggagccctgaggcgggatggggggcaggtgacaattcaattactgcggtcggggtaggggcgggacaagggtgcgggggtggggaagggagggtgttcaaggcataaatgccaggacgatttttcctgccttcttcctgctatgtttcggcgcgctcccaaatccgacgagtttggggtagttgggggctgctttggttttttcctcctgtctccttaaagctcagttactttattttaaaagtcctgatacgatagtcatcctggagggtaagtgtggtttatgaagattttcgtgtttaaagagaagctcagcgaagagaaatgagattgcacttcctgtcggtgcccgccacgtccctcgcgccctgagcctttcctctccccgcccctcttttcgcgtccctcagccccttttgagctctcttttcctcacttttcagcatctcgatttcttttccgtggtggtgggattctttttgtcgttattgcaaatgaacaaatagcccccccccctttttttttcttttctaaacgaaagtaaaaagtggcctctgtgtctccgcagattctcttaaactcaggacgcgcatcggtctgtccgaccttcccggcaagagacaaagtcactgctgggaggccccctcggacagttttcagttttaactttcgccttattctcgtcttgtcttgatgtcacggccctgaggaacagctcgttctgcagaagaggtaacaggtttcagattttgtttcctttttgaaaggctgttgcctttcaaacatctggaattaatgccgcggccctcgggcgagtcgccctcggtttctgtagctctgattttatctctgtgtcttttcccctctaatttctaaagttctgtttttccctctaattctgtttttccctctaatttctaatgttctgtcactctcgtttttgttctctacttttctctctctccttcagaataaagaaaattcgtttaaataatgaggaaaatgagcgttcctgtcgttctccctccactcttgaccgtgcgtctctgcgttgctctttcgaacctccaggccggcgggaatctgggcgcgcagactcggcccgggtcgtcgcggcctcaggacgcagcccattccgcctggcacgactactgggccgcgtcttgtcagtctatcagcttctgagcccaggaatgggggtgggggaaggacggtgcgactaacgggcccccacccgaagaccgcagaacctggcgccccggaagagccctggaagatgcccaccgggaggctgaggctggagggaggagtgggtgggggtgattcgctggaggaccgggcggagagcttccagaaagttcaccaggccccggcgcgagggcgctccgacacggacaaggtctatgatagcgataaaaagctggttactcgctcccagaaaatgccacttgctggagtctgtgaatgggtttaggagagagaagggtgtcagcccccgcgagggtctcccgcgtgaagtgaggataagggagtgcttcagggataatatgtcctctaggagcgcaggacccagaccccaccttccaacacctggaggttccgaggccaagtatgtctagccccggctgcacctgggtaggtgagccatggggtcgggggaagagcgccgacaaccgccggattccgcgcaggggccgccaggcgcctgctcccagagctcctttggacaaagttttcgggaaattctattaaaccgaaaacgaaataaactatacaaatctgcctagcttttgagggggcggtggcccaggtatccttctcgcttgaggccaggtcaccgtgagatttccccactccggaccggggatcccgcagaagccaagggtgtagccacgaggactcgggaacccgaggcggcccagcagatgcg

SEQ ID NO: 5350 - DNA, 824 bp, Homo sapiens
acgcggactgagcgaggaaatgctcaagaccacaggactgaaccccccggaagtctcgacgctgcccagccagccagagtccagtcgtcgacgcggatgaagttgtttccccgggacaggaagggttaaatggctgcgcgtcaactcggcctcgactggggtgtcagggagcaagagccgcttgtctcgggggattccgcttggggggttcccaggggtcgccctggcgctccggccacaacttgggcggctctgtgcggcggccctcgcctgcgcctttgcgcgccacccaaaactttgcgcacactgcagccgccgccttcccgctcttcgcggtgagacgcgcgccgccaagtgccgcaggcagccctccacagccgccgcggcagccgctgcctggcttctggctccagacttttcccccactgcctccagttcccacccaggaggctccctcgcggccgcgagagctcggcgcccgacccacagtaggcagtgcgggcacagtgttgcagaccaccacctcgccaggtccgggcagcgcccactagacggacaggcgcccgcggccgcccctaccccggcgcgcccacctcgagcctctcacgccgcggcgggcgggcgcaacatattctcctacctccagccgccgaggaccacactctccgctcagccctctcgactcatcctccggctgcagtagagggcgagcgggctccgcttttgttccctggggctggcaggtccgtgtggggccagggcgcgcgggagacgccgcggagctgggtatcccggagaggggatgctcactcctagcggctccg

SEQ ID NO: 5351 - DNA, 824 bp, Homo sapiens; identical to SEQ ID NO: 5350

SEQ ID NO: 5352 - DNA, 1415 bp, Homo sapiens
ccgcgctgccagaagccgacgctagcgagggaggtgtgaagagttggccagaatgaccaactcctcctccacatccacctcctccaccaccggtggctcgctgctgctgctctgcgaggaagaggagtcgtgggcgggccggcgcatcccggtgtcactcctgtattcgggcctggccatcgggggcacgctggccaacggcatggtcatctatctcgtgtcgtccttccgaaagctgcagaccaccagcaacgccttcatcgtgaacggctgcgccgccgacctcagcgtctgcgccctctggatgccgcaggaggcggtgctcgggctcctgcccaccggctctgcggagccccccgcagactgggacggcgctgggggcagctaccgcctgctacggggtgggctgctgggcctcggactcacggtgtccctcctctcccactgcctcgtggccctgaaccgctacctgctcatcacccgggcgcccgccacctaccaggcgctgtaccagaggcgccacacggcgggcatgctggcgctgtcctgggcgctcgccctgggcctcgtgctgctgctcccgccctgggcaccgcggcccggcgccgcgccaccgcgagtccactacccggcgctgctggccgccgcggcgctgctggcgcagacagctctgctgctgcactgctacctgggcatcgtgcgccgcgtgcgtgtcagcgtcaagcgggtcagcgtgctcaacttccacctgctgcaccagttgcccggctgcgccgccgccgccgccgccttcccgggcgcccagcacgcgccgggccccggtggcgccgcgcacccggcgcaggcccagcccctgccgcccgcgctgcacccgcggcgggcacagcggcgtctcagcggcctgtcggtgctgctgctctgctgcgtcttcctgctggccacgcagccactggtgtgggtgagcctggccagcggcttctcgctgccggtgccctggggagtgcaggcggccagctggctcctgtgctgcgccctgtccgcgctcaatccgctgctctacacgtggaggaacgaggagttccgccgctccgtgcgctcagtcctgccgggcgtcggcgacgcggcggccgctgccgttgccgccacagccgtgcccgcagtgtcccaggcgcaactgggcacccgcgccgcgggccagcactggtaacctagccggggcccgagggaagcggagatccccggcttccgacgtccttgggcaccgtcgcctccttccctcctagggcatcccctgcctgaacgaagacttccgccgcgaagcccgatagatcgggggaaaatggggccttcgaccccagcgggctacctgaaccaaggcgtctctttaagtggggcgcccgaagtcattttggacg

SEQ ID NO: 5353 - DNA, 1415 bp, Homo sapiens; identical to SEQ ID NO: 5352

SEQ ID NO: 5354 - DNA, 3039 bp, Homo sapiens
ccgcgggaccagccttggctttcacatttcgctgcagccttgtcccgcgccgcactgtttcctccggccactgtggggtcactaagcgacctgcagaactcgctgaggcccaggctcctgcagctcccgccgaagactcaaagccagagtggacataaacgccgtgggcaggaccccggtgaggcctcggtgcccttcttgggggttctcagcgttggcccagaagcctcagcccgggtctaagaacttgggactctcctcgactttggcgatcggccgggtcatccggctcagggcctcagcggcagcgggcaaaactctagtaggagtctcttgccgagggcgtgtttcgacgtcagagccaaactcgggacagactagccaagcgcggacggcgcgagagtggctggcagcgccagcacgcagcctgggttcagagcaaggctgggcgctctcagcaaagggcggcctggggctgcgcgggcggcggactgcaggcgggagaagagcgaggtgcgccaggctctggggcgcgcaactgcccagcctcgtgaaagatcgcgccgcagatggggcgcagctgcgcgctcactcgtgtggactggaaacgctccgagccggttattttaaaaaccgggaaataaggcgggttccctcttcgcccgccacttcccaccaagtaggctgtgcggccctgggggctgactgtcctcaagcagccaggctccaccgcgcgccgcgctgcgccgaggtccgctctgccgcagggacgctggcagcccgttgaacaccggcaagagcgccagaggctagcggccgccaggatctctaccaggctctgctcgcacccgcctgcctccctttcgtttggcctgtcctccgttcaactgaaatcgttaattttcttacccccttgttctcattttgatatattctacgctttaaacatgctccgttttcttttgtttagtctgctccctccctctttgtcctttcccccttctctagttatccgtttcgttcgatcttgctcctgctttttttattcgttcgttcctcatttattcattttagttcatcccagctcgccgactgccatttaccctctcgttctcgccgcgctctccgttgttttgttcaatttcccttccccttttcttggttgtcgctcgctttctttggttttctttctcggtatttcgttgtcaaggccacccttgccgtcggatcccggggtgctgggtttctcccggccgctcgttccgcaccagcgctctctgcagttcgcgcggcaccggtgtggtccgggggcccgagctgtcggtgccggatgcggcgcgcctagcagggacgcgggcctgggggggtggctcctgcccgacgcggagcgctgagccaggccgggtacctgtctctggcggtgctcaccgcactgcgcggcctctgccgtctggctgggatcagaggagccaggccaactgcttctcattaagtcccaactgtggtttttatcaggaaagcctctttcaaagggcacagacacgaagctccgcggactcgttcatttcctccgttgacccacacacacctccccgccctcccctacacattcccaccgccccggctgggcgaaagccggagatgcccggccactccgtggaggcccgcgaggcgccagccgggcggcggcagggggttgaggcggatcttggaggatccagttctgggcctaggctgcgggatatggcagcgcagataaggtgggtgcagtgcggaagccgagacgccttacaggtcatagggtgcggcggacggccgcagagctgccgatcagcctgccaggcccctgccttcaggcgcattctcggatgccggcgcggtccagccggccttagcacagggcaccggcccgtgagcccgcggcgccagggggttaggctgcccagggctgctcctgactgcccagcggtgatgatccagcgcggggaagccaagactgccagaagggcggctatcatagtgcataacggcagggaggccagcttagtatgagaaataagaatacagttattccgtcttgaggacagccctggcattgcacgaccagtcgcggccagactgtgccagtctgccgcacaggcagcacccttcctgtgaaggctaggcccggggaggagagacgggccaagaccaggccgcagtccccagccgaccccgatttgaccactctaggttgaggcccagcctcagggccctcaaagggcgccagacacaaaagccgcgcttcttcgtcaggtctcagtgtggctccacagccctcggccgggtctgggcttcagggtaggtggcagttccagtccaacttcggcagagcatgctctctccttcccaggtccaactgctttcgggccccgactggactccgggccgtcgccactgcaccttccctcgacctcccgccttccattcccgccgccgaggaacggtggttcaccctcccgccccacactggcctttgcctggcccgggccagcgccaacccggcttccgtggaagccgtggcgaaaggcgagaggggcaaaaagttgagaaataggcgagcgggagagataagcaggaaggcccgggtgggcccgggtaaggaagaagaagagagggtcgggctgcgcgctacgccccgcgccgcgcgttaccttccgcggggccctcgtagaagtggccgccgttgagggccgggccgggcccgaggtcctgcaggtacttggcgggcggcttggccggctctgggaggtagggctccaggggcccgcaggccggaaagcgggtcagccgcgggccgcggggcggcgcggggtgcaggtgaggcgcagcggcgggggttccctgcgggcccggaggctcgtcccccgaggccacataggggccgggtgcaggccccacgcggaaaggcgcgcagtgctcggggtccatgccggctcagggcgcacaggcctccggggctccggggctcgcgctgcccgcgccgcctgtgagcgcccg

SEQ ID NO: 5355 - DNA, 1277 bp, Homo sapiens
ccgccccacgcccaccctctccgcctacgtcggccatcagagcctcgctcgctgcccgagagcctcgcattgacgccggcccgcgcgtgagtcaagcctgcgtcacggcgccccgccgccagggtggcctttcggaaagcgagggaacagtgcgcgcagcgctccgcccagctccgttctgctccgcagagccggcgctgccagggcgcagggagggcggcactcggccccagtcttcgcaatcccgcgcgctctctccgccgtgggacctgggtccccgcgccgctcccctgagccccgagcgcgcggcgggcgggagccaggttgggactggtggtgaggcagggagtgaggagcgagcggagtcgcgtgcgccggcgcgcagctccgggtcgccccagccccagccgggggcctgtggcccgggggaggagctgtgcgtccgcgacccgtcggggatcgcagctgctcggccggagtgcacgggccgagtctgcgcgactacccacgcgtgacaggtgagtcgctggccgcgccccgcctggctttaccgggccggccactgcaactttccctgttctggccccgccccagccagggagggctgaggaccaaggtgtgaggcggcgctgcccccgcatccgcccgaccctgcgctcgtcccgggctcctctcgccgctccagccgccgttgcctggcgacggagccccggggcccgctctccttcgcgcatcggggtccccagcggcgtacgcacgggttggacaccgggcttcagcttctggtgctcagaagggcccaagaactccggaggaaattgggcttagctgcggaggcaagcgcccgcggagaaccggagggggcctgtccggcccatccgcggcttgaaactgcgcgcccagggcgcagttccactgggagcctcttacgcagctggagaccccagccccagccgctcggcctcaggcctgtgaccttgacagtaacattggcaagcgaagcagaactgtcacgcccgagatgaatatttaattctcagtcctggggctggtcctcgctggattcggagctagcagagagcccttcctccctcgtgggaagcgcatctggggaacggaatggctgagacaggggacgtgcgtgtggtgcccatctggagggggcgccgtcctggcgggtcgagaggcctctgctgcatttatgcctgtgtgcgccgtgctctgaagcgatgctggatgctcgcagtactatgggtgggccgctccccaggggcgcg

SEQ ID NO: 5356 - DNA, 2394 bp, Homo sapiens
gcggcccggcctgggctgctccggtgcagcgcgccccgcacctggcctcgccggctcatctccggagaaactccttctgccctgtcgtggtccacagggttgacttttcggtattcgaaacgccagcagctctgggagcccagcggagagtcggagtcactctggggccagtgacgcctcccgctgacaagaatcccaaagttgcctcagcttcctcctctccttttcttcccgcgcccaaccctgacatcaccacccctccatcccccaggtatcttcctaaagccgtgtcgggactgcaacccgcccttcgatccagctggggccgggccccacttagccagtcaaggggcgagccagcgatgcgaacaccggtctggggggcacgactcccgcctacgttccccgcaggcgcgcaggggacccaaccccacacattttattctcgaactacgaggaaaaatactctattttttaaaaaaataacttgcttcctatacaaatcgctatttaaaaatatacaaataaggcccaagcataaaatctaactctggggctggcggtggagggaaggtgagggagggggctctggcacacgtccctcgtgtgtgcttgcgcgacggctgatgagggcgcgccagggaccctggcgcccaaggagatggggctgcagggaggcggacggagagcgttccaggcgttcggctccggccctgctccaatcgcagagcgcgctccaaagtcgagggtagccccaggtgccgccctgcggcctcaccagttccaggagaccagggcgggggatgctaagtgctggtaggcggggaagaggccaagcgccgagccgggaccgaaggcagggtagcccggcagagggcaggcggcggctggaggggcgccgcacttctcctgggccgcggcggttcccacctcgccaccgccgccgccgccgcacggctgcccgtcgcgaacaagcaccggcaccaccacgcgacgcagcaggccgggcgcggcgtgcagctcggcggatgctgccaggtcaggcgactccgccgcccctggagcgcgagcgcgcttcagcttgtagcgatgattctggaaccagatcttgacctgcgtgggcgtgaggcgaagcaggctcgccagctgctcgcgctcgggcgcagacaggtaccgctgctgccggaagcgccgctccaactccagcgtctgcgccttggagaatagcacccgccgcttcttccttttctcggcgtccgagcccggagacgcgggcctagcggacggccgctgcgacgagtctggcgggctggtctccaggctgctctcgtccgaggctagggacagcaaaggagacacgggtgggtgagacgccggaccctacgagggcctgctgcccttctggcgcgggcgtggaggcactggccagagggcacgcccactagcccgagactttcgggatgaggccatttcctgagtccacatctggacatccacctctccgaatgcggtgacctcattcataccacagcggtcatcagcgggcctgagatcgtgccccgaaaaaacccaccccggggccctcttaacatgtccgcaccggtagttgcgctggccgaccagtttatcacaagctgggtcaccagcgccggcctcctccaggtcgactgcactgcagtgtgccgaggtttgcggagccctgagtgggaacggggtgggggtaaactcgccaacactggccatcccagacggaggcctggagatcgtggccgtgttttcaggcatggagagggggcggggggtggggtgggggcggcaggtggcggcgcgttttaaatttcaattattccgacctctagaaatcgtcagacacagaaaccccaaatctcggagcaccagtgccaggcagggatctgctcttaggatgtgccgaccgggatgaatgcgttaggggttcgaggacagggctcccgtttccaagactgaggaaatctagactctgggctgggatttcggctttccggcccctcgtgggctgggcccttgattctgctgccccacgcctcctacctcccaccccgcaccgcaatccaccacgcacttacaagggtagtggccgcgctccgaatccagccaggcggcgcaggggtcgggctggggggcgcgtggttctggctcccgcctcggcaggtgttgcgcgtcctgctcgggtaaatctagaaggctgcgcacggtgaagctcaggcgtccagaggtggccatggccgaggaggggaaggaggcgggggcagggcaggctgggaacggaggggcggccgggacgccgctcctacggatgggcgtgggaggcgctcgccatgcgctggcagccgggatattagcgcatttacagcg

SEQ ID NO: 5357 - DNA, 1627 bp, Homo sapiens
tcgtggggccacggccacgctgccctgcgtcctgggcaccacgcctcccagctacaaggtgcgctggagcaaggtggagcctggggagctccgggaaacgctgatcctcatcaccaacggactgcacgcccgggggtatgggcccctgggagggcgcgccaggatgcggagggggcatcgactagacgcctccctggtcatcgcgggcgtgcgcctggaggacgagggccggtaccgctgcgagctcatcaacggcatcgaggacgagagcgtggcgctgaccttgagcttggagggtgaggcccttccgctcccgccccattcctgtgtagcagcgggtccgcctcgcctgggtctcccagggctccttcccagtatctcctccgcacccctggggaccccagctccctctcccaggccgcgccgcccttcctccccctccgctcccatccgctggccctccccaggatccccgccaccccctaggtgtggtgtttccgtaccaacccagccggggccggtaccagttcaattactacgaggcgaagcaggcgtgcgaggagcaggacggacgcctggccacctactcccagctctaccagggtgagcggccgaacccagcacttcccaagccccgcggagctgtctcaggggcccgagagagggcgccaggcgagctcagtctggctcctgcctatgacgcctcttatccccgacctccgccgtctcccgccagcttggaccgagggtctggactggtgtaacgcgggctggctgctcgagggctccgtgcgctaccctgtgctcaccgcacgcgccccgtgcggcggccgaggccggcccgggatccgcagctacggaccccgcgaccggatgcgcgaccgctacgacgccttctgcttcacctccgcgctggcgggtgaggcgcgggacgaaggcagggtcttggggaggggtctgaaaaatgtgggggacgaggagtggacctcagcttgagatcagggcagggtctccgggtccctccaaggcaccgcccccccatcagcccgcccgcccgcccaggctccagctcacctctccaaaccctccctgcacttttgcctcgatcccccaactcctcttacccaagctcgatccagcacctctgcggtcccgcaccccaactccgcctcctgggtgtcagccgcccctctccgcccaccctgccctcggtcggtgacccgctgtggtccccaggccaagtgttcttcgtgcccgggcggctgacgctgtctgaagcccacgcggcgtgccggcgacgcggcgccgtggtggccaaggttgggcacctctacgccgcctggaagttttcggggctagaccagtgcgacggcggctggctggctgacggcagtgtgcgcttcccaatcaccacgccgaggccgcgctgcggggggctcccggatcccggagtgcgcagtttcggcttccccaggccccaacaggcagcctatgggacctactgctacgccgagaattaggcgcccaccgtgtcccctccagcgcgcgcgaagaagcttgggagtcgtggcgggggtctctcgccacccctttccggagagcctcccctccctccagacccggagcg

SEQ ID NO: 5358 - DNA, 271 bp, Homo sapiens
ccgctcggtggctgccgcggcctcctccgcgctgctctccacgcctggcttattatgcacgaggcaggcaatttgccttcctccccggggacccatctcggagacaagaaggtagtttgttctctgtaatggcttctgctggagtgcggcggggcccaggcgcgagcgggggcacgggcggggagttggcagcgaaggatgcgcccggcgccccccggcggccgcccggagcccgaggtcggcgcgggaggagcgctgactccgcgggccg

SEQ ID NO: 5359 - DNA, 884 bp, Homo sapiens
acgccggttgtgaaacctactgaagtgagcggcggcgccaggattcctgggaccccgacctctttgcagctcgcacagctaagggcgagggcgcccttcggcagaagcagcaaaccgccggcaagcccagcgaggagggctgccggggtctgggcttgggaattggctggcacccagcggaaagggacgtgagctgagcggcgggggagaagagtgcgcaggtcagagggcggcgcgcagcggcgctccgcgaggtccccacgccgggcgatatggggtgcctgctgtttctgctgctctgggcgctcctccaggcttggggaagcgctgaaggtgggtggaacgagggcgcttgagtgcactcgcgggagggcggagagagggagctgggtagggacggggagggcaacgcctgatggggactggtgagacccgggacgcactggcgcgatctaggtagaaaactcgctgctccctggctccggggagaggcagcgcggcacagagttcgctggcatcagccgcctcctgaagctcatctcctcttgtttctttcttccttctctttatgctggctgctctcccggccacttgctacacgcctccaatcttcattctctcccagtcccgcaaaggcttttccccctccgctgcctccagatctcgtccttcgccaatagcagctggacgcgcaccgacggcttggcgtggctgggggagctgcagacgcacagctggagcaacgactcggacaccgtccgctctctgaagccttggtcccagggcacgttcagcgaccagcagtgggagacgctgcagcatatatttcgggtttatcgaagcagcttcaccagggacgtgaaggaattcgccaaaatgctacg

SEQ ID NO: 5360 - DNA, 1007 bp, Homo sapiens
gcgacggtgtccgtgcgtttcttcactagtgcatgtgcgaggagggctggaggcatgagcgaaagagggaaggcaatctcggtctccaaaaaatccaggggactctccctttcagcacaagcgctcacacgtgcgctcgcgcggacacacacacacacactcacactcacacacaaataaatccccagcacctgcctcggaaagccctctctcgcaggctggcccgaaggcgcggctccgccagcggagagcctttggatttaccgtggcattacttttaattaactctgcggcgcggcgcggggagcgcagggtgggccctaatcccgggcccgcctgacgtcacctgggaacgcgcggcggcgcggggcggcgcggacccgggacgacctcgccgcgacctggcctcgcctccgcccgcgcggggctttgctccgcgggaattaaaggaaggagaaatgttagtacacttttaattggaaaccgagttcttctttcagagcggcttgtttactcaggattgggcattagaactcaggggaggctctaattgaagtgacggctttggagattatggggaacatatggccctaccgccgggctctttatctgcattttctcataaaactgccgtccgtgtgtgtttctgcgcctggcctcttgcatttctaaggggcctttgaagacagggccgaatgcgcgcgggggcttcaggcactttgcgctccacggcgggtcccgcagcccggcccgagccggccctggaagcttcgccctggactagactggcaccgacgccgcccccagcctgagcgctgagagggaaaacgagagctagaaaggaaagaaatcggactggtgactgcctggcaggggtgtaattcaaactgttgtgagcagacggcaggagggagttgccaaggtaacgggtgattcccacccgccgccctttcgctaaggctggggagagggaagcctccgcgtgctgggttagggccaagcccgcg

SEQ ID NO: 5361 - DNA, 2191 bp, Homo sapiens
ccggacgcgaccgcccgtagcctgcggcccctggcggttgaggagccgcggcgatccttggtcttcaccgcagcagccaagcccggcgcgcaccaaccggcgctgctgaaagttggagagctcccagctcgccgatagaattcggcggtgggcgccaggggaatcccttccagtgccgcaattaggaaagttttaaaaagtaaggaccctagacagacaagagatccatcctttcctttagcataagaaacaccccgcgccgcgccagccgaacgctgctcgcacaaggctatccgcccttcttggccgggacgcactcggtgccttccagctccccaccagaactggtccagggggcgcggaaacagagaggcaactgtgtccggcttgtggttccagacggaaacgcctccgggctccctggcccgggggacaagggttcgaaacttcaacagtcgcgagggcaaggacagaactaccaactcccgctcggatgcccgggacctgctcttccaagcccgctccggtttctccaaaggacgcgcggcacagcccatgcgcccccggcactccactccactcctctatggtttcccccaaactcttcccggggagccccacaaagcacagacggcgccctgaaactcgccaggcactcgccagccatccccacctccgcctctcgaaccctccttgtcgcgttcttcccgccccgcacctttctcctcgcgtttctgggaagtcagaagcaaaccacgagaaaatgccttcgcaaggagcctccctacacccgccctgtcactgaaacaaaagcgtagggaggagggaggtgggagaggaggcgggaggaaggtttagaaagacgatggggacagcagtaggaaggagctggggaggggggtcaaggtggcaagcagagctgggggcccagagtccgctcccgtgccgcgcggcgagtcgcttacatgcccaggtcgctgtaggtgttgaagaactccatctgattgcacgcctgaatccagcccaccacccaggtctcgtggcgggggatggggggcatgaccacgcgggcggaggctttgaagtagggggtcttgtagcgcaggacgatgggcgaggtctcctcgatgcgcgtggggcactggtcgatggtggcgcacacatcgtacaccacgatgttctcgcgccggatccgcgccttgcaggtgatgctttggatacagcccatcctgcagcccggtgccggcacggcgcggcgtggggcagcgcgggggcccgcgcgggcagccgggggcgcccgtcacgccggcatggcgacgcgccgctcgctcccggtcagactcagctcgcacctaggagcggggagccgccgggcatccttggggaagccccctcctcttgcagccgcgcggggtccccgctgccccgacgtccgcccacgcccgccccctcgctccggcagggcgcgcggagggtgcactcctaggaggcggcgggtgccctcgccggctccagcgcccgggcggagggcagggaggggagcggcgctgcgaggaatggtgcccaccccgggccggagccccccgcccctcgccggagaggaggaggcggcagcggcggcggcatggagccgggggagggcggcggtggcagcgcccggtctgtctgcctccgcggcggcagcagcagcagccgccgccgccgccgccgctgcatgaacctctgcaccacggctgccccccgcgtgcagcgcacccagcggcgggcgagcgggcggcccaagaggcaggcggaggcagcagcggcggcggcggcgaccggagctcccgccggccccgccccgtagccggaccacaccgacactcctcggcccggctgcctcggcccggggggcgccaggaggctgtggcccggggtggagagccccaacggctggagcagcacaggacgtgctccgcggaggaaactggctgtacgccatgagttttgtccctattcggctgccgtccgggtggggggggggtaatgtgtaagggtgggggtgtttaaagggccgctagcgccggggtggggccccgcacgtggggctgaggcggggcggggccctggtaggtggtgccctggggtgggggtgggggactagggcgggcccaagcgccaccgggtgggtgaggccgagcagggcgcggcg

SEQ ID NO: 5362 - DNA, 859 bp, Homo sapiens
acgcagaggccgtggcatctggccgcagctgggctgcagtgcgtgcgcgcctggcctggtggtccgatgggaagcccggggcggggcagccgcggggcgggggcggggcgtcgcggagataggccacgcccctgcccgcccgcgcaggcgcgctgcgggtcgttagctgtcagagccaagcggcgggctggcggcgggctccgacgtctgcgccaggacctggctggctgagcccggcgcagcagcagcagccagggcagcgcggcccctactccctgtcaggtcgtagaggcgagcagggaccagctggtcgccggcccctcgggcaagatggggaaccgggagatggaggagctgatcccgctggtgaaccgtctgcaggacgcgttttcggcgctgggacagagctgcctgctggagctgccgcagatcgccgtggtgggcggccagagcgccggcaagagctcggtgctcgagaacttcgtgggcaggtaagcgcgcagggcgcggagtaaggatgcggcagtggggcgaccccgctgcgggccgttggaacgtggacgggcagcgggagccagagggtggatggaccaggcgctgcggtggaatggggggcagagtggaatggggggcagagtggcggtgtccgtggggcgggcggggtcctccagctctgggcatcctccgtcccctgccaccccccgcctggtggccctcctgcctgcctttcatcgtgcgatacaaagccatttcctccctgtcctccagtcggggagtcgggggaggggtccgccccgggctcgacccccaccccctcggtgcgcgccagccccgggcagcctccctgcgtagcgcgccg

SEQ ID NO: 5363 - DNA, 791 bp, Homo sapiens
ccggggcacccgtgtgcgcgcgaggatttcttttgcagagaatgaaaccaccgttcctttccgtccgtggtctactccggggtccccatcccacgtaagtgctgtggaaccccggggtgatgagccccgggggaagccagcatctcttgccctccagtgccggcgcccggcagagccccgggactcctagtttttgccgccgctgaggacgcggcgcgggctgctggccgcgtcgccgagggagggcccggacagccctgcagcgcgtctcagcggagccctgggggccgcgccgctcctccaaacatgattcagaaccgcccgtcagccttggctccagcgcctggcgcgagcgaaccgggcttggctgtctcggccccgtctgaaccctgcgggccgcgggccagggcgcgccgggatccgctgcgccaggaccctgcagacccggccgcggccgggccgagtgcctcccgccggggccttacgcccacggtccacgcttgcaacaccagggctgtacggcgggtccgcagctgggtctgcgcctgggactcggggctccctgcgctcctcgtgccgcaccccttgccttaaccccaagcggacgggtcctggggcttcaccggccaggccggagccccagccccacaactccccccctcccaccgcactgccccctctgcgctgtggcgggagttggggactggggccggagaaaggagacgcgccggtcctcaagtctcttgagccatttcggttccgggcgcgccccccagggctgcagtcgcgcg

SEQ ID NO: 5364 - DNA, 586 bp, Homo sapiens
gcgaagaggagggagttccgaaaggagggaaacgagccggcaaggggcgacaggagcgagccgggaagggagagcagcggagggctgcagagctgcgggcgcccggaccgtgccacacaccccccgcggggcacggagggcattgcggggggagacacacaaagacatgcgaagaggggctgaacgaggctcgcgcacaaagacgccggggcgcacggcagctggggctgcacccaccgcccccgcgccgcgccgtgccggggccgggccagcgagcagcccggggctgagcgcgtggcggcggcggcggcggcggcggcggcgggcaggcgcgggacccgggtcgcccgcgctctccgggtgacccgggcccggcagcaggcgcgcgcgggggcggcggcgcccaagcccaacttggcctccgcctcgccctctgcccagcccgccggtgtcccctccttcccgcgatttcgtttcttctcacgctcccccccccgccccctcccgcgtccagccccgctctccccaccttgtaaaacaaagccggggaaaatgcctgcccgtgcagctcggagcgcgcagcccg

SEQ ID NO: 5365 - DNA, 1678 bp, Homo sapiens
ccgataggcgaaactgcaagaaccgggaggggcggctgcggcgtttaggcgcgaggcacacaccatacccttccgcagcttcccacctcctccagacgcacgtgtttaaagagtccctgctccaaccggtcccgccccacctccgctcggcctccagccctgcttgtactgctggcttcaagtttcctccgagaggcgggcgtgcacagctgcagtggcggcggcagcggccaccaagcgcccggcggcgcttcgccacccacctttcctcagcccccggcgctgcagtctccgcccgccggggagggcgcgctcagcggaacaggagtcgagggtggggcgccgagaggagggaatcccgggtcgcaccgctacagttctcgcagtggcaaaggcggcggcggcggcggcggcagcggcagcagcaggtggagcgagctacagcgtttggcctgaaacccactgctgcagccacccgggctggagttggcccgttgggtggagccagtgctcgccccggtccgacccccggtttccgggacacttgggttgcggaggccggctggccggagtcacggttggggacgggcgcgcctcggagcgcacggctgcgctggaagccgcgtctggggcgcaggaccaacgggacctacctcctcccggctacctaaagactccttctctcgggaaagagcgctgcccggctctgggatttgggaggagctcggaggccgctcgggcacctcgctggacactatccgtttgcgccccggtggcgcgggagggtccggagcggagcgctcgtctctcctcagcggtttagtggagaaaagcagagagctcttcctggggcgaatgggacctcctccctcggtcctccgtggagtcgtcgcatcgcttgtcgtgttggtctcgaggggctcacagcttggcactaatttgcaggtgttcgctgctgatttggtttcttcttcgatttgcggacggttccctccagcgactctcgacacacgttttcctgtcttcgccggagggccgggtctggggtcgccggagcctgcgggaatccagcgcttattcgctgaccctcgagtcgcttcgctagctgtgcgccctcctgggcactagcctggagaggagcgtgcagacgcggctccttggagggagtgcggtcctctagggaggcatcgggctcctaggggcttcttggcgtgtgtggtgggattggggtccgccggccatggccttcactttcgctgcgttctgctacatgctgtctctggtgctgtgcgctgcgctcatcttcttcgccatctggcacgtgagtaacacgctttggtctctcttctttcgccccaatttcgctaaatttccccgatttcaccccactttttccaccttgcgggcgtgggcgaaccggaaggttggaccttctgccgctccactgtcccggggcaggaggcagttcgctgcatcccgccgggcgcgccttcggtgccctggctggaggcgaggggccgctggtgcccaggtaggacaccctctgcagggcccgactgggcgtcccgggtcccgggcgccggggagtggcggctacaaccacaactaaccccttcctctcccgccccgtcctctcctgccggcgggaggcgaaggagaagcgccgccgtcggtcccg

SEQ ID NO: 5366 - DNA, 1600 bp, Homo sapiens
ccgacgacattgtcactggaaaagtgctggccacggcctccgccttaccctctccacccacgggttcggagcccccaggagcagtcagaccgatcaccgctcctgcagcctcatttgtttccggagagacacccacaagccagcccacggagagtctggactcgcccgccccagcacccacgcctcccccgcgcccggttccagcgccgcccccgacatccacccgcgggcagccccttaccgccggtatcctcgaagcgcgggggcgggcggtcccgcagcgctgcgctccagcccgcgccggcctcgtcctcctccggctcctgtgcgtccggggcgcggggcggtggcggggcggcccctgggggtcccgggggctcgcgctcgtcgtccgaggaggcggccgaggaggagcgcgaggcggccgaggtgctgtagaaggggttcccgccgctgtccgggccggactcgccgaacacgtcgtccgagatgtgcaggctctcgtagcgcgcgcgggcagcctcgagcagcgccggcgccctcctccgcgcgcccccgccgccctcggccatggccccggccgccgcccgcgcgcccgcccccacagtgcctcccagccgcacacgccgggccctgggcccgcgccgcggcccgccgccccccaccagcgcagcccgcagcacagcgcccgccgccccgtgcccggccggcccgccgtcttggccgcctcgggcccagcgcccggggaagcgccctcggagctcgggcgccgcaggctgcgggccgcggcgggaggcgagccgcgcgcggggctggcaggggcgacccagagcgggcgggacgcagaggctgcggccgagaccaggcgccgccgccgccaccgccgccaccaccgccaccaccgccgccgctgcgtctcctcggcgcccgccgcctccctgcccgccctctccacggcctccggcgctcggctgccgaccttcccgggcgcgagccgccagaggcgggccctgccgcccctcacctcccgcccgccggccaatggggagcccggcccggacagccgcgggggagctgggcgggcccggcgcggggaacgcccccaccctcctccgcggggcggggcggggcgcgcggccggggctggcggttagggggagggccgccggcggcagtgccggtctcctcctacagggacgcgcagcccgggaccgccacgcgcagcgcgggagggggagggcgggaccggggaacaggaggggagggggacccgggtgcttccagcggtccgggcccgcggacggagtgcgggccgatcccgctcactgtccccttccgcagtccgcgtgcagctccagggagctgtccgccccggtggttctgaaccaggcgccgccgaaacgctccaggtaggcggcgggcccgaggtcaccacacccgcggcggcggctgctgccgaggtttcctgggggtcactgccagctgcgccgcatgctcccataaatacaggggctgtccagcttctgggaatctcgctctaattaggagcccgcctcgccggtccactgttggtcgctggtcagatgctaactccgtctcg

SEQ ID NO: 5367 - DNA, 2394 bp, Homo sapiens; identical to SEQ ID NO: 5356

SEQ ID NO: 5368 - DNA, 1160 bp, Homo sapiens
gcgcgtccggtgccccaaggcttccaggcggagcgcgggcgcgaggtgcgggctccggggcggagcgcacgcccgggaggcgggaagtgggcagcagcgcccccgcctggcccctgtgcgccccgacccgacgcctccccgcccgaccaggtgcctcgagagcgcacagctgggagggctctcccggtcgcggcgagactcacgcctgcggtgtgctagggcggcggcgacggtgacgggcgtggggcgcggcgctgcctcggctgccgggtcgttgcggcgagcgcgcgggccggcctggagtcaccgggctgaaccgccgcgcctgcatcgtgccgcacgccgcggaggcgctcgggtacagaccgcgcgggcgcgcacaaagcggcccggggcggccggcgcggcgcagaccctcggtgggcagcgcactccagtcttcccaggctagcggctgcagggagctccggcccgcggcccctccgcctcaagtctgggagctgccggtcccactctgtctttgcctatggggattcgagagtttcccagcggcgcacccaggggcaagagcattgccgtgtgagtagcgccccgggcgtgggtgagcgagccggcgggcgggaggccggagcgccggggtagccctttgcagctgggacactgggcagtctgaggctcggggaagggcggcgcgcgcggtggagctgctcgggaagtttcagtcattctttccctcgccactcgccccaacccgcactgccccgagacgcccaggatagggcactggggacagctgcccggggaagtgggtgagtggcggcgggaagggaggagcgcgggctctgccgcggcgctcgcccccggagggccccggccgcgctcttgctctcgccctgggatctgctcctcacgaatcccctcctctctgtccatgctccccctgcccacccacctgcccgtggcgcctgcgaccgcagtggcatgaggaggtcaccggacgtcagcccccggagactgtccgacatcagcccccagctccggcagctcaagtacttggtggtggacgaggcgattaaggaggatctgaaatggtcgcgctccgtggaggatctcaccagcgggccggtggggctcacgtccatcgaggagcggatcctgcg

SEQ ID NO: 5369 - DNA, 588 bp, Homo sapiens
gcggggctgggcgtcccggggaggagggcggagcaggtgagctgcggggtgggagcagggagtgcacttgtacgtgacgttggagtttgcagcaacctccaagtaggaggctgtgcgcgcgtgtgtgtggagtggctgcgcggccggggaggatgtgcgctgcagggcggccgccgcagtgagcaacgcggcaaccggagcccggcgggcagccggggaggccgggactgagaggggcgagccgctggtgctccccggcggcagagggccgcgtcggccacgggcccgggagagacgcgctccagccggccccaggatgtaggcgatcggcggcagcgctcctgcaggcggccggctcatcatgaagaagcactcggcccgggtggccccgctcagcgcctgcaacagtccggtcctgacccttaccaaagtggaaggtaatgcgcggccgcctcgccccgggggtccctgcaccctagccggggaatgctgccaccctgaggggggctgtctggctgcggggcgccggggctgggggtactgctcccccaggacgcggctccgcagtgcagagcgccgccgcctgcg

SEQ ID NO: 5370 - DNA, 878 bp, Homo sapiens
gcgacccgcgactgcagccgtttcttaaggccagtccttcgctcgcagtctgtcccgggcggcagtcgtgtcagccccccgctaggacccgcccagggggacgtgggtaccgggcaggacgcgcgctctgggcgctggggacgcccgggacactcggggccccgccttgcgtcccagccccgggtcgcggcaccccggctcccgccccgcgcctctggagggaggtaccgagggacgcgcagcgaaggggctttgctaattgccaaagcaggaagtgagctcgtggaagaagcgaaggaggagaagaagaagggaggggaaggcggaggagggcaggggcgcgcagagccacggtttgctccaggcgcgtcggaaccgcaggacttttcatccccgtggtcccacggtcctcccgcgccccggaggcctgccagccccgctcggacgctcgtttgcccctaacccgccgccatggcttcaccggacgaccctctgcgcgcaggtaaagggacacagcgccgcgcccgctcctggagcgagcaccgcggggcgggagctcgggaggcgctcgcagcagccgcagggctatcgaggccgggcctcggcgacccccgagggaggcccgggaaccacccccgacccaggcgccagacccggagtcgcacggggctcccagtccagccccgcgagcggctgctgaccgcccctcccgcgctcgccagggcccctgccccgcgtcagccaccgcgcgccttccccctgcccatgccgcagcccccgtggcttttgttctggactcgggatgccaggttgagacacgtcctgcaaacctctggcagaaatgggcgcaagggggtggatttcgttttcgcctcccg

SEQ ID NO: 5371 - DNA, 561 bp, Homo sapiens
gcgcgggtccacgctggtcgctagcggcgccaactttactcattcgttaatttgctagtttttggactgagtaaaacagcccccaaagacgcgggcaaacgccgctctaaagcccactaccatgcaacgccaggttgctcggagccacgctggtggcacttccccttcgtgctcactctgcacaggcacctccagaaccccgtgcaaatgaaccctaccgggagacgcaggtgggcaggtcgggtcggcagggaccaagagcctgaaagggaacctgccctcccctccccgcagcccggtcattaaggcaagaaactgcaggcagagaagcccccgaatccgacctaggacgtcggcgcctgccaggatcccctcgcctgccccccgcgccccgcgcgcgctcatgccaccaccacggggagggtgcatgcggcaggtgcctggccgaggcccccgggagcgagtcgcccttacgtgctccagcttgtctttcctccgaagccagacgctggcgctgtagtcctgctgcttgacgctgctgtagaagttcgcgcccactcg

SEQ ID NO: 5372 - DNA, 1235 bp, Homo sapiens
gcgatcgcagggcttcgcctatcccttcctccgggacagtttggatgggagtagctggcgcgagggctcgttcccccgtttttgggtaattcctttggcactgggagacgagatggcctccggagggtggaaggcagtgccagcccggccggccactggggactgcggggcccggagacgcgcggggtccccggggagctcctcgccgccctcgccccacttcgtccgggtccctcaaacatgtcgcagcgtggctgctcactgtcccctctgggcaagaggaggccccagacatttccacgggatctgaactcccgagcgccctgcacggagcagccatcccgccagcaccccaaagtgaagctgctcacaacggacaagcccggagaccccatgagaggccggggtggagaagccgggggtgaaggggggcaggggccggcgcgccacgcggtccttacctttccgcttggacctccgcctcctcctcctcttggacttgcatttgagttgactgctcagccctccagaccctctgccgctccccaggaccgaggccatggccgagacccaggcgcggagcccagagccgcctccctcctgcacctgcacctgcctccttcccggcagccgccgccgccgctgctgcgaagcttgaggttgcaaacccgggagcggctcacttttcaggactgagcaggaaagcgcgctccgtctctctgtctctcgaattgttctctatgacttgctcccactgggctgggggcctcggctgggcgcctggagcgagctgctccctggtcagggagggcggggaagggcgcgcggcgtcctgagtgctccgagcttcccgcgggctctgcctcctgctctgggctcccagcgcagggaggctacttttgcgcctctgctagttgtttggcaccagccactttgaagccaatcacgcagggagcttgtctatttgctgcagcagcgtctaattagatccaatcacaactgctttctggctctgacatcagcagcagcaccagccgcaccgccgcctggccgcttgcaaactcagctcccgtttggacggtgaagctcccaggaccggcggctggagggaggctgctcccggggaacaaggacgcggcgcgggtgcgtctgggagagaccgggggagcctccaggagggaccctgcccgggaggacgaggcctcctgccgcagcctcgcggacagctcagctcg

SEQ ID NO: 5373 - DNA, 5964 bp, Homo sapiens
gcggcaaccgagccagatccaagaggggtcggcctcgtctaaattggtttcccaccaatggcctcggatcagccgcggctgtgctgcgggagccctcaggacgcggctggggttggtgcgcggggccccggaaccccaaacccggctcggttcggcaaggttcagggagacaaggtagagaaggctggggtgagcgagaagtcgggcggccgatcgtcagggccacgagcctcgccttgccttcttggaatcccacccaactttaaaggcccaaagatcctgaaaattccgaaagcgaaactgcgagctggtctccagaagtttgagaacggtctcccaggctttccagcgtcgtcccgggattctcggacaccacaaacgccatcaaccacgagcaccggtgtccgtggctattgccccgaatggtccccatccgcgtccccgggaactccctcggcttttcgcgcatccaggtccccagccccagctactggtgcgccccgagcccctaggtgccagagcggtggtcggccgggctcctgcccagtctcggctcctccctcctccccaccagaaggaaaaacttgggcccttcgagaaccctgtggaatgttctttgtaatcaactgtacatccgcttccacggcacggcctcgtgcaaaatcgcgggtttcggggccttggagcaaattgcgcttgtcagcggcgacgtcaggaggacaaggggaggggttcgcggctgaaactgcagcttcgcagcacagagccattttaggctgctccccacctcgcggggcccatgggaaagccggccccgggagggcgcgcccaaacgcaggctggaggagccacggacgcgtcctggccggcgtgtcgccatcgttcagcctcgctgcccaggtgggaggggtcacctgccgcggggtctccaagccagtgccgcttgctcccggcccccacccactgacagcacggcgtccgagtgaccctgtctagcctcgttctgcgctcctgcaaaccacgttgctgcgctaactacaaacctggccaacatgtctttgtaaccctatcatttaaaaacgcttccaggcacctggccgctgccagatcaggttcgcgggcccggaggaggtcctcccacctgcccccgccagccccggggaccgtgcgcggcctccgtgtggcccccgcccacgaggtccctcgggcaggaaccgccgcgcgacctctgttcagcggccgcgtcctggccacgggcgacccctgtcgggaaccctgttcccggctaagctgcgttcccgcattccggtggctctcacccgagctcgcgtttgctggctttccctctggctcctctgcctgaccccgattttgtctccgaactccactcccagatcctccccgccctggaacgccgacctttcccccgcacttcgccgcccactcacatcccccggcgactgcccggcctccatgcccgccaagacaagaagatgcccctctccgatgcgccgagagggttcctaagccgagcaagggacaatttcttccccaaacgctgtccccatcccccaccttccctagagcgcgaaacccaaaagtaaggaaggcaacccctcgcctcgaccctacgtgcttgtctcccagagccgcgcgctcccgcccttctgccccaccccaccaccaccaccaccactttggtcttctccaagcttcggtcccggtcccccacctcccaccccagagcggcgtggaggaaagcaggagcccactattaagtgcagcgcgccccctgcacacacgaaatccggctggcgtctgcagcccgattgcacccaatacccgggacagttagtccttttaataagcacctcctcgccccacctactcggggatctacccgcgcaggatccagcacacacaaggcgagagctagctcgtctcctagaaagacaaaataaatcactccctctgccctcatgtactttacaccacgtgtccgcagtttgtcacgtcaaatcatggcagggtctggttccaagacgcacacacacattcggggtggttctctttgacacacacacccaaaaaaactgcgcacacgcaggcctgcacactaatccacaggcacacacgacagttgcgtttcggtgccctggtccgggccaggggcacttctccatccctttcccccctagcaatggacttgacacacagactctaaccacggaaaaaaaaaaccggacagcccattccttctttttttccccacttaattcgctaaagcgcttcctggggtagccaaagagagtcgaaactaaggggtggaaacttcagctgggttttttcccacctcaaaacctttattttcagtttttaaaagccaccttagcccgccatattgaaactggcacggtttctaaagactccttccccgcagttgtggcgcttccaagaaaacacgagtacggatcaggctctggatgagtgtccggccaccgagaatcagccacttcccaccctccaggatcccccagctccctccagccccttcccaccgcccctggtcaaaatcaataaatacatctcgcagttcctacagttgcattttggcggatttctgcaaaacatacacacacatacacatacccacgcacgcatattaaaaaataaactccagaaccagctcaagtcagcaattttgaaagggggtcgaataagaggagacaaccggaaagcccctaagtgacaggatattactttaaagagaaaataatgaacaaaaagaccatcctcgctggagcacgctccaaaactactactgccaattttatttcagttgctcaggcaaatgtttccaagggagcgattccgaatgtctgcacgatttttacccccatgccggtctccgattccccgtcctcaccatctttttctcccacccaaaccaaaagaaaggggagaccccagcgcggaggagacgcgggagcgcggggtaggtagcagcggcggctgcgtcgctaaaatgagtgcagaaacgaggaaggtgggcggcgggaggggacaggctgcgcccggggaaggaggacactttgcaactccggacggactcccgcacggctcggcttttccgagcccggagacgcaggcgaaggggacccgggaagcaaaaatgacaacctggagcgcacagaggagtttgaagcttcgctcaagtgcagtcgctttcttctcctgcccttctctttcgctcccctgcaccctccccagccttcccccacccgccacctccaaccccagctccctcaggcttccttcctttttttttttttccttttttttcctaggctggaaaaagcccctgaccagcgcactcaacctgcgggccgaagggctgctctccggccagcctgggcgccggggacagcagccggcgcggcgtcctacctggtgaagttcgtcctgccctcggcgtggacccaggccccggtcgccgcccgggagggcaccggcctcgctcgcttgctcgctcgcccgcccttgcccgctcgctccccgcccgccgcctccctcgcgcgcccgctccggtcctccggctcccactacagctcattccaatatggcatcctctctgtgcgcatgctcggcgctcttttttttttttttttttttttttttttaagattttgtgtgtgtgtgtatgtgtgtgcgtgcgcgtgcagcgaactccttcaacgaccttttccagcgcttgcaaaatttcttaagccaattagcctgcgggacgtgatcggctccttccccagccagctccgcgccattccctgcgcctaagcaggcgggcacccccaggaccctgggaccttccacgcccacgcggcctcctccccaccgcgctccccttcctcctttttgtgagctccctccatacatgatctgcagaaagttcccatcgcgggcgtttccgcacacccctccgcaaggacaactgggcaaactcccgtttccctggctgcggttcgtgagctgggtttccaatggctcagtcgaccgtgtgcacaaacttgcgctttatccgccggggatcgctgggagcggagataaattcaatccccagggcaatcttggccccgcccgccccaccccatcctgtgcttaaatagagcctttcttgaagctgcgaacatttccaggccccttgggcagggctggaggggccgaggagagctattcgagggaaaggtgccccgaggggcaggaaattaagttggggctgcccgggcgagctgccaggtagccgtgctcgccacggcgtctcatggggcacctagctagtggcgggcctcatagggcgggaaaagaatcgtcgctcacaccccagcaaaacgtggccctcgacggtccgttggagagccccggcggccgtgagccccgggcagggctggacgtctgcggagccctcgggcactttgtcccgggcgcctggggaggaacgcggagctcccagggccttaggtgcaacggctgcgcagagcccaaacgaaatgtccccagtgcggaaaagccggtgacgccctggtagcaagaccaagagcttccgaagaacgctgcgcccttaactagggggcctcgcagagatgcctgtgtgggcctgcattgtatatttctgcgaaatagcgaatggacacgtttgctcagggtttttatggttgccaaagggggtaaaattacccagtcccccaaatctgtgtcccatgaatccctctcatagtacccctctccagggggccaagaggtcctccaggtccccgtgggttcgcagctccacccgcccttcctcgccctgcatccctaaggagaggtgtccgctctgaagggctaggggccagccatggagtgaggggaccggggctgaccacgcgcggcacagacagaggtcctcaggcgggccctctcctggacggtggggccggagctgatctagaagaaatacggagggacgtgccgagaagccgctctccttcgccgcgaccctggagagcgcctctccacccaaaggatctgccgagctgagagatccagggcgggcgtccgcagccgtgaggccccctgcgccgccagtatgggaagatcctgcctccttacaccttggagaacgctgggcgacgactaaagcgccttccgccggcctgtcactccatgtgacacaggagccacgtgagacccagaagagtccagcgactcgccgcgcggcgcactttaaactctagcctgagtctgcgacccctccagctctccagtccccagctgttggggacatcaagccggagccctgggctctctgccctgtgggtcgctgaaagcagagactcctcaaaccaaccgaaccgggcgcattaaccctctcgcctgcaccccgctgcctcccggttgagccccgaggcggctccaggtagaacctgctggactgactgcggcgtccagaaatctggagtgtgggctccagacactctccacggtttggccccgggtctcaacacccaagtcgcctcttctggctccttcaccacacagcggggcctgtggaaagggaggggccgagagacccgtcggcgcaccactgtcctcgaggggtccccaccctgtgcactgctgaagcgcagggcgcgccgcggcaggaatggccccgagtgcggatcccctgccctgagcctcccactcttggcccgcgctgcgcctacccagtggccctggccccgcagggcgacagcggctgctccctcccatttgcgtcccagaccgcgcggcctcgcttagctcccgggagccgacaggcgcttgccctggtgccagcgcagggcttcccgggggcttggggtaggggtaggggtgcgggggggaaggggagaacgtaatttccttctgcaggagtcgtggagacgtgagctgcaaccagccaccgcg

SEQ ID NO: 5374 - DNA, 5964 bp, Homo sapiens; identical to SEQ ID NO: 5373

SEQ ID NO: 5375 - DNA, 5964 bp, Homo sapiens; identical to SEQ ID NO: 5373

SEQ ID NO: 5376 - DNA, 703 bp, Homo sapiens
acgcgaaataaacgactccaggcccccagtaaagaagcagcggcgcgtcccttttccccggcccagcgtgaaaacacggaaggcgaagggctgccgtcagtcgcctccctgccaccgcgaccgggaaacaaagacacattaccttttattttttgcgcttccaagggatccgaggaacttctggctgcaagcggctggtaccccggaacgggcgtcccattcgcccgggcgaaggcccttggcctactaggcggccttggcgcccgcagctggcgagcccccgccccgtccccgccgccgcccccgccgcgggccctcggcgtcagcccatagcccgctcgcgcctctcgcgccgagcctggcccggcgccagtgagccccgccgccggcccgcccctcgcccgcgcccggcccgccgcatggtgcgcccagcgcgccccgagccagtccccggcgcgctgctaggtcgggtgctaggcggccaccgcgcgccaccgccgccgccaccgcccgccgcccgatcctggacaacaatgcgcgcccccgcccccccagaaagccagggacgcccccagtcgccgccagagctggctcggcttcccagcccctctccgtggcacccgcaggcgagacaaagttcgctcccggtgaggctgcgcgcgtccaaagcgtgcgggatgcccagcacggaggtccccaagcg

SEQ ID NO: 5377 - DNA, 1315 bp, Homo sapiens
ccgcgccctcttcaaacacacgcacactcttacactcactcgcgccgtcccagcctgcctactcccaacgagtccaagccggtgcagccgcgccccatgcccggctcgcagctcccgagccccagtccgcccgcgctgggcgccgctgtacctgttagtggcgcgcggtaccgcggtcgccgggctccggagcgtcctcagcgctgcgggggtgccgtgggtggcctccctgctttcctccaccagaatcctgcacagccggggagaaaacttaagttgctacaccccgccgggagctgttggctgaaaggctgggagtcgcgctccttgcctggcagggagatctcgcactccccggctcccaggccaggtccccagccccagagttggaagagccttagggcgggaaggaagagacagcaaggaccagaatggggagcatgagatcctgatgcggaacccgacggcaggtcccgctccacagctgcctcgcccacagcgatgcgcgctagagcccccgcagccctgaccggtccctctgctccccagccgccgtccaccggtcggagggtcgcctccctgcgaccccctcccccactccactctcaggccgtcgccgcccgtgggctgctccccgccgcggccaaaagtctccgcgcccgaggggaagcgatgggcggcttgggggtccgggggcgccaggcggggcgcgcggcgcggggcgcggccggcgggtgggtgggttacctggcgcggccgggcgcgtctgccgggcaccagagcaggcgcagcagcagcagcagcagcaggctggcgagcagggcgagcagtgcgccccccggccgcatcctgagccacaggcgccgccgccaccgctgctgccggggcgaagcacagcccgggcggccccgactcgcggctcccgccgccgccgccaccgccgccgtggccgcagccccgcgcacccacagcgttcacaggcggcagcgaggggcgcccgcagcccacccggcagagtctccgcggcgggcggagaagaagccgcgttcgggctcgccccgggctcccggccccggcccgcggagcgccgcgatcggctggcagatgacgattcgccgagctcgccgcctgtcctcccggaggcgctcggagctgctgcgggctccggtcgccgctgccactgctgctgccgccgccgccgcgcggggtcacctgaaggttggggcgcggaagctcaactccgtgctgattgggctccaagttttctgcgccctcgcctcgtcccgagtgcccgcgaatcccccggacgcccacg

SEQ ID NO: 5378 - DNA, 1316 bp, Homo sapiens
gcggccgtcggtttctagccttgggatcattctggccccgacacggagtgacaggggatccccacgcgtccccgcatccagggcgcccctttagctgcggcggaggcacagagaggccttggcggcgctgtggcttcggtcggcaccgggtcccgcgcagccgggccctccaccctgagtggagctgccttctaagcacccagcccctgccaatcactgtgcccaacaccaagttcccggggcgccctgccctgcgccaccgcgcgctcgctcgcccgcccgcccaactcacctgctgaagaccaggcagcccaggtggttgatcttgtggtcggagcggtggcggctgtagtcctcccacaggtccctgaaggccgtgatggccaggatgaagagcaccggcgccagtgccaggccgggctggaaggcgttcaccgccggcacgaagttgagcagcgcgatgaagacaaagtacacgttggccgggcggtggaactgctcgaacaggttcttgggcaggaaggacagcagcgtgtacttggtagtcttgagccggttgtcggccaggtgctgggcacacccgcgccgccgtcgccgctcgcccttggccgcgccagccgcagggtcctcggcgcccgggggcggcagcaggttggagcgcaccgtgcgcgtcctgccctctcggcgcctccgccgtcccggaggcccgggctcctcggtccccgccggctcccgctccatggccgcgtgtcgccgcgcccggctcctccgccgctcacgcccgcccgcgccggcctcttaggttatcatcactcgcggcccgggcgcggcggtgcgagctccccgcctgcgggacgcacggagaccgcggtcagcgcgccgcctggccggcccagcgcgcccagcccgcgcccagccccgtccactcccgtccagccccgccgcccggccgcagtccccagggcgcaagctgggcgggtgccgcacagagcccccttgtcctcgccgcccgcccccggcccgggtcgtttccgccgcggtggccacggccccgccctcgttccgcgcccggactgggccacgccggatagcgggaaacaaaaaaagcccgagctggaaacttcagagaggtttagtttcgtttcccagaagcatcagttcggtcccaaaacgctgcaaacgcgcgctgcctgcagtaggagagaggaaaccgcgaagcgcgagaaaaggcgcccccgtccccaagcagcccgcgcgcccttccaggggccagacctgctccatcctggacggcgaaacgacctcgggagaccccg

SEQ ID NO: 5379 - DNA, 1110 bp, Homo sapiens
gcgccgggcctggcttctgtggcttcgcaaacttttcagcctgtgtgccacggcgacgcgcagcggctgagtcggagcccacgcggcgcgcgcctcccgcgaggaacttttcggcttgtaggctgcttgtcactctcgctttccgacgcgcctccccctggctcgcgctcccggagttccctcccctcctggcgaggacctttcccggcgcccgcggctccgatccccgccgcgctgcgcccgctctcccggccccggctgccccgctgagggctcccctctcccaggcaccgcagccgcgcccccgcgtcccgcctcccgagcggctcgcttcgcccgatgccccggccccgtcccgcgcactgagcgcctggcagcagggcgccgagtcccggggcgctgcggggcgctgcgccgagaacggccgggcctgagccctgggcggcccccagagccgatcagagcgcggggaggcgggggcgaggaggaggggacccgccgccgggggctggctgcttcgctccgagccgacttttcgccaatggtccaaagggacatgtccaagtcgcctcccacagcggcggcggcggtggcgcaggagatccagatggaactgctagagaacgtggctcccgcgggggcgctcggagccgccgcacaggtagcgagagcgcggcgccttctccttcctttgtgagccgccgggcagggcaccgacctcgggttctcccggcgcctccactgcagggatctctagcctcgcacctcctcccctcgtcgcctgcccaccctctgctcctctcctggcgccggggaccctgcccctttgcgccttttcctggctctgcctcggcttccatttttctctgcttccgaaaagccagtggggaagggcgggggagacctgccagtcctcccagacttctcccgggttgctccagctggccctcctcgccccttcccgggagaggcacatggagagacatgaatcaggggagtggactggacctgctgaagatcgtgagtccgggtgggcgggagggggcccgcttcccgcagcgctttctacgatgccgactctcctggccacgctccgagccggggtgggcg

SEQ ID NO: 5380 - DNA, 1655 bp, Homo sapiens
tcgctttcgcccccgctgacactttgcaaagccgcggcggcagcggcggggaccacgctgcggtgcaccaccttccgccaccctcccgcgctgggctggggtcgagggggcttcgcagagtcggtaaccgaaccggctctggtttgctttctccactccctagccactaccagaaccagcctccgcgaaggggcgagctgtggttaaccctttcgtgcccagggagaccccgccagggtcggggcggggcgcgatcgccccccgcagtcgggcgcgaaggcggcccgggagccaggtgggtgtggggcgcagttggcggagctgcccagggcgtgcgagcaggctgcgaggatggcgccccggcggcgcggaggtaccgccccgcgctcccccgatagctccccggcctgtcccctctccccgcgctctggggcagccggctgcctggggcgcacggggctggagtggccctctccctccccttcgctaggctcccccggcttaatctgttggccgcgactcctcagccagccccgaggaaagtgcagccattggacaggtctgtgcgggctgccggtttcagggaggaaggtgggagaagcctggaggagcgaaggggagggcggagggaggagggaggagggtgcggcggcagatctggcaaattgcgagctgccttccctcctcaaagtgtggagaaggagcgcgggggagcgtggcgacggcagcgcctcctccgccaccaaactcctggggctccgcgggggcttggggccacctcctcctgagcccggaggaaccctctcccgataggttccagcgtgactccctcccactccacccttttcctttcttcttcctcttttttttttttttttttaaacacatttttttcctggcttcggacctcagactgctgcagccctaaccttcccagggctcagctctttggagctgcccattcctccggctgcgagaaaggacgcgcgccctgcgtcgggcgaagaaaagaagcaaaacttgtcgggagggtttcgtcatcaacctccttcccgcaaacctaaacctcctgccggggccatccctagacagaggaaagttcctgcagagccgaccagccctagtggatctggggcaggcagcggcgctggctgtggaattagatctgttttgaacccagtggagcgcatcgctggggctcggaagtcaccgtccgcgggcaccgggttggcgctgcccgagtggaaccgacagtttgcgagcctcggctgcaagtggcctctcctccccgcggttgttgttcagtgtcgggtgagggctgcgagtgtggcaagttgcaaagagagcctcagaggtccgaagagcgctgcgctcctactcgcgttcgcttcttcctcttctcggttccctactgtgaaatcgcagcgacatttacaaaggcctccgggtcctaccgagaccgatccgcagcgtttggcccggtcgtgcctattgcatcgggagcccccgagcaccggcgaaggactggcgggtggggtagggaggtggcggcggcggcatggcgaggttcccgaaggccgacctggccgctgcaggagttatgttactttgccacttcttcacggaccagtttcagttcgccgatgggaaacccg

SEQ ID NO: 5381 - DNA, 1655 bp, Homo sapiens; identical to SEQ ID NO: 5380

SEQ ID NO: 5382 - DNA, 304 bp, Homo sapiens
gcgggcgctggaaggggggcggggtaaatgcggccggcgcagaggtggggagcaggtgggaaaggtggaggcgggctcgcctctggagacctacccctgctcccattgtcctccgcctgccagcttcacagacaggcctgaacgcgcagagagttccttggagtgccctgattttgtccccgagagggcccccaacctccgcatcctcttagtggctgtcctggcaggtgcgcgtcctgcggggagttgcgccccgggggctatcgccgagcgggagctgcctcctggaaccctgcccaccgcg

SEQ ID NO: 5383 - DNA, 1666 bp, Homo sapiens
gcgcaccccctcccgaccgctagcagcacaagtggcgacattcccatggagcggccgcgccgcagcttgccgcattcagcgcggacggcctggccgcgcgcttccccgcccggacgaccgggcgcgcctgacactaatagctcgcggctcaggtacgagcgggcgccgcatttgactcaattcaattcacaaccggccgcgcttgcaggtgtcgccttttgaaaccgccattcaggcggccgctgttcacttctcgctgcgccgcgggttctgtagaagcgcaagaatggggctgattattccggtgcccacatgccgcccccacacgcccccacccccgtccggcgcaagacttcccttggccaaaagaggcgtttaattagttctggggccgcggagagccagcgtggccgacaaagcccggctccccaggtaacccgggttccctgcggacccgggagggggcgcgcggggccggagcaccggccttgggctgcgcgctccctccggcgacactgccgtccccctggcctccggcccggtcccccgcaggccaaaggctcatctgccgggcttgggtggcccgggccagcgccgcctgcggtccccgagtgcggctggctctaaggccggcgccctctccccggctttcagtgctcagagccaggccagcgggaaagaaggcagcatggtccgcaaaagacaggtggcagtggcagtcttgcatgatacttgtccttcttccctgttccccattttggggaaacactggaaacacttttctctttatgcgcattcgcgtctcagcaccgagtgctccaagccctgcgcgcagcgccgggcttggaaggcggcgaatggctgcctagccgccgcccctactagtgacactcggccgccagcccccgcccaggatgtgcacatctgctggcagcactggcccgggtggcagtcaccgggccacccactccacaggtacaaccgcacccaatccaacctggaactcggagggctgtgcgcgccgagctgggatcgcgccccagcgagccgggcctttggctgcgccagggcccaggccgagtcatcccgccgctcgcgtcgccgcgaggcgggacaccgtgtgatacctttgccgtgggctgggcgtcggccgcggggcggagagcgggtgtcccacctcgcctcatcatttgatttccgccagcgtctgaggacggcgcacccaattcgttccactcgctgcgctctgtgaaccagcggcgggcagggcgggggaggccgggctgggggagggcagggtggtcccaatcccccgcccccgccccgccggcctcgcggagcacaagtgttgggattcccacgggcaggcgtgctctgcggctggaggcccgagcgcccagggcccaggagacgtggcggacacagaggggtttgtaggcacggtgacctccgtgctcctgctctgaaagggcctgaaaggagcggtttatggtgcattaccagtcaagggctcaggtaccagcgccttgtgtcgggaacccgggcggccgcccgtgctgcaggtgtctgctatacaaacgccccgggagggggagggcaggccgccggattgggggccggggaggggcctccggcctggcctgctcctgccactcgcgcggtttcg

SEQ ID NO: 5384 - DNA, 5030 bp, Homo sapiens
gcgccacgtggagagccacacgaactctaagcgttcccgctcttcagcccctcgcgggaaaacggatcagggtgttaatgggtcctgattacctgcactagcgtcatctgcgagccgagggccaagagtatcttctcggtcttggtggggtacgggttgtcacggtgcttgtaaagccactgcttgaggggtcgcgccatgtcttgcagggcctgccgcttgtgcctcaccttcccgccattctgccgggcgctgggacatggggagaggaggcggccctggtgagcgacgcgtttgcccgcccggacgctccacgccccggccaagcccgggccccgcatccaaactgcgcattcctgccttgcgcccctgctttgcgcgcgcccagagtgtttgggagaggcaggaagtgggagccacacagtttctggatggggagatcatttcgataggtttatcttgaatagggggataccttgaacccaataccccaaggttagaggtttagaagacgaaggtcaagtgatttgaagaatactgctattccagtcgcgtatctgggcagcggggctaactgctacccttccctcacccgctggcgccgcaccctcgagtggccctggcctggcaggcctggcagggtatgcggctggctctcgaaacttccctcggggatctcttgtctgctcccagaggctttccgtcgcttgtggtcaggggaaaggtcgccgactggacatagggaataaagcaaaggagcattgccgccccggctctctttaagctatttcctttgatcttttaggaaaagggggaaactttctaaaggagttggtggtttgtggaggaaagctgcagaacccaaaaacaccgtcgggccgtttcccgactaagggagggttaaaagtacggcaagctctgtcccatcatgtaaggtaaaaagacctcaggaaaagcacattcaaagggggaggaggcagaggcagccaggagcctggagcgtggcctggggcgctgcgctccctcacgggtccgggaggtgtcgcgcgcggccgccagcgagcccagccgctccccgaggcttgcgcgcctgcgccggagcctcctgggtttctgcctctttaaacactttgaaatgcaattccacccgaaacgactggtagtaacattttgacgaaaccgaatctctgttttactaagcagcgacgccgcagaacaagcagctgatgcaatcgttcaggtggaggcggctaggacggccgcccctccccggcggggcgcccggggagccgccggatcgggccaggcagagcctgccctccactcaccggcagtctgagcagctggcccacccgcaagctaccgccccccccagcatacccctcaccccgctaaactcaaacccggccccgcaggcccggggcctccccctccgggttcgccgcgggcccagccgagccgcgctcacgcccgggactccctggcgggaggcgaccttcccgactccttgggccaggcgagccgcggggctctggcgaggggctcgagtgaccgaagagaagtccgcggagcctgagcctggactccccgactgctcggcttcgcctgtttctctgcaccgagctcagtcctttttcctcgccctcagccgcgcaccggcacccacagtccggagaggggcaaataacccccaactccgaggtccaggcagcggagggccgaggggcagctcctggcgcccttagtctccaccaagctctttggagctgccccgacgaattgatccctcatgttttaagataggagccccttaacatgagaatgcgcgagccctggaggggcagacctgcactcccagggaactccgggccctttcccgtccacccgcccgcgttgccacgggaccccgtcacagctcaccacccccacccctccgggccgcaggcgggcagggcccccaggggagtgcgcatacccggtcctccggtgtctcaggccgaggttgtccttgaggggcgggccgtcgggaatgcccacctcggggcgggcgtgaggactgtccaggacaccgctgtagggccggccaccccgctcccgctccgaggcgcctccgtcctcaaacagcaccgcaccgctgagcttgttgaagacgatggtgttcatggtgtcggttggtagggacgcgcggcgcggccgcagagcctcggggctgggccgccgggagctccgcagcggggctcggcttctaggagaggaaggtgcatctcgttacttactggctgagagtgctcagacccctgcaggttcagggccttgaacttggccgggtcgccgggctgcggagccgaggggaggagcggcgccgccgcaactggcagggaccctgcggctctccccagttggctacacgcccccgcccctgcaggttccccggacaggtacctgccctcttccttgcctgggcgatcgatccccccaatcccttcactccccagaactacaaccgggaatcattcacccgcagaggcaaaggaaacgaattcccaaacgagcctctgggtttcagtttgaatctgggagaggcatactccggactgcggagcgcgaccggcgtgaggccgcgcgtggttcttcaatcacagcagaagactaaagcctctaggaaccccaactcggggcgtcaggaggggttggatggaagggaagatttggggtaatgtgccaaccgtatccacaagaccccccagctcatgagtcccaggccataccgggatttgggggattttcgtgttttctagatcgtggatggtttggttgaaacccccgcatcttctgtccgccaaggtcccccggggtgaggttgggttcaaggacaggaaaaagttaagtggcgtcaggacgaaagcaccacttctcccccttctctcccagaatcttcctatcatcccccaacgcgccccgggaagtgcatggtcctaaggtccaaggcgccaggacccaggtccccagagccctcaatcagtgccattctcttccgcagcgcgggtgtcagccgcgagctcgtagcccctcgacacccgcctctctctggggtctccggggaccctttcagaggctgtaaaggtgtcagaagcccaaggcaggaggcagcttggtcggcgcacctcccgggccactgctgccactgtcggggagagccagcagctcacctctggggtcgcggaggccctgagcctctgcctgccgcgcaccggcgtcaggagcaagtccgcgcggccgcggagccgcagagttacagccccaaggcgcgcggcggacttcgcccgccccatctcctcgcctcgcgcctcgggacagctcccgtttcctccgagcggcctcagcttcgctgccagcgccccctttgcccgtccagccgcggcatgggctgctactccactaacacacgcgcgcgcgcatacacacacacacacacacacacacacacacacaccctttgcctcgccaagcgcccacactcgccaacgcccccgccccgcccttcggccaccgcagcagaggccacgcgtgacatttaggaccacgcgtgaccaccgcgatcaaacgacggctacggtctgtgttcgtagggaagtgaagtcagacctctgctggatgtcgtgtgtcccctaggactgcgtcctcccgcgcagacaggtacgtgcctggggtgtgcacatagcctcggtgataagtgtcaaagagaattttcgtgcttgcagcccctgttctacagtcaagactcgcgttggtgttttcttttaaaatcatgcccttagggatgtgtgttcatgctgctttatttgtacaagacacccttccccggcccggccttctccgagccaccccagcgcgtcctcctagatgcgacgacgtgtttttcctagcgaagtcatcacgaggttagccacctcggacacttccccggcagccccaagcccacgcagagatcgcagacacagacacccggcgcgctgtaggtctgcaggcagcaggctcagaggcaagcgatggcaaaggtccgagcgctgtcctgtcgcaaggggtccgggggcgtgtgaaccacacttgctgaccctcccaggactcccgcgcgcggccacccgcgcctcttctcaaatcacttaccccgattcactccagactgtggccggggaggtcactccctgcagaagtgtccccctcccccaacgccggcgaataattttaaagcaaaggaggcgcggccaggtgggctcccaagctccgcgcagacccttgggccagccttggccgctacccgagcgcctctccaccagaccttggagggaagttgggggaagggcgggagagcaccggcgcccagggcgcaggggccagagcgagcctggcgttccgccgcagccggctgagactcggcgacgcgggggctgtacctgtggctgcggggccgacggccggctgcagggcggctggctctcccgcctcgagactaggcgcactcccatccccgccgcatgttctccacgcgggctccagcgcgctcaccaccgccaccgccgtcgtctcggctttatttacccagcccggcgcgcgccgcccgggaacaggaatagcgaggccttctcatgtttcctgactgccggtcccagccggcgaacatcctgcgggcgcggtatccacgttcccgggcgggtggagaggaagcgtccgcgcccgcccggccgcgggggctgctgttaacccctagcagaggagccgctgccggggagccccgggcccgccgagtcctccggagccgggcgcggctcccagatccgccggccttgcagtcgtggagcagacggggcttttcccttcgcactttaggagagaaattggagaagctgccgggagcgctcggctccggctccagaagctgagaggctgcggtgcaaatcccgtgtcttagctggcccgattgccggaaatttcactgcgcgtggctaggcgggagaggccactgtgacgcg

SEQ ID NO: 5385 - DNA, 2868 bp, Homo sapiens
acggttctacgcgaggaagagggcggggagcgcggaccgggtgtgggaggccgaggtgacagcaggtgagggccgggtgcggatggggaagtgagacaagcaccgtgtgggtattactcattccgctctactaaggaggctgctggcaagcggaacttctagcctctctttcaatccagctgaagttcaatctcattgaagtcacttcccatcccggttcgcttggggggaaaccaggcgtccctggaagggaagggaagggagtccgggctgcgcgggtcaggtagcctctctccggtcgccgcgtgtcctcgccgtccccaaacctgcccttcccctcatcaagggaactccccggggagtccagaccgcgatccctttccttggccccggggtgcggggggcggacacgcgaggcgtgggactgatggtagccctgcctccaggaagcaggcaggcggggacctctgggcgctcggaggggcagctccgagggcacagggtacagggagaatcagccagatccctccctgccccgggcagccgcggcgggtgtggccagcgcggaggcaggacgccgccgagcctccaactttacctttccaactccgacagcccgtcgcctttctgaccgcgtccctacggtttcccggcatccgcctccctctccccaccacacctgaggaaaacttttccctcgcccctcaattcaaattcagcagtgcccacggttgccgcaaaccgcccggtccctagcaacaaggttccggccgtagagcgagagcctctaggtgtaaggaaggtgatgtcgtaaagccgggagtgtcgtaaaccaggtgcggtggggaggggggaggggtggaggcggaggggtgggggggaagggggagggagggggaggaggtgactcgagcatttagacacaagcgagaggatcatggcggatggccccaggtgtaagcgcagaaagcaggcgaacccgcggcgcaataacggtgagtggcggaggggaccggggagcggcggagtcagggggagctgggcagccggggcgcccccgggggtgaggggggcgagccgggctgggggcagccggggcagggacggcaaagtggagtgggaaagtagaaagtagtgctctctgcccccctccgctgccgccgctgccggagccgcgccgcggccgctcgctctccctgaaccgttatgtctcttacctggtctctctccgcctagcggctcccgccgcccctgccgcctccctggaccgttagccggcgccgacgccgccgcatccccggcgcagggcgggcggccgggacgcactggccacttttctggtcccgggtggagcggctgttgcttctttccgcacttttccccactcttgtgcccttcggcgcctccctctccccctcctcctggccccctcagcgcgattctccctcagcgcccaggcccccgggagccgcggaacaaacttgtgcccggcgctgaccgtgcaaagtggcttccgcgcgccgcggccccggccggcgccgtcgctgtcgctcgggccccgcgactcgggccgggctgtgggcgcgcggcaggcgggctgcggcggcggcgggacggggcggccgcgggttgcgtggggtttgtgcgcgcgtgtgcgcgggcgccggctgtgcgcgccgcgggcggacagggttcggccggcggcggtaaagttgggacccgcgggccgggcgcgctcgcgtaacggggattagaggcgcgggggcgcgggtccctaagcgcccctcctccctggcgcctcccgctgcccggcccagagccccggcctggggactccgcggcgagccccgcgagtggggtccacgtttggcggggcgcggcggggcggcgcggggaacaaggcaggaaaggtacccacttaacgccgccgggagccgcgcggatgggggcgagctgggcggcgggtgtgtttgcggagttgttacctgggcttagagaccgggaagcaccacagacagatccccctcccggggcagacgaggtctctgcgccgggatgggccggtgtgcgtgcgcctcgcgcttttctctttcggtttttggggaagttgttacctgggccggacgcacggagcgctgaagccggataatggggcttggatggcgctctgggtctcgggtggaaggagggtgggggagggggcggacggaccgacggacgcgcggggctgctacttgcaccgcagctgcagtgtttattgatttgtgctgctgtgccaagggaaacacacacccctctgcctggcgtgagagttaaaaaaaaagagagacagcccgagggatcgagacctgaacatgtggtggtggttgcacagtcgccttttccagtttggagagacgttgtaagttgattgtatttctggttatctcggggcgatgctatgctttctctccctctcgtgcagcagcgaaatgtctgctgattgttattgtctggacagttcctgtggcgagaggggcgagacttgtccgcccgggggcggcgggagcgcagggagagcagcccccgcctgcgccgccccggtacctgtttgtataataatgggcggcaacggccctgccgccggccgcagcccaggctatataaggaattacacgtacatttcggaccgaggggctcgctttggttcctgcgttatttttaaaacgacttttaagagaggggcaataaatgcgtctataatgggaccgctgcagcgtcgagaaaacgaggaaatacgtgtttaggagaaaactctctcgtgctcccccagccccaccccccgcgcctgggctccctttctccctcccctctgggatgcgaaacgcg

SEQ ID NO: 5386 - DNA, 2678 bp, Homo sapiens
gcggctggacgcgcgcccaggtccgcgtcgctgcggaccgcggagctgtgcagaagcgcggcctggcgggtggcacaagcccgacagctgcgccgcgcagcccgcccgcgcctggccaagagccccgcgagggtgtggggagaggatcggcttcgcagggagcggaggctgcgcggctgcatcggacctcacagcctcaagtcgcggcatgaggcgaactttgcaaagcgcgctctcgccatgcaccgcccgacctccagcactgtgcgcagcaggacctcggagcccattcgcctgtggaaaccgagcccgcagcgggaaggcagtgggtggagggtgggcaggcaggggtctggggtccgcggctccccaccctcgcgccttcccgcgccagtcccgaacgctctcttggggcgttcctgcccagttgtcccggctgacctcgctctgcagccagcttgaggtcaggcggtcgctctctgcaggtcacaaaccctcggcgcaaaagtagggctttgaacgcgacaccgcaccagagcgcccagctaagcgagctgcctccacccccactgtgtcgggcggcgcaaactgcgggcgcaggcagaggagccgcggctctgcgccgggcgggagccgaagcccagagcctcgccagggcctccccgccgagcgcacttaccgtcgctgaggcagagcgcggtcagcacgaggaccagcacgaccacgaccttggcgttcatggcgcgggcgggcgggcgggcgggcggacgagcgcgggtcgggggccggacgccgagcgggcaatgcggctgacggagagtgaaagtgcggcggtgggaggcgcgcgccgggcgctttagaggggagagccaggcggggcggggcggggcgcgcggtgaggggcgggcccggagccgagtgctggccgtggccggggtctctgacgcgcgactccctcggcggcaccccccacccatccccttcgcccctcctccgctccctctgtgctcccgaggcgcagtgcgctccggcctttgaccttctcaggctccgctgggccccgcaccgctggcccggtctgcagtgaggtccgcagcctgagcgacgccggctggagggccgcttattgtccctgtgacagggccccactggagagactgaggaccttaggcgtaaagtggggcgcgcgtggaaagctgcgggacggggcctttcgatggcgggaactgaatgagaaccaatgaaaagcaaacaagttagtcccgggcggagggcctgctggcggtggcggcccaaggcagccgagggggtcctgctttctgtgcgtgggggctcaagctcgccacctgcccggcttgcggcgcagccgccggcagagctcgatctgcgggaatgagacccgtctttgcagtcagcgtggctcggactccaagcccacggcgccaccagccgagcctcagtttcctcgcctgtacaaacaaagcagaaggcgccggcggctctcagtaaaagcgaatgtagcctttgtacttccgacctctcaatggtgaaatgagctaatcacaggcccaccccgcggagtgggacgggagattcaatgagacccgccccacgccgcgaaattctctgcatcgtgtctgacaagcagacagtactcaataaatggtagctgtaagtaagtcctttaaacctaagtacttactgccttacccaagaaaagctccgtgcgacccaaagagctgagaactcccccaccccgacctccgactcctaggacagtactactggcgtctgccttctgggtccagaaaactcttcccacggagccgtccctcggcggtgcttagccctccggatacccccgagacatcccagatggccccagtccggtggcgaagggagggtgcaggtcggcacccaggagacgtgggggtgaggagagcgcccctttgggcctcgctttgtgaccgcaggctgccccagccacctctctgtgtccttcccagcacagcgtccagcgaagtggggtcagtcgccgcgtccatccaggggcctgccctggggacacgtccctgtccctggggagtcctggccgtcggggagtgggcggtcagcggctgcattaggcgggagcggtcaacaggaggctgcgagggctccggaactccgctggtgggagtaggtgtcttctgtgcattttttttccaaaaccactttggccgttagatggctgtgggccggcactccatccatccatccatccatccatccacccacccacccacccacccacccaccctgggcactgggcttggagccgggaaccccactgacttggccctgctcttaaagaactgaaggcagtgaggtccagtgaagaaggcagccgtcgggcgtccccaggcctttgctgggctgggccggggagcctggccgctcaccggccgcagcgctggggctccggcgccctctggtggcggcgcctccctccccgctcccagagctctggccagctccattcctgcgcagctgatgaaacccgggagggcgaaggggtccgcgggaaatctacacccgggtggaggggcgccctggagctcggagatccgaccctgcgggagccgcgcgcagcctcgcttgcccttaaatctggccaaagcaaacgccatcgcctctcg

SEQ ID NO: 5387 - DNA, 2756 bp, Homo sapiens
gcgggagggcggcagcggccaggctaatattcgcgaccccgactggggcgcggcaacttctgccctcagtccccacaagctcccggccgcgattcgcggccgagaaattctgcggaggggccggtgggtcagagccaggccaggcagttgctgagccttcccctcccctcctggcgggagtgtgtgtgcaaggggccagggggcggagtcggagaaagggttgggggtgtccgtgtccagcgctcctccggacgcggctccacaatccagctgcgagaacagatggacgcagcggcggctcacctcgggggcttcctgctcgctgtgcgccgaggtccaggctgaagcggagatcgcaagcctctggctcccgcctctcccaaggggcctcgaggaaccggctgccgcgcccccttccccaagaggagaagagcgggcgctgaccccgcgagtcctagaaccgcgggcggggggcaggcagggggcggggggcagagggccagctaccggcgcggaacgcccatcccaggggctggttcaagacttccacaccgagagcccttcctgggcctccagccctggagcatctggagagcggacccctgcccggccacgccccgcccccggcccccgccccgccgacgtcgcattagcatgagcgacgtaagtggcccgggcaccactcgggggctgggactcgccgcgtcacagccccgagtggaagggaaaaaaaaagaggaggcggcggaggaggcaagagccgacgcgaggggaggggagcgcagcggcggggctaacgggcgggcaagcgggcgggcggcaacagcatgtccctcggccagcgcgggcggcctcttagcgcggcgggggctgctctgggcgcgccccgggcgaagtgcgcccagtctccggccccggcccctcggcgcgcccgacttcccggccgcccctgagcccagcagccgcgggtcccgggatcggctaagagtagctgcaacgcctcgccggacggagtcctttcctttcccgggacgctgggccatgagctccgcggccacctgaggcacaggggagtctgctcggccaggacagcctccccgaagtcccgtgccctcgcctctgcactgcgggacgccagcgctcggccctggcggaggcgtcctcggaagagcatcggggtgggggcatggaatccgcggaacctgcgggccaggcccgggcggcggccaccaagctgtcggaggctgtgggcgcggcgctgcaggagccccggcggcagaggcgcctggtgcttgttatcgtgtgcgtggcgctgttactggacaacatgctgtacatggtcatcgtgcccatagtgcccgactacatcgcccacatgcgcgggggcggcgagggccccacccggactcccgaggtgtgggagcccaccctgccgctgcccactccggccaatgccagcgcctacacggccaacacctcggcgtccccgacagctgcgtggccagcgggctcagcccttcggccccgctaccctacggagagcgaagacgtgaagatcggggtgctgtttgcttccaaggctatcctgcagctgctagtgaaccccttgagcgggcccttcatcgaccgcatgagctacgacgtgccgctgctgatcggcctgggcgtcatgttcgcctctacagtcctgttcgccttcgccgaggactacgccacgctgttcgcggcgcgcagcctgcagggcctgggctcagccttcgccgacacgtctggcatagccatgatcgccgataagtacccggaggagccggagcgcagtcgtgcactgggcgtggcgctggccttcattagcttcggaagcctagtggccccgcccttcgggggcatcctctatgagttcgccggcaagcgcgtgcccttcttggtgctagctgccgtgtcgctctttgacgcgctgttgctgctggcagtggccaaacccttctcggcggctgcacgggctcgggccaacctgccagtgggcactcccatccaccgcctcatgctagacccctacattgccgtggtggccggcgcgctcaccacctgtaacattcccctcgccttcctcgaacccaccattgccacgtggatgaagcatacgatggcggcttccgagtgggagatgggcatggcctggctgccggccttcgtgcctcatgtgctgggcgtctacctcaccgtgcgcctggcggcgcgctacccacacctgcagtggctgtacggcgcgcttgggctggctgtgatcggcgccagctcgtgcatcgtgcccgcctgccgctccttcgcgccgctagtggtctcactatgcggcctctgttttggcatagccctagtcgacacagcactgctgcccacgctcgccttcctggtggacgtgcgccatgtctcagtctatggcagcgtctacgccatcgccgacatctcctattcggtggcctacgcgctcgggcccatagtggcaggccacattgtgcactcgctgggctttgagcagctcagccttggcatgggactggccaacctgctctatgctcccgtcttgctgctgctccgcaacgtgggcctcctgacgcgctcccgttccgagcgcgatgtgctgcttgatgagccaccgcaaggtctgtacgatgcggtgcgcctgcgtgagcgtcctgtgtctggccaggacggcgagcctcgcagcccgcctggcccttttgatgcgtgcgaggacg

SEQ ID NO: 5388 - DNA, 990 bp, Homo sapiens; identical to SEQ ID NO: 5158

SEQ ID NO: 5389 - DNA, 829 bp, Homo sapiens
gcggtgcgacgaggtcaggcccgcgcccgccaagccctagggccgctgccgccgacggccatggaggacgagcagcccgacagcctggagggctgggcgccgctccgggagggcctcttcgccgatccccagaggcaccggttgcgcttcctggtggcttggaacggcgcggagggcaagtttgctgtgacttgtcacgaccgcaccgcgcagcagccgcagcggcgcgagggggcccggctggggctggagcacaagcccgaggccgccgtgtccccgcccagctgggccggccggctctcggccgcggggttccgcggcgcgcgccggcagccagcggcgctgtggccgcctctggaacactgcttcccacggctgccgccggagctggacgtgggcggcggcggggcctgaggtctggggctcgggcggtgggcgctgctctggccggcgcgcgtgggccccggcgaggcggcgctgcaggagctttgcgggcagctggagcgctacctgggcgcggcggcccacggctgtggcggcgccaccgtgcgcgacgctctcttcgcggctaagggccgcgcggccgactgcgagagcccgcgcgagtttcgggagcgggccctgcgcgcctgatgggtcgaggcggacgcgcggctgcgtcaggtaagcgaggccgggccgccggcgtttgaccgcgcttgggtggcctgggaccctgtgggaggcttccccggcgccgagagccctggctgacggctgatggggaggagccggcgggcggagaaggccacgggctccccagtaccctcacctgcgcgggatcgctgcg

SEQ ID NO: 5390 - DNA, 4119 bp, Homo sapiens
ccgtgatggtgccaaaccgagaggagagcccgagaagggggtgggtgatttcccggctgctccccatccccggcgccttgtgcctttttctccctccctctcccgctgcgcttcagccgagggctgctggagcgaatgggggatgtagaggaaggagtccgtaggtttccgtgccctcccaatcttctccgcctttcccgacagccgcgcgtccccgcctcagcccaaggccagtggcccggcctcgaggaaggcgcgggggccgcgagagacgactttccacagcatcgccaaggaaaccggcgtcgccggtgcccccgcgggcctccctcggcagtccgggggctgcttcccgccgttgcgcgccctcctccaccacccactcgctgcctccgccggccggagcccccgccttactaaccccctcaacttcgcgggcggcgggcaggtgggggcgcgcctccaggccgcaagaagggagcgctccgagattttcccggggtcggctctgcccaggagggagctaccgacgctttcccctggcgcttctccgccgctcggctctccaggcgcgcagctctccccgagagccccgaactttaccgtcactttgcccctgccccgggagaggggaggtcgaagtgctgccggccagagggcctacgcaagcctcgaaacccggggggacgcctcttccacccccatccctgcgctcgcccggggctgggcgcgccggggcgcacgcacgccggtttgctggcgacctggcgcatctgcccgcgcgccctggtctcagctgtcgcaggttcctcctgcacccacttccagtcttcaaagccagtgcagtcagcaccgtccacctggagccccaatcctctcctgcgattcccgcacacccactgcaccccatccaccacctccgggccgcgcaggtccgggcctgcgaagacacgcggcttacctccggccactccgttcatctggtcaaaggggcctcccagttcggcattgggaaagatggtcaccgacgtggcggcgaggtcctccaccgggtagatgttgtcagacagctggtgcacaaaaccactgagagttactgggattttgtctacggccttggcggtcatcatttgctcctcgcacaacctggagacccaactccctcgctacctggagtgtcagaaaagccgttttggagaggggttggactgagcctgggatggtatctccttttgccctccacacttaaaaacaaccaccacacacaccaagaaaaaaaaatcaacagaaataaaagtagcaaacaagttgctgttttttaagaaataagaaaaatgtctatttgccactgactctctcctgtctgtgttccggctgctgggaagccaggagttgctggtgtagtgttattataacagtcagtgagtcccctcgccgagctattaatcaattgctcctcgctcagttagacggaaagtgttgctctaagtatttatgggcaggtcttcaatacccgtgacgtcgctgcccatatatggactgaggaacagggctgggccaggcggcttttgccgtcacatggctgatttgcatacacgggctcggccgcgcggactccgccgggctcgcgacttccagctcgcaggcggcggggatcgctggggtcccgggcgcgcggccctagctgcagcctgggtccggggcgcagggatcgcgggggagagggcgcgccatggacccagtcacagccacagcaggagagcgagctgctccaggctgcggctcagcctcccggggcggggaggaattccggttctctgggactttccaaaaaaggcgaagatccggtgccggcggctccgcctccctagcccttgtttgggagccattccggaaaattaaacttcggaaagaaaccgagcggagccgagacactacagtcaaacccctactcactttcttggcagctcaaaaccgcaagcaaaaggaggcagcgaagaaaaaaaaagctacatgcattcacggaagctgactgcttttttctgaattacttggtggaaagaagtggctggtgataagagtgaatgcgtattgcttttttggaaagtctgttctatttatacaggagcgaaaacggaacaggtttgggttgtttgtttgtttaagtattttgggcaccttgggactgggagggtaaaccctaggaggagcagaattactgtggggagcttcgagagaaatcctcagccggagacaccctccttcctctgcccgcgcgctccccgccccccttcagctgctgcgcggagcgggcgcccttcccggcgcgtctgggcggtcggctgcgtgggggcgtccagatggaagcttggacactcaccctgcccctccagacacacatacacacacactcacactcgctccacttccgctacacactcccgcccccgctgccctcttcacacacccgctcacacaccttacactacacacctccctgttgactgcgtccgcgcgccgtcgttgccagcagtgtcccggcggcagagcgggctccgggctcgctggacaggaggttctatgaagacactggcctaaccttcactaccggtccctgcagccacagaatccccctgacccccatagcccaggatccaggaccgcgccctgcccgcacccgagccagaatacacgtactagaataaatattttctctccctccccaaaaaacacctcggtgagcccagcgcggtcctcagtgacggccgaaagcatctctaatcactttcaagacgccatccccatcccccaacccactcgttttactttgcgagaccccggtagaaacccttctgtttcgttcccaaagcaatttttaaaaacttttccaaagtccaaatagcagcaggttctggcttgctgggcgcaaagcttctacctcccagtgcgccccagcccgcaatggatagccgggcctgtccggggccccacaggaggctggtcccgggtgcccaagtccagcgcaccgccgcctgcatgactcattcatggtcgtttgtgcaggttgcgaactgccccagagccctttcccgctccaaagccgcggaggccagggataacgcgcagggtcagcctcgcaggcctgtcctgtccctttttcaccccgggcccggagcggccctagcttagtgtgggccggggcgggcgggagccacggcgccacgccgtggaggaagcgcggcgctgcaggcgggtcttcagccgctcacctgcctcgaccgctgcagccgtgcgccagctctcgccgggcccagcgcaccgcggtcagggccctgaggctgccgggagcggtctctccctctgctcttccactgaagcgctgcttctccccctccctccaaaacagccggtatccagcggccggccatctctctgacttaagtcacccagagcacatttgggaaagtttctcgctcgcgctgtgcgcttttttccaattggggatgaaaaggacatggaaagaaatcgcagcaaggttagcaccctagtagataccccaccccagcaaaaatgtgcaaagtcctatttctcaagaaagaaagaaagaaaagaaaagcaagaaaagatagctgcgttcttaccacgtgcgccagcccactccgcctgcgctctggcgggtcccgcggcccccgcgctgaccatgggcaagacgacgcctcggaagggagtccgactcgcatctcgggccctgagtccgaaagaacgggggaaagccgaattatgcaaatgcggatccctgcgatggggctcgggttacggcccccgccggccccttaggtgaggcacccaccggcagcaagcgcgggcgaggcgactgctcgcgcttcgctcctctctgcgcacgtgggcggaccggcaggcgggcgagttgcccgggccgccccgcgactggcgctgctgccaaacccgccggcggtcgccgcgcgccaccccgagggggagctcctggacgcccgagtgcccggccagcagggcgcggagggcaggaccggggctgggggcggggcggggtgcctgagcgagggaaaaccgcgaggtcttcggctgccacctttcccg

SEQ ID NO: 5391 - DNA, 1575 bp, Homo sapiens
acgcgtccatggaaggtggtgcccgcctcaccgcctccgtggaaggccaaacgagccctcggtgtgaatccggagaaagagagggaagtgcagcgccagctccactccacacccccttcctgcctataaataaccccaagtgtcacttcaaagaggacggggagcgcggcagaggggctcccgggccggcgggctggggccgccggacctgctcaccacgccccccaccctgggcgagtttgcataaataaacaaatccaagccgtcggccccgcgggaggtggaggaggagtgacgaggaggaggaggaggagggaggggggagggagagattagtttgggaagtagcacggattgctcatccgatccgtgccgccgcagggagtgtgtcaagttacagaggcgccggaatcggcccctgcgctcctcgccagccgccacgacccacctctgcccatggggccctccgtgtgcgccccttcgcccggggactgaaactgactggcccgggagacacgaggcgcccagaaggactgacagcgcggcaccaactgctctgcagacacttgaagggaaagactgggcggagagaaggagagccggtcagattcccctaactttcctggacttggaacgttcttcgaaataacttttttctcacctaggtgtaccccaattaccgctggttgtgctttttcggcacttcctctcctactgctaatttttccgtcctctttgccgggagcagcggaaagggacgttttccagcgatacaagccctttccccctgccccgcagtttggatagagccttttggcagcggctgtcgcctttatttattctatttatttatttattggttctcaagacgcgagaggatggtagcggagcgcacccacaaagcggcagccaccggtgcccgcggccctggggagttgggcgcgcccgggacggtggctctggtggcggcgcgggcggagcgcggcgcacggctgccgagtccagggtcgtgcgggctgctgacgctggccctctgctcgctggcactcagcctgctcgcccactttcggacggccgagctgcaggcccgggtgctgcgcctggaagcggagcgcggggagcagcaaatggagacggctattttgggacgagtcaatcaactgctggacgaggtctgtgctctttgttgctggcttttatccctccccgcggcgccccctcgcgcagcctccagactgttcagccggtgtccgcgggcgctcgctctctgcgagccccaggttcgcgcgagttgcctgcgggaggggtcggggacacggacagacgctgccctaccagggattcggaggacctggtgggcaagagcatgacccagcgactcccgcctcgggcaagcgcccccggcttccagcgctgggagcgccctgggcacgccgggcaggtggaggaaggctgggcgcgcggaggctcgcggaggcgggcaagctccactcctccctttcgggacccggccagggtggtgtgacagccgccccgcgcccgcgcagcggcaagcgcgcccagaggcccaggccg

SEQ ID NO: 5392 - DNA, 2401 bp, Homo sapiens; identical to SEQ ID NO: 5168

SEQ ID NO: 5393 - DNA, 1579 bp, Homo sapiens
ccgaagtcggggagcgggagcgtacgtgcgcgtgttcaccctgtcctgggcccctcgctcggggaatcccgggggtgccagggcacccagggtcagggaagtaagatgccgggccgcctaccttctccaccccgtagcccgttccgaaaatcctttaaaccgagatttaatctggatgcctagccccgccctcccctcccctcccctcccctccccccggccgaggccccctccagttcagctccctcctccaccccctccccgccgtggaccctcattagcatgcccacttgggaggattcgctggggggcgggagacacccgaagtcatccaccgccagcgccttcccggcggcctcctcgggcgacagcgctccgggagccccactcgcacaagtgttgcttccaattaattgcctgggcgggggaaggaaaggggcctcgtcgccgcccccgcccggaggctggagtgctgctcgtcgggtcgtgcgttcgctcggcagcggcgtgcaccagcaccacccctgcgtgcaagtttgaaatgtgagctgcctccgattcatactcgctcgcgctccctcgcagcgaagtggctgggctgacggtctgcgcgcgcgagtgagtgcgggcggcgggctggggggcggggtgcggacggcgaggctcgcggggcggggagggcgcgcgcgagccggggctccctggagacgccaaggcaggtctgctcgcctttcatcttcctcccgcgctcctcctcctcctccctcccctccccccgccgcggctggcctggcctcccccggagcccccagccccacgcgggcacacgcagggtgggtggtcacgcccgcagggtccgcgagcgcggcgcagagcgcgggccgtgggaagtttctccggcgcgccccgtgcgcccccgccccccgcgcgcccccggcccatccccgtccctggagagctgtcgcttgcgcccgggcgcgcggctggctgcctcctcggcggcggcggcggcggccccattagcggagcctccgcctatgattggcttcgcccgggaagctggagacgggcgatgaataattgatgtgtgcggtgcggtagccggacggcggcggcggtggcgggcagcagcgagcgggagcgcgggagccggagcgccctcggagcgggcagcgcggagcgagcgggcgccggacccgcccgggcccccgcgccgccgccgccgccggggcgcggagcggggatgcaggcggcgcccgctgcctgcgcgcagcctttgttcggcgctggctgaatcctacccggagtcgctcgccgcggccgccgccggccgggccccaagcccccgagggcgccagggcgggatcgcgaccggtgcaacttctaggtaagtgcggggtcggaggggtcggcgcctgggcgcccacgggccgggccctgggctccctccgggcgcgggggtgagtgtgcgtgcctgtgtgtgacagaggagggccggtgcattgtgggtagcgccgtgtgctgcatggtgtcagccccaggcttggccgcgagagtggcaccggcgtgcaccgggccg

SEQ ID NO: 5394 - DNA, 919 bp, Homo sapiens
ccggggcgctcagtgtggttttcccacccgggagtctggaagggtctcccgcagcccgcaggagacgcagcgctccccgctcagggggagcaggaggacagctggccgctttcgggagccccaggcgcgaagcggcctctctccgcctcaggtgagtcctgctcgacgcccaaggcccaacggtcagaaccgcctctgcccgccggacccagcgaagctaggggaacaaatcccaaaaacagttcgggcctttccggtgcgctcacccctacacacgcgcctgctcgccacccaggagcggcgtcccgttgccaggcaacgagagctcgcgcctcaggagccagtgtaggcgccgcaaagcggaaggggcgcgcggataggtgagcagagggcacgcggtgggcagcgaagggggaacgcgcagcagagaggagagggcgtgcaggagtaggagcaggcggcagagtagagggggcgcggcagagtagagggggcgcggcagagtggagggggcgtgcaggagtaggagcccgccgcagagtagagggggcgcggcagagaggagggggcgtgcaggcgcggggcgcccggcagagagaaggggtcgtgcggaagggggcgcgcgccaggggagggggccagagaggagggggcgttcaggagtcgggcctgcggcagagatgaggcggtgtgcaggagggagagcgcgcacgagggggcaacgggcagagaggagagggaatgaaagaaggggagcgtggcagagagaagcgggcgcgctccagggggcggggtccagggaggagggggagcgtaggatcggggcgggaggcagagaggagcgggcacgcgggacgggcgtgtgctcgtgaggggtcgaggaaaggcgtatgtggaggcgcgcggggtgggtgagccg

SEQ ID NO: 5395 - DNA, 944 bp, Homo sapiens
ccgtcggagcgcgcggggacggcggcggcggcgctacctggaggcgcggtggcgggcaggtgcccgaactgcacggcgatgcagaggtcgttgtccagggggaacttgtggcagtgcagcatctcaggccaggggaagccgtaggcctccatgagcggcgcgcagccggcgcgcacggcctcgcacagcgagcggcacgggtagatgggccggtcgagacagacgggcgcaaagagcgagcacaggaagacctgcgtatccgagtggcagcgcttggccagcagcggcagccagctgctcgcctgctgcttcacttcggccaggctctcgtgctccagcaggttgggcagccgcatgcgcttgtagcccaccgtgtggcagagcggcaggtcggcagggatgtcaaggcactgcggcggcttggagtaggagcggccgtgcagcggctcggcctgccagccatagtagtcgtactcctcgcagcgcgccggcgcccagtgcagcgcccccagcagcagcgccagcgcggccgtccgcacgcccccccccgccgccgccgcccgcatggctgcgccctctccaggtgcgcgccgcgcagccccccgacgctcggtgcccggcggcccaggtgttccggcgtgcgcccccggccctgactctacccagccgccgccgccgccgccgcggaggtcgcccaggtgggtggcagcctgcgctgcgggcgccccgactgatcctggcgcctcccacctcggggctccagcccgggcctcgccgtgcgccccagccaatctccggccgcctggccccagctccaaggcggggaggcagtgggggcggccctcagcccctcccgcaccctgcccgagcgtcccgcccagcgccaggtcttgcgcccctctcccggctcggctcccctgccgcagccctggcctcgcccagcg

SEQ ID NO: 5396 - DNA, 1096 bp, Homo sapiens
tcggccacgcgctgggtccggggaagaggcgcggccgcggccgaggcggggacagggaggcggcagcccctcctgcgcagcgacggcgcgggcgggcggaggccggggcgccccagccccccgcccccgctccctccggccgtgacgtcagagccggacggggtaaactgagcggcggcggcggggcgctggggcggagactgcgacccggagccgcccggactgacggagcccactgcggtgcgggcgttggcgcgggcacggaggacccgggcaggcatcgcaagcgaccccgaggtaacacggccccggttccctgctcgcagggcgcggtgccggaggggagcgggcccgggggaggcagggaggcagggaggcccccagagctacgcgggcggggctgcggggaccccggggcagccggggcgcagggcgcagggcgcaaggtgcacggggccgagcgtgcagtttgggaggtggcacagttgggggcggcggggatcagggcagcgtcctgggggttctaggttgggtctccagattgggtccccgacggcgctcgcgggcgctctttccagggagcgcgggctctcgtggggacgcgctcgaggcaggtgagccgaggctggggcgcccgggggtgtccccggatgccggtgcgcgcggctccctgacccgcccttccgcggcctgggggacgggagaatggggggtccacggccgccttgggtcctcaccgcgcaccgcgcccgcagcggagccccggagccatggccctgagcgagctggcgctggtccgctggctgcaggagagccgccgctcgcggaagctcatcctgttcatcgtgttcctggcgctgctgctggacaacatgctgctcactgtcgtgggtacgtgcggacagggcacccctgccccggcaccccagccccagcgccccttccccggcactccacttacccctgcgcggtcccggagctccgccaaggcccgggaaagttggagaactcgctttgcaaaaaagacatcccctccaggctgccgcgccggggctaggaggagccgcgttgtgtggcttcgctttcctgatgctcg

SEQ ID NO: 5397 - DNA, 4048 bp, Homo sapiens
acgctagagaccgtggggcgagagagggagagagttggaagcccactgctccggcggggtcggcagctcccggtctcaactcgcaaacgaacgagccgggtcaagaatcgcgaacgcaccgaccctgggacctcgaggctaagcgtggttgatggggtgggaggaccccgtacccctcactccaggatccctcctggcctaggaaaccgctgggagttttgctaagtgtggggattggtataaccgaacggcgcctttagcccgggaaccagcccctgcccgcttaccctcgcggtgctcttggggcgatcccagttctcccgacgcggggccgcgtaaggcagcagcggcggagcgctaggctagaggaatctgtctgtccttctgtcctaccagcttgggcgaggcaggctcgggattcagggggccgcagcggaggcggcgccggccagggactctgcagggaccggggtgccccggagggagtggtgctggtggaggaggaggcggtggctgagggggagtaggtggggaaagaggaggaggaagaagaggaggaggaggaagaagaggaggaggaggagaagaagaaactggaggaagaggaggaggcgaaggaggaggagaagccgcagcgggcgccgcaggagcgagtgagctgggagcgaggggcgaaggcgcggagaagcccggccgcccggtgggcggcagaaggctcagccgaggcggcggcgccgactccgttccactctcggcccggatccaggcctccgggttcccaggcgctcacctccctctgacgcactttaaagagtctccccccttccacctcagggcgagtaatagcgaccaatcatcaagccatttaccaggcttcggaggaagctgtttatgtgatccccgcactaattaggctcatgaactaacaaatcgtttgcacaacttgtgaagaagcgaacacttccatggattgtccttggacttagggcgccctgcccgccttttgcagaggagaaaaaacttttttttttttttgcctcccccgagaactttccccccttctcctccctgcctctaactccgatccccccacgccatctcgccaaaaaaaaaaaaaaaaaaaaaaaagaaaaaaaaagaaaaaaaaagaaaaaaaattaccccaatccacgcctgcaaattcttctggaaggattttcccccctctcttcaggttgggcgcgtttggtgcaagattctcgggatcctcggctttgcctctccctctccctcccccctcctttcctttttcctttcctttcctttctttcttcctttccttccccccacccccacccccaccccaaacaaacgagtccccaattctcgtccgtcctcgccgcgggcagcgggcggcggaggcagcgtgcggcggtcgccaggagctgggagcccagggcgcccgctcctcggcgcagcatgttccagccggcgcccaagcgctgcttcaccatcgagtcgctggtggccaaggacagtcccctgcccgcctcgcgctccgaggaccccatccgtcccgcggcactcagctacgctaactccagccccataaatccgttcctcaacggcttccactcggccgccgccgccgccgccggtaggggcgtctactccaacccggacttggtgttcgccgaggcggtctcgcacccgcccaaccccgccgtgccagtgcacccggtgccgccgccgcacgccctggccgcccaccccctaccctcctcgcactcgccacaccccctattcgcctcgcagcagcgggatccgtccaccttctacccctggctcatccaccgctaccgatatctgggtcatcgcttccaaggtacgtgccacgtcgcggaactgcagcgcgccgctcccgccgcatccttcactgcccccggcctgctccgggtgggcgcttggcaaggcctgggcggaggttcctccggctcgcgggccagcgcgccctgttgggaaactaggcggcgcggggccgggcgtggtgtcgatccccagtctccgaagctacgactggtttggagtgatggcctgcgggccgcttgaccctttgggaaggggtgcgaacggagaagttgtcccccagtgcgctcgaatcagagcaggctgggctgtgcgtgcccggcgccgcggagcccagagcccgcgggatccccaggctcctggtaccctcggcaatgcccccaaccgtcctggctccgaggggcgcggacaggactcggccgccaggcttgctttcgactgcgttcgaccctgttcaccacccactttgcgccccttcagtccagacccgcggcttcttagtcttccaccctcttctggaggcgagaggatcctcgcgccccgggagaaaagtatgggatttgttttttctttcctgcttttcggaggcctggggaggggcgggaacccgtgcgggaggaaagctccagggcttggcgctctcgccgcgacctgcttaattggggcgccgagcagccacagcgggaaggcaggttcggtctggtttttgtttttctttctttctttaaaaaaaaaaaaaaagaacctggtcaggaaactgtcttagagggaaatatctgttcgtgtgttttcatttcttgcgatattttttatttgtttgtttttctctgggtacggggtgggaggaggagagttaaaacttcagaaaaaggagtaattagtttacggattggagtcagtaaaagacctacctccggcggcagccgatcaatactccgcggcttgtccattcattaacccattgcgttcctgccggagcctagaatcgggtagatgtcacccccctccccatattttaaaaaatcaaaccaaaggaaaaaaaacccaaaaagccttttacccttaatcccgaactggatttgcctgcatcctgcctggactgtcggcttgtttttctttgtttgggttttcggtgaatcgatttcctatgctaatgagtgaacccaaaactctgaggctttgcttgaaaagtttagggctgcccttcctcattcgctatcagtcatgcttatggtcccctcaccagacccggagccgctgggatcttcctgcgttacagactgtcctggcggtgtctgcaagtcggtaaccccccgggtttcgatcccttcgctcgcgtttctcttctagttctcgggagccgggagccccggagcccagttcgcgagaggcagcagcggctgtagccaagcacacccgccggccagatttctgtcccgatcgggcttcaacgactcgccccgcctctatacttttccggaggggcaataaaacaaataatttaaaaataaatctccatgaaaactctggagagcagcccgccgcctttccaccgtgggtcaaagttccccgagaggttagaaagaagagaaagtagtttcttcgggttgtgggcgccaatcccctggccaggctctgcggctccctcccctgcctccagcgcccggcgaggaggtggcgaggcccgcggcgccagggcggctgcggagccggccgaggtcaggagcctggggactggctcctctgcgacagcggctggttgggtgccgcaccggtggagacccggcgttccgggccgggcagctgagcaggcgttcccttcgtgagcccttgggaggaccaccggcccccgcaggtcgagcggcgcggctatgcgaaggccctgagcacggtgccgggccagcccggctcgggagaagtgcgcggctccggtcagagcagccccccctaatgggatttctgctgtgctccccgcagggaacgacactagccccgagagtttccttttgcacaacgcgctggcccgaaagcccaagcggatccgaaccgccttctccccgtcccagcttctaaggctggaacacgcctttgagaagaatcactacgtggtgggcgccgaaaggaagcagctggcacacagcctcagcctcacggaaactcaggtgactgcggcccgggcgcgaggaacccatctaggcgtgcg

SEQ ID NO: 5398 - DNA, 3292 bp, Homo sapiens
tcgctgccgtcgagacgcgcagcggatgccgctgcttgccgcggcggaggaagctacgccgctgcgccttcggttcaccttgcccccattaaagcgttagttagacagctccaaacgccagctggccggagagacttcctgggagaaagtgctgtcgtcggggtcacagactcggagttgatccgcgagccttgggcaccggcggccagagcagaggggtgcccttccgagagcagccgtcggtgccgagaagctgttgccccagcagccccaccgagtgacgcgcgggttttggccgggtcagcgcgcatacgcacacaggcacacccactcctggtcccgggggaaggctcactcttcggttttccagggctaaaggccaaggccacgcggatttctgagtccgaagacgcagtgcgaggacttacacctggattcccttactatcggctggatggtgggtggggaacccaaatccctctcttcttggcctcgcccttcctagcaggctttaggaaaaataccgaggtcgccggaccccaaagggtaggaaaatgatgagttctccgagggccgaggtcacgtcctgcctcttgggccggcgctgcgtggctctccagctgcgtgggggcggcgggcccctgtccagccccagggggcgggggagcggcagctgcgagcgcagataaccccgaggtgacccgggagggcctggtccgcccctcccccctcccgcaggcctggcggcgggaagcgggtccctgcgccgcaggggggagaggcaggcgcggtctccgggctcgcggccgttagtgcgcttcggccaagggcgccgcctgctccgcgtccctcgctcgcctcctgcgctcgcaggagcgctccgagtgcctctttagcgggagccaatatccttttgtgctaataggcttgtcctcatttgctgcctaattggactatataaagccaataacgggcgggctcttatagcccgaagccaaagcgccaaaatccgagggaaggcgaggagggggcggtggcggaggcggctgcggggccggggctcggctgagccttcgcctgcctaatcccatttgccattgtacgcgcccaatcgccgtatactccccgcatttaacttggatgacattttgatttcatcattagcatccggcgccggattgacgcagcctcgagccggggactgctcttgctgcctcctccgcgggagccgcagccgcagccgagccgcctcgatccctcggtgccgcggcagggccgctccccgcccctccgcacccctccctcatgcgagcccgcccgtctgggtcctcactccgccctcccgccgttggatttgcgcccggggcggcccccgactttgcgccccgtagttgagttccgtttatggtctgatttccggcctctcgcctgctcgccccgccgcccgcctgtcccgctccctccctcccggggacccggaggagaggggaccatgccggaacccgggccggacgctgccggcaccgccagcgcacagccccaaccgccgccgccccccccacccgctcccaaggagtccccgttctccatcaagaacctgctcaacggagaccaccaccggccgccccctaagcctcagccgcccccacggacgctcttcgcgccagcctcggctgccgccgccgccgccgctgccgctgccgcggcggccaagggggccctggagggcgccgcgggcttcgcgctctcgcaggtgggcgacctggctttccctcgctttgagatcccggcgcagaggtttgccctgcccgcgcactacctggagcgctccccagcctggtggtacccctacaccctgacccccgccggcggccacctcccgcgacctgaaggtaccgacctctctttgaactttcgttgtccccctgcgcgcccgccccgtccccgccccgcgctgcttccctccgcagttctgggaccccagcacccgcaaaccctctgctcggtcagtttttttcggcccctagcctgccctcgcgctgggttgcgctgcccgttaatccaatcccacttggtgagaaaagaagtggaattggagccccgggcacggtgcttcccgggaaaagtggcctcgggcgtgaatagggaggcttcggacggccggggcttgggacacggcctggaaggagggggtgattccaatgcgcctaagccgaaagggaaccgttctgccggcccctggcgaggaagctgagggaatggaaggaggtggccgcgctaccaccatctgcttgcctgtcctcgggaggagggggatcccaggactcggcgtcccttctctggcccagccgagaaggaggcagcccgcgggaatggtgaggcctcatggcctgggacctggaggccggcgcgggttgagcctgccgtccccaggcgccgggcctcgctcaaggctgtgtcggtgtgcatgtgtgtgcgtccgtctgtctgtctccccagcctcggagaaggccttgctgagagactcctcccccgcctccggcacagaccgcgactctccggagccactgctcaaggccgaccccgatcacaaggagctggactccaagagcccggacgagatcattctggaggagagcgactccgaggaaagcaaaaaggaaggcgaagcggcgccaggcgcggccggggcgagcgtaggggcggcggcggccactccgggcgcagaagactggaagaagggcgctgaaagtccagagaagaagccggcgtgccgcaagaagaagacgcgcacagtcttctcgcgcagccaggtcttccagctcgagtccaccttcgacatgaagcgctatctgagcagctcggagcgagccggcctggccgcgtccctgcacctcaccgagacgcaggtcaagatctggttccagaaccgccgcaacaagtggaagcggcagctggcggcggagctggaggcggccaacctgagccatgccgcggcgcagcgcatcgtgcgggtgcccatcctctaccacgagaactcggcggccgagggcgcggcggctgcagccgcgggggccccggtgccagtcagccagccgctgctcaccttcccgcaccccgtctactactcgcacccggtggtctcttccgtgccgctgctacggccggtctgaggccccagaggggtgggggagggagcgcccggcctccttgtccggaccccggaggagactgggccgggccgagggcgccgagaagtccagcggccttcaggaactggggcttgggcgcg

SEQ ID NO: 5399 - DNA, 3753 bp, Homo sapiens
gcgcggagacccgtcgcctgcggaggcgtcgagccactccagctccgagtcccgcaccgcccctgcctctggagagaagggtccaaggggtccaaggagtcggagttgccgcagccgccaggaacccgggctagaatctgcagctgctttcagccctggctgcccctggttagacgccgctgatgcccgccaggccctcggcgcgctctgggggcgcaccggtgctgtgtgcctggccggagcgttttgaaattttccggggccgctcggcggcgctgcgattggccgcgttcgggtaacctctatgcaaatgaggccgcgccgcctccgcgccgccggagacccggcgagttggcgggcgaggaaggggcatttgcaccggggctgggcgggcgcacccagagccaggcgggcaggaacccctgcgcagccatccggtgcctgcatgtccctggcgcggaagggacgcctcaccagcctcggcgccccctccccctagatttcctccccgcccctccccactgcctgcctgctgcaccaccttccacccagatcacccagatcgtctctaaagggagttcttggtttccttcgatttcttatgaacccaggatgggcagcaaagaagatgcgggcaaggggtgtccggcggccggtggcgtctccagcttcaccatccagtccatcctgggcgggggcccctcggaggcaccgcgggagcccgtcggctggccagccaggaagcgcagcctgtccgtgtcctcggaggaggaggagccggacgacggctggaaggcgcccgcctgcttctgcccagaccagcacggccctaaggagcagggccccaagcaccatccccccatcccttttccttgcctgggtaaggatcgcacgtcgccagtgtggcagcgagcgagcgcgaggggagggaggctgagcgccccgccaagactcccgcgccgggccccctctggccagagctgcggcagccgggggttcgggaccgcggggagaggggcgcgcactgtggtgcctcctccgcccggtgggcccctgggagcaggcgaacacagacccgtgccggcttgggcttcctggggaaggttgagttgttgagagagtggaccacagcgagagggacacgcggccggccttacacccggctgtcctcaatcactgcacatctggtactttctttccggacacgaggtggagatctgcaagtcgggtctgggcagtctgtctccaccgtaatctctttctgagtcttcttcctcactcgctccgtatctctgcctttctctctctctcctccttggaatgattagcactccaagatgattgacaatggtgcatttcagagacggttcctctttacaacatttgacgaaggggagtcctgcgttagtccttagcgtgatttccaaacaaacggcctgtgaaatgatgccaccctataaagctcgaggaactcttccagctcaattaccaccaagcaaattcgccttttaaaaccatgctaatgtttccccctccagacctcctctccctgttgcccctggcccattcataaaggtgggagcacagagaccccatactccaagtagctgggtccctctcttgtcgcttttaaaggacggggtgctgggtttggggggccagtgagagggataagaggaggggattggtaaggtgggaccaaggctgcaggcgcttgccaaccgcttggtcccagggagagctggcggtctccgaggctccccaaccaactccatggcctttctgtctgttctcgctcctcaggtacccccaagggcagcggaggctcgggcccgggcggcttggagcgcacgcctttcctctctccttcgcactcggactttaaagaagagaaagagaggctcctgcccgcgggctcgccctcgccggggtccgagcggccgcgggacggcggcgctgagcggcaggccggcgcggccaagaagaagacgcgcaccgtcttttcgcgcagccaggtgtaccagctcgagtccaccttcgacatgaagcgctacctgagcagctcggagcgcgcctgcctcgcctccagcctgcagctcacggagacccaggtaaagacttggttccagaaccgccgcaacaagtggaagcggcagctctcggctgagctggaggcggccaacatggcgcacgcgtcggcgcagactctggtgagcatgccgctggtgttccgggacagttcgctgctgcgcgtgccggtgccgcgctcgctcgcctttcccgcgccgctctactacccgggaagcaacctctcggccttacctctctacaacctatacaacaagctcgactactgaccggcccgccgccccgcgccgcccccagctgcccgcagagccgggcgcgtactgtactgtaagcagggctccggagcaaggcggcgtgtttccagaaatatgaagaaatacaccatgtgtattcattagctcttatttatggtctctgccctactttttgttttgattgtttcgggtatttattggcattccctaagtcagagagcctgcttcctacctagaccgaaccagtacgctttgaaaaccattcggagtgagatgttctcgggtggtggtgggaaagggagttttggccagacaggctgtggttggtagggaaaaaaatcaggaaaacacctacaaaaccaggtacactcctcccccatatatacacctgtatatatgtacatgcatacacgctcggccaagccaggccctcagaggctttggacaattactaaattgcttcttttcgtttccctcatcccgaggatggtagggacgaaaaggggagagttcagatctgtaaatatttttaaaaagaaaaaaaaataaaacattttaaacatctttgctaactttggtgggcttggttacccggcatgataacgcacggaaggttttcaggtttttcggtggaaagacttgcatgcgtctgtctgtggaagtttggctcgctccacgtggagggtgggaccggggtcaggggttaaaggtcgggaccttggcgccgcccagactgcacgtggctggagctgcccgcccactctccctcctaacgcccagaatcgtcgcgcgggctggggcgcaccccggctggaatccagctcaagagtccgcgcggagaaagacaaagactgggaggcaggcctcgccatttaagcgattgccttctgggaacaagcgagctgggtgcccagcggcatattcccggcactgggctcgccttgagcttggccacagcagctcccgctatgacatgccctgtgccgcgcacttcctctccaggggtataaagcaggcgatggcgctgcttgtacctagtaaagcctccactttgctcgccgcgagcttggcgcgaccagcttgtcgctgcgcccagctacccggccggtggcagagttatgtgtctcgcgcggagagggaactgggcgcggtgaggcagttctgcggctcaggagagatccgaggcccgggaccaggcaaagaaggtgagggaggcaaaggcgcttccctacactcttttgttgttaatagtttgcattggttcagcgtgtggctggatcaccggctagcacgcggccgcttgctctgaatggaaccttgacgcgcggcgggggcgcccacggacttcctcgccctgacacctgcggccgcgcaggggctgggagggcgctgcaccgagagaatagccgcg

SEQ ID NO: 5400 - DNA, 829 bp, Homo sapiens; identical to SEQ ID NO: 5389

SEQ ID NO: 5401 - DNA, 1328 bp, Homo sapiens
gcggggccgctgcgcgcccccctaagtgtgttagcgggggaggcggggctggaaaggaaacctggtgaagggctggcccggagcctggggtggggatattcactgcgggatagggccagcaagaggacccgacacgcatcgtcccgagtgacacgtgtaaatgtcaagatacagagacatctgcaaatgtcacccaagagggtgaggacgggggagcggtcccgaggctgtgccctccggggcaggtactggctcctgtggggctgcgggccaagtgtcgcccttccccaaggaattggcacctggggggggggggtcggtctcgccgcgctggaagcgcaagccccggggctccggagatgcgccggggcgcgtcgcccctcggggcagccctggacctcggcgcgcccaggcgcagcgtgcggtgccctcggcggggcgggcagcgagccgccctagttcggcgacttacctcgggcctcgcagggcgcgagcagagcaccggccagggcgagcaggagggcgcgggcgggggacacgggcagcgggcgcgctgccatcgtcgccggccttcagtgcagcagctctcgggcccggcggcgagcgctgcaccatcccacgcgggcgccgagccggggccgggcgtcgcgaccggagggatttcctgcctcggcgagtcagctccggagccctcgcgcagcgcccgcgccgccgctgagctcttctagcctttcatttttaaaaaagtttccccccgtgtgtgtgcgtgcgtgcgcgcgcgcgcgccgttctggcacaagccagccttgaccgttgcaataaatgagcaaactgtccgagttggcccggggactaggaagagcgttagtgagagaaggcaggcctgtgaaatggatccacggccagcagtcaccgttcttattaccgcggaacaaattattgtctcccccgcacccccgccagttggcggcgtcccgcgggtcctagagaccgctcgggtccccccgccagggtcccgccccgagccgcggctcgctcacccccgagggtgggcggctcagacgtggctcagtggcgtccgggcgcccggagcgcacacgtccccgccccaggatgatgtggccgcagggcccggggcgcccggctgccaagcgcacatgcggcggcacggtccagcttttcaggctgaagctggaaacgatgactctgctactcgctccccggctctctgggaaccctcggagtgcgggtcaggtctccaccgcggcccacagcccggcgcgcgaccccgcccggccctaagcgcccaaaggggcatctctcgcccg

SEQ ID NO: 5402 - DNA, 2957 bp, Homo sapiens
tcgcctctttcgcacaggtgcccgactcggagtccgggaggcgggccctctttccaggtacccagcccagcgtcagcctgggtccatcctccgccaccccacagcgcggggagcaggggaggccgaaagccgggcagcttggggggccgggataacccgggctgcagcaaccccgggcggcagcaggactggagagctggtgtcggacgcactgcagagacgtccctgttttcggcgcgtcctccgacacccagcagagagcttggcgctctccgctctgcgcgcccgaggtcacagcgcggagaaacctggcggggccccggactccccggcttgggaaaagcgatgactgccctgaactgctggggcgttcgaaatttccagggtcccgaccctccgtggggtacgcgcgacttcggcgcagatgtcagtccgctgccttccgggttgagggagcgaggactccagacgaccccagggccgctgtccaggcccagccccgcgttctccacctcgccacctcgctctgcggctccagcctggagatctacggacttcattgcgatctcttgcgcagtgtagtcgccctctatccctagccccgagtcccgggtaacccaggggccccggcgaggcgagtttctttggggcgagatgtcccgagccgagcaaaggggccgcgcattggacggggctcccaagccacagccctgggggccttgaggagtcgtggtacggtccagggcagtcggggctgcggggcccgtgaagccagacgaggctacggacttagggtccctgcaaccaagaccgcgagcgactgtggactcgggacggatcgcacaaaggaggaagggggaatcagaggggcgtccggtccaggacgtgtcaggcctgggcggggcggaaaactgacaccagggcgaggacaaggatttcgctcctccagggctgccaggggaggggctcgccaccgtcactctccatgggctctggccccgacggtgtttaaagggcggagggctgggccgggctggtcgcacccgggcgctgctggcggccaagctggatgggtcgccagtgagtttcggtgcggcaccgctggcccaggcccgggcgcggctggacatggccacctactgcgacgacctgggcccctcctcggccccgcccggccaggcccaggccaccgcgcaccccccgggctatgagccaggggatctgggcgcggtgggcgggggccccctcctgtgggtgaacgcgccagcgctcagccccaagtcctacgcttcgggtcccgggcctgcgccgccctacgcggccccgagctacggggctcccggcccgctcctcggcgccccgggcggcctggcgggcgccgacctcgcctggctgagcctctccggccagcaggagctgctgaggctggtgcggccgccctactcctactcggcgctcatcgccatggccatccagagcgcgccgctgcggaagctgacgctcagccagatctaccagtacgtggctggtaacttccctttctacaagcgcagcaaggcgggctggcagaactccatccgccacaacctgtcgctcaacgactgcttcaagaaggtgccccgcgacgaggacgacccaggtaacagcggcgcgccggctcgctccgtccaggactccccatcttcccgccgggccgcgggcactccgggggtgggagcaccttagacaacctaatttctccctgcgcggttggggatacccggggaggagggagaaggggaagaagtgcttgggcatggacaggttctcagacagcggctgagcccaccacaggcccgcgtttacagtgcggcggtcccggggctctcaatctctgtgcgctccttcggaggaagaagcgggagagccagcaagctgggtgaccttgggagtgactcaacttccctgggcctcagtgccctacctggtaaaatggggaagacagcgcctaccccaaggatgggcaaaacaaataggatgcccgtttggaaagctctggagcctacctgggggcctggcgtggtctgcgctgtccttggcagagcggctggcggagtcccaccattagcatctcgcaggccttccttcaccttaacggggctcggcctttcccagggctcccttcctcctcctttctggattgtcactttcttcccagtcctgctgtggaggcccatcgggtacagagtgcccgtcaagggtggaatgggggcgaggactcagaccctctgtaagggccagcaggggatctttctgaagctgacctcctcgctggctcacaccacggcccgtcaaagctcgaaccttctgaactgggctgtttcttcttctgcaggtaaaggcaattactggaccctggaccccaactgcgagaagatgtttgacaacgggaacttccgaaggaagaggaagaggagagctgaagccagcgcggccgtgcgctcgggagccaggagcgtgggaggggccgaggcgccagcgctggagcccccgagcgcggcttgcctggacctgcaggcctcgccctctccatccgcacccgaggccgccacctgcttctccggtttcgcttctgctatgagcgctctggctggcggccttggcaccttccccgggggcctggcgggcgacttttctttcgggaggcggccaccgacagtcgccacccacgctccccagacccttaacccctcccctggcttcgcccctggccaccagaccgcggccgccggcttccgcctcagtcacctcctctacagccgggaagggaccgaagtttgaagggaggctggaggctagccgggtgcgggtccagaggtgctgagctcaggcctccggtttcccctggtgacagccccacgtgttggcgttgaaggccttggtgccctgggaggaagcgcagagccgggggcggctcg

SEQ ID NO: 5403 - DNA, 1860 bp, Homo sapiens; identical to SEQ ID NO: 5175

SEQ ID NO: 5404 - DNA, 1422 bp, Homo sapiens
tcgtgcagtccgcccggcggcgttttcgggcgagggtctggtgctggggagcgagcgcggagcgaggtgtctctttaaatacgctctgcagtgtgacggcggccgcccggctggaagagccatccccaccctgcggcaggagcccgcccgccgccatcgcccgccccggtccccatggttacgcgcctgcctccggccccgggtccccgctgtcgccgcgggaggtgcgcgcagaggcggcggcgctgctggccgggctgggccgctcgtgcgcggggctgtgactcaccggccggcgccgcagccccgcaatctgttgataactcggtcccagctcggccgctgccctcgcgaatggagagcgggtccccggcggggggagcgcagcgcgtctgtctccgggagcgcggcccggccgccccggcagccgcttcggccacagcaggtgggaaggacgcgcgggtctgggcggcgggagggacgcgcggggccgcggctcggcagaaaagctcgcgccccgaggtgacactggccgcgaggaaagcagctccgagtaactttcggctccgctggggcgggaggcgccacggataatccagggcccccgccccgcgcgcccggcccggagctcgagccacatccaggcagagcaggcgccgcggccgggctggggcgggcgggtcactcggtgccggttcccggtgcaaaccccccggcgcgcctctggctttgtgcagcccgagatggttgagtttggctccggagccgggagtggggcgcagattgatttttaaatatggagaaggagacgcatctgccgctggcgcgttcggtccgagccccccaccggtccccaccggcaccgcctccgccagccccaggcgcagcccccaggccgcccgcggaggggagggagcgacaggggccgcggctgctccctggcggggtcggggctgcgagctgccctccgcggggaccctccgcccgccccgctgaccgccgctgtcttcacagatgggagcagctcccggactgcgcccgccccgccgcggtcaccctgaggccaggggcccgggagcgcgacctcctggccgccgtctgggactttgaccttccagaggccatggaggctggcggggagcagggcgccacctgatcgcctccccctggacgcctcctccagcggcgctcacgcttccgcaactttgcagcgctcatggtgagtacgggggtcccgggggtcctgcagctgggggctaggccgctgcgggggggcggccacccgtatggggactcccaggctggaaaagttgtggaatggcgagctggtgaccgggcttccgggctcagtgccggggtgggaggctctgtggagtgggggccggggacaggccgcgtgtctgggcacctctgctccccgcg

SEQ ID NO: 5405 - DNA, 1479 bp, Homo sapiens
gcggctctttccaagttcgaagcagggactcggttctgcgcatctggcgggtgtgcccagattgtaaccttcgcactaggcatccaagaacgtgctttggacacactcggcggtgggagcgggtgcttggtttgcatcagggatgaggggtggagtagcgaaagcgcccggagcgcgcactcactcacactccccaagccagggcgcggccgctctgggcgcgaggtcccaagccaagtctcgcgctcggccaggagccggggagtaccccaggtccccggtctggggccgccgctatcctaccctgcggcgcgcactcctgacctggccccgccccccggcggccgcgagtagcgggcggagcgcaagcagagaggcgctctgggctgtgcggcaccgcctctcctcggtgtctggggagggacggagggaccgggcgggagagagagaaagcctgaccgaccggctggcgaagagctgcatgcaaccggtgggaggccgggccggctgggtctggggctcgggctcaggctcgcaccgtttctcggcaggtccctggcggtgagcgcggacggcccggaggcggcggctctgagctggcaggcggagggctgtctcctgcgcccgcctgcccggcgcggtccgaggatgcgggggggcgatgcccggggccagggacgcgctctgtcaccaggcgctgcagctgctggccgagctctgtgcccgtggggccctggagcacgacagctgccaggatttcatttaccacctgcgggaccgtgccagaccccggctccgcgacccaggtgagtgccgccaccgccgcctggagggacctaagggccctgggctgggacttggggccgcaccggggcctgaggcagaacagcgacgcggactgggagagggcggggggcggccaccgagccaggagagtgatcaagaaccagcgcactgtggcctgatgctgtaaccaggcggggacccgggcggtggctactgcacggaggccgactccgggtcggctagggcagggttggagggaccacgcccgccacctgcgctcccatcgccaaggctcctgggggcggctccctagctccgagctacgctctccacttcccgggctatctgcactcagagcgaggggaggccgcggcggcctcggagccgtgggaagggggacgaggccgaaggaaactctgggaagttgggagttggggacggccccgggttggggccgaatcccaccgggtgctgctcatcctttctcccaagcgtctagttcctttccttggtatggggtgagaagggcgggacgcgatccggcgttgggccggggacagggtgcttctggccttgggcagacgggcctgaacccgttcccggcgggtcgcacggcatggaggtggcctgggcctgggcgctaggctcgaccagcgactaccgccggccacgatggggttcgtagactcgtcg

SEQ ID NO: 5406 - DNA, 446 bp, Homo sapiens
ccgccacccgctgataacaacggaaccgtgggcattggcccttcaacgccgtctcgcccgccctctccagtcagtttggtggatatttcggtgaaggctgcagactctcagagtcacccctccctcaagcagcgttctccgtactcttcggcgccgggaagctcagagggagctggcctgctcttaccttcaggtgtcggcggcggctcctgccgcttcccgcgggacaggaaggccttgggcagcagcagcgacagagccaggacaagcccagaagccagagcgactctctgcactgtggagtacgccatgactgctcacggtggtcgcaggtgcagacgccagccggaaccggaaccggaaccggagcacgggctgccgctcccgaccgaaccgcgggcggcgcggacggcgtcgcgcgagggacaaggtgcgcgaggcgcacg

SEQ ID NO: 5407 - DNA, 2991 bp, Homo sapiens
gcgcgcgcagccagcgtttcccgcggatacagcagtcgggtgttggagaggtttggaaagggcgtgccggagagccaagtgcagccgcctagggctgccggtcgctccctccctccctgcccggtaggggacctagcgcgcacgccagtgtggaggggcgggctggctggccagtctgcgggcccctgcggccaccccggggacccccccaagccccgccccgcagtgttcctattggcctcggactccccctcccccagctgcccgcctgggctccggggcgtttaggctactacggataaatagcccagggcgcctggcgagaagctaggggtgaggaagccctggggcgctgccgccgctttccttaaccacaaatcaggccggacaggagagggaggggtgggggacagtgggtgggcattcagactgccagcactttgctatctacagccggggctcccgagcggcagaaagttccggccactctctgccgcttgggttgggcgaagccaggaccgtgccgcgccaccgccaggatatggagctactgtcgccaccgctccgcgacgtagacctgacggcccccgacggctctctctgctcctttgccacaacggacgacttctatgacgacccgtgtttcgactccccggacctgcgcttcttcgaagacctggacccgcgcctgatgcacgtgggcgcgctcctgaaacccgaagagcactcgcacttccccgcggcggtgcacccggccccgggcgcacgtgaggacgagcatgtgcgcgcgcccagcgggcaccaccaggcgggccgctgcctactgtgggcctgcaaggcgtgcaagcgcaagaccaccaacgccgaccgccgcaaggccgccaccatgcgcgagcggcgccgcctgagcaaagtaaatgaggcctttgagacactcaagcgctgcacgtcgagcaatccaaaccagcggttgcccaaggtggagatcctgcgcaacgccatccgctatatcgagggcctgcaggctctgctgcgcgaccaggacgccgcgccccctggcgccgcagccgccttctatgcgccgggcccgctgcccccgggccgcggcggcgagcactacagcggcgactccgacgcgtccagcccgcgctccaactgctccgacggcatggtaaggccgggaccccaggaagtgaggaagttagggcggcgctcgggatatcagggacgcgtttccgagggcggggagctggccttgcgggaggtttgggccaggatccttcccgagagagaggacccccttgtcctgggcagctgtcactggggtagcctgttttggaagtgtgcgggcaagcgttcgagctgccccattgggggcgctattagaacactgcagcgcgaacgtgaagatctttttctctacttatccctacttccaaaatgtaaatttgcgccccttggtgactgtccgcccttggtttggccctgcatgttgcagacctcatctcctacccacccgtaattacccccccaaccaggacaggtctgggcccggaactagagccttaggctagagttagggagggggcggctacaggaattggtgttcgggcctcgagccgtcccgcgggcctgactcagtcgcccttgctgtttgcagatggactacagcggccccccgagcggcgcccggcggcggaactgctacgaaggcgcctactacaacgaggcgcccagcggtgggtattccgggcctctccctgctcgctcctcctccttcatggagctgtcctggcctctatctaggacgctcccacccccactcacacacgcctatgtcctgggaagtggtgcaggagatgaaatactaagcaagtagctccctgtcttttggattgtcccggactctaactaaagtcctcagtttccaatctgtctcaaagtactgggcccgggggtgggaggcttgtcgcggccccacccctgcttactaaccgagccctccccgcgcagaacccaggcccgggaagagtgcggcggtgtcgagcctagactgcctgtccagcatcgtggagcgcatctccaccgagagccctgcggcgcccgccctcctgctggcggacgtgccttctgagtcgcctccgcgcaggcaagaggctgccgcccccagcgagggagagagcagcggcgaccccacccagtcaccggacgccgccccgcagtgccctgcgggtgcgaaccccaacccgatataccaggtgctctgaggggatggtggccgcccacccgcccgagggatggtgcccctagggtccctcgcgcccaaaagattgaacttaaatgcccccctcccaacagcgctttaaaagcgacctctcttgaggtaggagaggcgggagaactgaagtttccgcccccgccccacagggcaaggacacagcgcggttttttccacgcagcacccttctcggagacccattgcgatggccgctccgtgttcctcggtgggccagagctgaaccttgaggggctaggttcagctttctcgcgccctcccccatgggggtgagaccctcgcagacctaagccctgccccgggatgcaccggttatttgggggggcgtgagacccagtgcactccggtcccaaatgtagcaggtgtaaccgtaacccacccccaacccgtttcccggttcaggaccactttttgtaatacttttgtaatctattcctgtaaataagagttgctttgccagagcaggagcccctggggctgtatttatctctgaggcatggtgtgtggtgctacagggaatttgtacgtttataccgcaggcgggcgagccgcgggcgctcgctcaggtgatcaaaataaaggcgctaatttataccgccgtggctccggctttccctggacatgggtgtgggatccggaggaaaatccgcaaactgggccagctgtccctcagcgacgcctgtaggcggcaggcg

SEQ ID NO: 5408 - DNA, 928 bp, Homo sapiens
gcgggggcgagggggcgagggctggccgcccgtgaaaggaaaaataaatcctaaggaagcaagaaatcggacgaaaggatcttactttaagtgatctccttgaacgcgtcttttcaaactccgcgatagcccaaggagctgcgcggcgcggcggctgcggctaagacctgtgactaatgccatttgacctgagcccatggggttttgtgcgtcctgccattcactgttatgtcgttatcttcaagtttatttcggagaaatcactcgcgttctttgtctcaaggctgagctttctgtctatttctctttcaagagaaaagaagacgggaggggaaaagagagaatcggagtccctggtttggggtttaaggtccttgcctacgctgcgggggaggccgcagcagatccggctggggctccccgggcctaggtggccaaagctgccgaaacctgccttggatagtagaaagagcgtgtcggaacgcactctgggggtttcgttccccccgcgcaggggagagcgagcatgttcctgccccgggcgccgtgcggtcgcagcagcagcgcggccctctccagtgcgagccgtgcctggaatgtctcgggtaagcgaagggccagcaagcgaggcgaaacggacactataaagcagagagtggtgtgagcttccccgccctctgaaaagatggcaagtctccgtttcgggaaggctgcaacgctaaggtcaccctttgcaggcttcggacccccagtcctccatgctccctgccggagcagccaacagagtgagagcgcattttggaaagattggccggatgccgggcggcgacagggaaaagcgcccgacgcctggctttggggtggggggtgtggggagggggggcagggagctaacgggcgaggcgaaggaggagggctgcgaggctcg

SEQ ID NO: 5409 - DNA, 1267 bp, Homo sapiens
gcgaatcccgagtaattgttttccgagggggtccgtgcgcgctcggtggcgccgcctcggtctgggttcccccgaggaaaaatacccacccgcgagggctcggcggcttttcgactcggcggggatgaactgtggcaacttcggcagcccccaccgcggtgcggaagtaaagagggcaacattggcgactgcggctcggaggggctggagcgcgtgaagccgtgggggcgccgtgcgcctcccgctctctcgtttcggccgcaggtcctgggactccgacttcggtgctccgggtgatagcggctgcggcgcctgcagtccagatcctcgcagttctgcgggcgaaggaggcgaacggaatcggcccccagtggggagcgcaacaagccacagtagccaaaccccgcgctcctgcccgggctcccagacgaacgcagccgcagcggggggccgggccccgagccccacgccgccgccgccgcgccagcggtggggggcgggctgggggcggggcggccggggctgccttcccgggcgcatatgcgagcgcagcacccggcgctgccgagccacctcccccgccgcccgctagcaagtttggcggctccaagccaggcgcgcctcaggatccaggctcatttgcttccacctagcttcggtgccccctgctaggcggggaccctcgagagcgatgccgatggatttgattttagttgtgtggttctgtgtgtgcactgccaggacaggtaagcatgactgtggcggttagagggatccgggaaatgggggtgcccacagaccacggcggcgtggggagacctggagccgagctttgcgctggtctggggaacggcggtagcgtggaccggttcctgggatctctttgccctgctcggagtgacagggtgaaaatagggactcacgggcttgaagatgtccccgttgagtgccccttctcaggggacccggcctcaggggcgcaggagtgaggggcgcggccgagtaggcgcaccctcttgctgctagtaaccggctttccgtcccagggagtcgaaacccgcagcagggcgggcccgcgtgccccgagttcccgaacttgtaaggtgctgtggaaaccactctcgccgacccccgccaggctgggaaggggtagctgcgggagtcgcacccgcagagggagcgcttccggctggcgggcgcggccggggcccgggagggcgcggtgcggcgagggcagagagctgcgggagaaccctgggatcccgcg

SEQ ID NO: 5410 - DNA, 1225 bp, Homo sapiens
gcggaagtcgctccggatcatgcatggaaggctaattgaaaagatcagtcggggcgcttgtggcagccttgtcactttgtgacagtgctccgctccgggaaattgcatcgtcacgacaaacgggaccgtgataaaacgaccctttccgtccttatttgtagatcactcagacgagattgaactgcacttgtttccccttcgaggggagccgcgttttcagggtagccgaaggcttggggctgagggggggccctcaccaaggcgcgggtgggggccggagcctcaactcgatgagaagtgacaggcgtttgggggatctgggctccggccgggaccagcgcaagcagggactttgcggggacaccgcttctccaacagagcaaggcctggcccacgtttccggtttctcctaacttccttttattgccttcctttgcttcgcaagttccatctacccctccagctacagagccccacctctaggcacaggaagcttcccggaaaaagaaaggctgtcccagaaagagaccgagagagactttccaaacttcgggcatagccacggcaattcccagtctgctaatgccaaggcgggcgcgtaaggccgcctaaatctagacctccctcctcactcatttcaaaaaataacaacgtgccagccacctccgcagataccgccggctggtgcttgcccaggagacgccagggccagagcgccactcccagcatcgaaatggcagagagaaagcgcagctccaaattccccttcagaggttaagcctcaatcattgtgtcccttccctagggactgctggcgctctcgcccactggcgatgattatgcgcctagaactcgaccgcgaagcaactaataggaaaacatatggtgtcaatttggatgctccgcgcctcgcgcacacccgggaacgagcggcacaaagccctgccggccggcccgcgaccccgcgcccctcggggcctgccagccgggccgcagcgacaaacgctcagggctgcgcgccctggctggggcccgcccgagagacagcctgcggctggggagtctgagctccaaggggagagcccagccgccgaaggcgagcctaccggccaagccctggggtccggcaggttctgcacaactactcccgcaaagctcgccacctttgtgccctttcctcagctacgcgcttaccagccccggaagcaccagggggcgaccggcg

SEQ ID NO: 5411 - DNA, 1627 bp, Homo sapiens
gcgcagcagagcgccggagaggagggacgcggaggccaccgaggggtcagcagggccgcggcgccagggtgggggcctccaggcggcgctggccacggttcacccgcgagggcgagcgcgcccggccggccgcgcctcctgccgtccgtgcccgggggtgggacccgcgccgggagctgccgagtgcgtggagggagccaggctccggctcgcctgatggattgacttggagatggatcgaattacaccatttgccgtgcatcggtttgttttgctcctgctctgtcccgctgctgctgctgctgctgcaaggggtggtggcgagtttcaggattctatcaaggaagccaagacctaaggagacagagggatatctatttttacaatatttttctttattttctttcttccttgcgcgtggcaagcttttttttttctttttcttttttcttaccagcctccccccaatgaggtaagaccgttttcaacaatttgctaatgctcttgtggcgcccggtgggggtcggaacctgagatcccgaatcgctgtgtgtgtgtgtgtgtgtgtgtgtgtgcgcgcggtgggggtcggaacctgagatcccgaatcgctgtgtgtgtgtgtgtgtgtgtgtgtgtgtgtgtgtgtgtgtgtgtgttgccactggacagttgatttattttccaagctgctctctctgcctgccgtgcaagggacgcgcaaagggctagagaggtttggcggacgcgtcaaaactggcaaagctggcggcttagggggaggggcaagtggacttggaggccctcctccactgtgcacccccttggaaaaaaagcggagggggcatcaagtaaaagtttcttgccaggcagagccagctcggcgtcccccgcacatagctggggttagcaggggttgcttctctgccgggcacagcgtctccaggagccagccggggagagctgagccaaggccgaaggagccgcctgcgggcttagccgccccctcccgcccgttggccccagagcggacgctgggacgcccggggtctggcagctctgcgcccggctaggagcgggcgggcgagcattagcctgcgtcctggagaaggggcgcagcgccgcagttgaggccggagcagcccctcgcgggcgtaggatacctgtcagtgagcgcccggattgcacggcccccgggtagtgcctgccggcgaggggcgggagctcgggtgacttggccatccccatccccggcccaggcccggagggcggccgcttcccaccgtccctctccccttactggcagagcgcgctgcgggcggactcccgggcccggagcagcccaccggccaccccaccgcccacccggctcccggtgtctcctcccggccgctctacccagcaactttccgtgctttgttccccgactggaaatgctttacggaagcgtcttggacagggtctccgccaggcgacaagagctcggtgctgagatgtgttacgttctcatctccccatcaattatggatggaaacaaataaggaagagtcaattttgctgagccccttctccggcaacgagaggcgttctgcagccgggagggagccgccgctcgcgccggcagccg

SEQ ID NO: 5412 - DNA, 1857 bp, Homo sapiens
ccgcgctgcctaggcaaagggacccggcgaccaagacacccccgcgagggcccagggcgcgtccctcccgccaggccccagactccggctctgcgccaccccctcctacgccccggcgcgggcgcagccagtccggcttcctccaggcccccaagtcccggaccgagtgtggggccgcctctccctctcggaaggagccatcgccgctttaagtggaagaggagaggaagggggcgggggagcggggggcggggagcggaggcggaggagggggagggggatccccctggctcccacgtggtccgggcgcctgtgaatcgcgcccaccggagggtctcacagcgaaatacaaaagcagctgggaagcggcggggactcgagttcccagcgccgggcggagcgccggacagagccccgcagcgccccgcggccgcgatggggccgaagcgcccgaagccccggagcccacaaactgccgggcccgcctcgccgccgggacccgggtgcctgggctcggcttgaagcggcggcggcgcaccggcacagccgcgggagcatgggcaggaggatgcggggcgccgccgccaccgcggggctctggctgctggcgctgggctcgctgctggcgctgtggggagggctcctgccgccgcggaccgagctgcccgcctcccggccgcccgaagaccgactcccacggcgcccggcccggagcggcggccccgcgcccgcgcctcgcttccctctgcccccgcccctggcgtgggacgcccgcggcggctccctgaaaactttccgggcgctgctcaccctggcggccggcgcggacggcccgccccggcagtcccggagcgagcccaggtggcacgtgtcagccaggcagccccggccggaggagagcgccgcggtgcacgggggcgtcttctggagccgcggcctggaggagcaggtgcccccgggcttttcggaggcccaggcggcggcgtggctggaggcggctcgcggcgcccggatggtggccctggagcgcgggggttgcgggcgcagctccaaccgactggcccgttttgccgacggcacccgcgcctgcgtgcgctacggcatcaacccggagcagattcagggcgaggccctgtcttactatctggcgcgcctgctgggcctccagcgccacgtgccgccgctggcactggctcgggtggaggctcggggcgcgcagtgggcgcaggtgcaggaggagctgcgcgctgcgcactggaccgagggcagcgtggtgagcctgacacgctggctgcccaacctcacggacgtggtggtgcccgcgccctggcgctcggaggacggccgtctgcgccccctccgggatgccgggggtgagctggccaacctcagccaggcggagctggtggacctagtacaatggaccgacttaatccttttcgactacctgacggccaacttcgaccggctcgtaagcaacctcttcagcctgcagtgggacccgcgcgtcatgcagcgtgccaccagcaacctgcaccgcggtccgggcggggcgctggtctttctggacaatgaggcgggcttggtgcacggctaccgggtagcaggcatgtgggacaagtataacgagccgctgttgcagtcagtgtgcgtgttccgcgagcggaccgcgcggcgcgtcctggagctgcaccgcggacaggacgccgcggcccggctgctgcgcctctaccggcgccacgagcctcgcttccccgagctggccgcccttgcagacccccacgctcagctgctacagcgccgcctcgacttcctcgccaagcacattttgcactgtaaggccaagtacggccgccg

SEQ ID NO: 5413 - DNA, 2423 bp, Homo sapiens
gcgcgcgcgcgcctgcggaggggggtggcaaggatccagaaggggagcccaccccttcttccgagctcagctctggggagccgggcgctcaggctcgccaggctgcaaagagagctgagagctgcctcgcgccccgcgcagaaccggcggtggaataaccagcgcctcaagtgtgtgcatctgggaccagggggcgggggagggggacctgcggccccgcggccaacccggttggtgcagacttggggatcccagaagggacagtgcccgcccagtcgcggcgattgagggtccctgtccgggcgcagctcgggccagccgcgtgctccggggccgcggcttctcccggaacccccgcgggcggggcctgccttccggagccggttggcggggggcgggcggcgccggggaaggggccgttactttcccagagcggcggggcgacgtcaggcggaagggcgcggggcgcgcacgctttaaatggcattcgctgtcatccgagctcagagccgtgtgggcagccgcgggctatataagccgcgagcctggccgccgcggggcagacggcgacagcagcggcggcgagcgcctcggagcgcggcggaacagcgccccccgagccccgtgccccccgacgggtccgcccgcccgcccgccctcccgaggagcgccggcccgggcccgcgagggccgccgccaccccgcagcagatttggatcccccgcccggcgagcccccggctgctgcctcccggggggccccggcgcagcggccgccctcggagagccccggcgccccgccgcccggccccgcagacgccggaggcgccatggccgccaagcccggcgagctgatgggcatctgctccagttaccaggcggtgatgccgcacttcgtgtgcctggccgacgagttcccgcagcccgtgcggcccgccaagctgcccaagggccggggccggctgcggcggccgcgccagtctcgcttcaagacgcagccggtgaccttcgacgagatccaggaggtggaggaggagggggtgtcccccatggaggaggagaaggccaagaagtcgttcctgcagagcctggagtgcctgcgccgcagcacgcagagcctgtcgctgcagcgggagcagctcagcagctgcaaactgaggaacagcctggactccagcgactccgactcggccctgtaaggggcgccgcccgcgggggggacgcgcgcgtccgcggtccgcgcggggaccggcgtgtgaaccccgagagtgcccgcgccctgctcccgggggacccgcaaggacccgggaccgccgctcctcgcgcgctcggactcccgccccgctgcgaaccggtcggtgcgcccctcgccgcgctcgccctggcccgggagcgccgggagcggggccgctttcctcgtccttgtaaatgtttattttttaactcttcccagtgcgaactctgctgtgagtgtgtgcggggaggcgcgcccgcgctgagtcggcggcgggtagccactccatgcccttgtccgatggtttgcaactccgattttgcacaccgctccaccgtgccccccagcgcacacccattcacactcacgccaacactctcgctgaacacttttataattgttaggcgtggccgttgggactttgggcgcagcgcggctgctactgcgtctggaggattgatatttatttttgcattgcgatggctgaaggcatttatttaacgatctttttacctggatatgtctgtgaggctcctgaaaggagacaaataaagtcaatatatttgcacagtgcagttttccaggctcttgactttttgcaccttcggggtccaggctcccaagactcggggaggtgggggaggaggtggcagggggatgtcggaccagggagccgggagtggagctacctccacaagcttcggtcaccggaacgaggttgcgccaccggtgcgcgggtcggttgcctgcctccccaagtggatccacccccggtccagtgtgctcctgcgtccctggtctattccccatcgccggcatccgggctgaagtgaagccgcaggaggggcggaggcagagctgacgatggagagctctctcctccgtacagttcacttcccagagctggggtcagggtcctcgccccgcacccgccacagaagacgcatctccctctgcgctgattcctggcggcgggtggggagatgtcggagccagcaatgcgagatgtttgggcgttgggacccgagagtgggctggaggccagcctgggttggtcgagagtgtgggtgcgcgctcgctgtcgcgggcaggtgactccctgaccgcagttgacccagcgcagtgcctggcgctcctgcgctgcggggaaaaccgcggccgctatgtctccagccgttctctgcgctccg

SEQ ID NO: 5414 - DNA, 1146 bp, Homo sapiens
tcgccgcaggactcacgctgaccacgcccaagccggccccgcccactcgccccgcccaccgccaaccccacgcgccctcgcccggacacgcgtccccgcagccctggagcgctcgcacccactcacaagccctcgtgcccagcccccgtgcctcaggagcccacacacactccgacccccacgaagcgccccaggccctcacccccgcgcccaggcaccgggcggccgctccccggggctcaccttcgctgcagaacttgccgccgaagcccgtgtggctgcagtcgcagcccacctcgccgggggccagcacggtgcagaggccgccgttggcgcaggggttgcgcgcgggcgcgcacagcgggtcggcggtggcgccgcgcaggccctggctgcccagcagcgcggggggccgctcgcccagcttcaggttggccaagaggccgcggaagggcggctcgtacttgacggtgctcagcgtaagcgccgagaggcgcacgtcgggcgggatgccgcccacgaacaggtcgctggccacctgcatctcgcgccgcttggagcgcacctcggcggcgcgggcctcgccgtccaccgccagcgccgtgcggcgcgcgtcgcgggtcagcagcaccatgtgccagcggtcgtcggccaccggcgtgtccagctgcagcgtggccggctcggcgcacgaaagcgtgaagcgcagccgcaggcggccgtccaccagcagcagctccaggaagtcgcagtcgccgccgtcgtccaggtagagcagcagcgcgcgcgtggcgttggtgcgcaggctgaagctgagctcgccgctgctcgccgcgcccgcccagcgcgcgtagcgagcccactgcccggggccgccgccgaactccaggccgtccgcgcgcgccgccagcgccagcagcagcagcaacagcagcggcggcggtgtcggccgccaccggctcccggacgccatgcctacggcggccccggccccgcccggcccccggcccccgctcaggcttcagagccgcgggcgcatggggcgggagggggccgggcgctccccgcgctgagcggggctcccttgcaggctcacagtgccatgggcccggccgcggggcgaggcgcgcagaggcccagatgccg

SEQ ID NO: 5415 - DNA, 577 bp, Homo sapiens
gcgggcacagtcggcccttgacggcgcccaaggccccgcccgtgcggcgctgcccattccccatcaccagagatcggttcgtccagcgggcaggccccatcccaatgttaggtcaaagctcctatcccttggacccgggcctggcgcccccgcccccggcgcgtcctcacccggcggacgcggccgcgcacaaggcccagcacggcccgcgtccccgcagcccggccgcggttgaacatctccagcgcgaagcgggtgggcgccagcagctccggggacggcggcccccaggcctgaaagctggcggctcggggctgggcgggggcggccactgcgcccgggagcagccccagcagcgacaggagctgcagccagggcgccatggcgagggcgaagccggcggcccggacccaacagacgctccaccgacccaccgggtaccgagcccgcggccagcggggcctgagtcctccctccagcggggcgacggcacgccgaccaatgggcgctggtttgcggcgcctgcgcgttctcttgtttacaggaggcacgtggggcgcgcagggtagggagagcg

SEQ ID NO: 5416 - DNA, 1721 bp, Homo sapiens
acgaagaaccggctggccacgccgaagatgctcaccacgccccgctccacgggcgagagctccagcaggcctgggggcggggcgcaggtcattgcggggcaggtgatccctggcccactccgcccctcggcttgttcgcctccggggaccctatttctggggtggggttggggataaagggccagggttcccggcgcagccgcccccaagggcctccagagcccaagctgccctctagggcctccggagcccaagcctgcgctagctcagattagcttgcctgtgtaggggacccccggcggccgcacccagtcccggaccttcagacgcgagcccgaccccagcggttccccagcctgggccaggccggggcgcgtgtctcgggccccctgtggctgcaccgcgcgccctgtgcccacgggcgaaggcgctggaattcggcgctcggagcccgagtttctgaaggcgggaggcggcgcccgacctcaggggttgcgctgggctgccggagccaagagtgtctgcgtccccagccccgcgtcagaagggaccggagcccgagtccgccccggttcccggggcccccgagcaggtgcccgccgagggtctcagagtgtgactgagcgggttggcccggcggccgttgccccccgcccccgccccttcgcgcctggccgcgccactcactgtcgcgggtgtccgcgtgcgcgccgccgatgcggccgtcggggagcgcctggaggtggaagccgatgcccacgttgcagtagagccgccgcagccgcttgatgcccagcaggtagtcgccggcgccgctctggacggccgcctccttgggctgcgctgccaccggcaggcgcgccaacgagagcgccaccaggctctcccagcggcgctccagctcggcctccagcgtgccgttgggtgcagtgggtgcggcggcgccccctcggcccgcccagggcgccagcaaggccagcaggaccgccgggagcagcgctaccgcggccgtcccgggccccgacatcccggcccgagggccgtgcgtcggtcaggcggtcagtgcgcccgggaagctggggggcagagctgcgcctgtggcgtcccgcgggagcgcacggccgacctcgggcaggagtgcgcaaccgaggaggtgcgggaggcaagcgacggggcccccgggcgccgggctctaccccggctgcatggagcggcgagccgggcggaaagcgcgcggctggagctgggactctgaggagcagtgcgcgcctccctgagcgccaggcccgcccgaggccgagccgctatatatatagcccggcgccccctcctactcgcccgctcccgcggggggccgttcgcgttctcctgggcgcccggggcgctgtggcgttcgcggctggtcgcaggccgcctgccaatcagggccgggggaagggaggaggctggggactagcgccgcgagtgccacctggagggaccccggcccccacccttggctccgcccggcccacggacctgttcgtcccgccccttggcggctcctacacttctgcttttcagccagttttgcctcttgcactttgtccctgcctgtccccgtccccgtctccctctctgctccggccgccttggcgcagccctaactcgggcatccgaagctcctagtgggcgcagaagccagcggctgctgcctgcccttcgcctttcggaggctcacg

SEQ ID NO: 5417 - DNA, 1721 bp, Homo sapiens; identical to SEQ ID NO: 5416

SEQ ID NO: 5418 - DNA, 615 bp, Homo sapiens
ccggcgtctgccgagcgcgcagcgccgggcgaggcgcgcgggaccagcgggtgttgcgggcgcgcgggctagaggcggccggcgccccctgctcggtgggctcggggtcgggccgcgggggcctggggcccggcggggcggcggtcccagcagcggcggcggcgcggcggccgcggagggaggctgagcgcgggccggctgtgctcgccaagggcttcaggcgccgcgctcgggcgcatttgtactttgccgcgggaagcaggcagcccggcctggcgctggcctagcgctggcgcctcctctggggcaccgcgggctcggtggattggccacccgagaaacaggcccactttttcccctcctctcttgtgcgggtctccgggacggacgctccaggcgcggcgccgagtggaggcgagggggctgcggagggggaaggggccacgcgggccacggggtttaacccctgactccccgcgacgccaagaatgcaggagggcagagttgagggagacctcaggtggaactttcaggtggggaaggctgagctgtcggggctgcgggtaccgggaaggctcagggtaaggcgctcggcggtgcgtgcccggaactccg

SEQ ID NO: 5419 - DNA, 1542 bp, Homo sapiens
acggaggcgcggcgctctccacagccgtctctaatgaagggaagcgtgcctcgaagtcagtcccggtgcgccccctcctcccccggcgccccttcccaaaccccgtcggatctccaaaggctggaataggcggtgcggctgtagcccgcgctgtaatcgtaggacacctgatggggcggcggcggcgggggcagggcgcagtctggaaagaagggggcgaaagaggccaaatggccccgcccgtcctccccgccgggagaatccgcagcggcggggtacagggggctcaagggctcgttcaaggtcaagccgccgcggggggcagtcagggggctctttttggtcggggagcagcccgggacgctccagggctcggggtacagtaggtttcccaccactgccggcggcggctcaaagaggccgggctccagctccgggggtccccgcagtacggaggctccggcggggaacacgtcgagaggctcggcggcaagcaagactgccgcctccgtgccggcgccgtagtcgggccccagcagctcaaagaactccacggcctccgcgcccttctccaggtcgcccaagctcacgtccggccccgacgggccacacccgccgccgcctgcccgggacggctccgtgaagaaggacggaggcagattgcgtgcccgcagcgggaccttcctggcccctgggatcgccgtggcccccgcggggcctgccacgtcccctcccgcgcccccagtgcccgcacctcctagcccggccgccggcgcagccacctcaccccccgccggctcggcacccccggggacgtggcgcagcgagtcgaagagcgcggccagacttcggctttgcaagctggcggccgcggcggcctgcgacgcctcccgccggggggcagccttgccgtgggccggggccgcgactgtcggggcgctaggggcggccagcggccgtttggctggcgtgtcggcggcgctcggggagggcgggccggggggcgcggcgcccatgaggccgctgcagcgcttgatctgcttctgcaggtacttgcggtggttcaccttccgcttcgacttgcccggcttgtccagcgccagcttgatgttgctggacgccgagtcaatgaagctgagtagatcgcgggtggcctcgcgcacgtcccctccttcggctcccgacagcagcgcacccgccggagccccggtctcatcgtcctcgaaacagcagcccttgtccagggctccgaaggcgccccctagcccgtccggggagcccccgaagccgaagggcacgaaagggtgcgtgctgaggagcgccgcctgcaccgccatcgccgcggctcccgggctgtccgcagcgctgcccgtgcgcccccgccagctcctgcccgccgcccagacccagctcccgccccggcgcggcgcgcgcggcgcagcctactagttccgggcctggctcgctgcgctgcctcccgggggagctcattaggtcttgtaagcaaggggcggagggagggagcgcgcggcgaccgtcccg

SEQ ID NO: 5420 - DNA, 1542 bp, Homo sapiens; identical to SEQ ID NO: 5419

SEQ ID NO: 5421 - DNA, 1768 bp, Homo sapiens
gcgcgtcgtgtcctccaccgcctcttctcttggcccgactggctctggtttccttcacgttcccagcctccaaattggcgtccgccccatggctcgtgtaggacgctaaaagcacggtaaatcccagggcgatctccagcagacgccctcgacgcatgatgccgagccgccaccggctcccgccgcctcttgccgcgcccggggctcggtctgcggccgccgctgcgccctgaagcgcaccgcgccgccggggtcccgctatcccgccgcccgtcccccgggccgggctcctcccgccttctccaggcgctgctcccacttcaggcggcccctgccagctgcaacacagagacaaatccccgaggcggggagactttcagggcatcgggatgctgaagcctcgcggtccccattcccaagcccaacccgtgcgccgcctgcgcgtggcgcagttaatttgggtaagggaagaccgtttggtccacagctggctggaaagcccaggcccccggcggcagcagccccggccgatccctcggcctcccgggccccgccagaagagcgcggcgcaaagtacccatatccccagcggtcctaagccccgggcgagctctctgggtttattttttttagcggcacgaattgcgcgcgatgcgcgctctgaacgccccactcctcagcctgccctctccgccaggctggaagccagccgcgccgtccccgccgactccgggcgatgccaccgccccccgaacatctgacgcggagcccggcaccaagagccccgggccaggaagctgtcaggcaggggagggccagcgccagctgtggacgttccgggacagcccctcaccccagtccctgtccctgccctcggcgcggcgcaaacgcaaaagcctccgtggccgcagctccagccccggtggccgcccgacccccgtcgggaccccggctgcacccactggagaagcggcggctccgactcccgaggaggcggcggcggctgctcccagtcgtggccgctacagccactgctcggctccgctcgcagctgtcccagctgtggctcctgtccgcttgtggcacccacagtctctgccgcggctcccgcagccccctcctttccccacctcttcaagtatcgtccgcgcagcggtttctcgcgagagaaatactttttttaaaaaaagaaagaaaaagaaaatgacaccccctccttcgtcgccctcatcaccaccccaccccccggccccatccatcctccctttccactcccctttgccagcctccgcctcggtgcggggcctctcgctcgcaggattagcgcagtgggaggaggcagaggtgatcaggtcctgcccggcctgggactttttgtcttgaggtggggaggggagaaatgggaagaggtggagtagcggttttagcccgctctgcggctgcgaggtttagatccgagattaacctctcccgcgataggtgaagccctaccggagcagaaagctgttccacctgcaccaagaatgcgcgctggagacggttgccccggaggccctggcccgagagaaaaccagtccccgctgcccgcgcctcccggtagcgcgctccctgcgcctctcccgccggacactcagcagacgccggaggccgggaggctaagactgggcgcgtcgcaggccgggaccgcggcagaggctgctgtgccgaccgaggagagggctctgccgcccccacttgccctgggtgtcgagagcccactccagacgcg

SEQ ID NO: 5422 - DNA, 2656 bp, Homo sapiens
acgctctccccgcggcaggaaagtacgttggtgtcatcctagagccccagagggctgagggaagactcgagctctaaaattagccgcttccaggcccggcgccgggaatgccctccagttcgccgcgcctcctccgccgccccctcccgcgcgccccctctcccctgcgccacgctcctagatcgctagtcatccccgccgccgaggctcctctccccctcgcccttttcgctcgcggtttgggaggaggagactgcgagagacaagcgcgagggggagactggagaggggcttggccgtgcgtcggcgtcggctgtgatggggagcccggagcagccaggcggcgagcagtagcggcggcggctgcagctcggagcagacaggagagccggcgctcctccccgcaggctgcgctgtgaactggcctgcggattgggatctcgcgcctcccgtccctctcctcccgctgctgttctcttcatctcggctcccctcctccgcttgcgaacccccggcggcggcggcggcggcgtcccgagcgcagagcgcttctgctcgcggcctcagtcccggctagcgcgcggtgggcgctgcggcggcagcagccgggggaccggctcgcccggagcaagagcgccgagcaccgggtgaagaagaccacgggggaggcgcctcgtagagccgtggatcgccagcggaggcaagggtgcgtggggatttgtagcgtgatgatttggctgcctggtgcaccgactggagcgcgcctgccggagcacagcctcagctgctgggtgcaaatgggctgcgaggtgggctggggaggcgagagccgacgaagcgcgtgggggaaacttttcaccttgtaaagttccaacctccgcgcagccccgagccgccgttgctaccgctgcaaacaggagaagagggtggcttggccccgcggcgggagccgggaggtttacacggagagttggccaagtttggggctgaggatctggggaggggttgcgaggggggttgcggatcagtgcacccatccccggctcccagccgcccctgcaggtggatgagaaggttcaggtggcgagcctgcttggcagccggtgcctctcgggcgcagtgggggatgttcagatgccgatggatgatgcacttaggggaccccgaggtgcaagttgggtcatcgctaggcgaggcgcggcgcagagagggagcccagcctccactttcgctaggaaagggaaagggttaccagtctgcgggtccgttccccacgcctgactcgggcttgcggggcttgtggtcagggtgagatgtagtgaacggcggcggcggctcttcgactggggacgacatcctttacggagtggttggggacagagactgtccctgctatcttgacaaggagagggaaccggaatgctttgcgagagtgcatgatttttggcgggcgtgtgggaaggctgcttgtctttgaaaagaaagcagcgcgggtctgaccatccccaggagtgcggaggagctgtctccggattgggggcgagaacgccaggggcaccagctccgagctcaggccccactcccgggcggttcgggacgaatcccctctacaggccagtgtgtgtgcagggcaagtgtagggggctgaggggcgctggcggggaggcagtagaggtggcctggaccatcttggcgcggcgcgcggtgagcgcgaggattccgccagtgggagtcgctgagctaaagtgcatctggccccccggcttgcatgatggcgagcccggatatttttagctgtgctgtgatctgaattccctcctctcctctctcgttgacttttgtcacatgtgctttccgagatggtttaacattgaacatgattgggctttgcggaaagcaacttttattcactttccaccgttctcctcttgtgggcggggggtggcgggggcgtgcttggggcaaggatgcaggggtggccggagtttggctgcgagctaagagagccgcttgggttgctcgggatgagaggaacaggggtgctcccggggtgtgggtgtgctggcggtgacatcctgaggctgcagctcgctggaataatgggctcaaaccaggcggtggagaggggtccccggaatggacgtcgggggcggggaggctgcggagaccctgcgaggtctccgtgaaggactaggaggggctcccgggagggagtggcgcctgcggcccggagcgtgggcggccggtggctctggcacgcggaatctggtggactcctagcgcctcggccgggagctccagctccatcccgccgccgccgcgcgcccaatgggactcagcttcgggtttgggcgaacctgcagcagccgcggcgggagggagggacgctgggaccgcggtaatgattgaagtctttttcccccctctcccctcctcccgctcctctccgcccccagactctggcgcgtttgttttccaagttggatcccacttccatttacaagtgtcagacaaacccgcgagaacctcccccaacccgccccggccccagccagactagggagggcgcccagggggagggggcgagctgtctgggcagtgcctggggaggtgcgacgcgcccacccggggcttgagcggctggggttcctgtgcg

SEQ ID NO: 5423 - DNA, 623 bp, Homo sapiens
gcgccgtagcgcctcctgcccacaaagttctgccagtcggagaaggtgtagttgttccaagagaagaagtgcgaggcattgggcacggccagggccgcctccgcgctctgctcgtcggcccggccctcgtggggctcggtggctcgcaccaaggggaggagacagagcagcaagaggtgagggaccattttgcaggagccacccctcccctgggagcctgcgggccgggcgtcccctcccgctgggatcggagcgcgcagccggggtgcggggcgcacagcatacaaggccgtcccgaggagccagggagcccggacgcgcggagcaccgcgccgcccgccaccagcccgcggtcggcacgccagctccgggtttgttggagcacttttatatctctgctcccaccaggctgctagggagcgcctctgcctattgggcagcgcggcgtctctcgcggcgacggtgacgcgctctggctctgacaagcctggctccccccaccctaccgggtggcgccgttgctgaccccacgcccagccgttcccactcccgcctgaaactcctccgacagggcttcgcttcgggggctcagtccccagcgcgtacacactcgcgtggtgtcg

SEQ ID NO: 5424 - DNA, 1967 bp, Homo sapiens
gcgcgtcgcccttgctgcccagccgaaccccgctccctccagggctgcgctgcacggggctgcctccccgagccgccagcgcccggcgcccctccggcgcgtccgcccttcccactttgtgcgcccgcggcggtgggagcagagccggccggctcctggggactcagcggccgcgctggtgatgggcagcgctccttccccaaaggcgggcggcggggcgggggaggtcgcggctcgggtggtgccgccgcacgggctcggattccgagggggaagtggcttgtcagccccggctccgggaagagtgaacaataaggctagggcagccgccccagatcgttatattcctgggtctaataaagtcaggatcgctgctttgcttcccccgccccagaagaataacggtttgcaaaatggggcaaaatgggcagaatcgcacggccgttgttgttggtgtgaccgttgttgcaccccagtcgacatgacgttagtttttcatttgccaaattgctggttagttgcaaagcctaccctcggccgcgagcactgaaggatgggagggtcgagcgccgcgttttgacaggaggaagtgcggaggggcggagggcgaggagggcgtgattggggctgcctggtgtgtgcgcgcgcgtgtgcgcgcgtgtgtctttacacgcgccgcgtgcccagtgttgcacggggcgggagaagaatggcaggtagccgcccgaaacacctcgccctgtctcctttctttgggcgaggttcccgatcctggcaaagtgtgaacaatagggagctgggaggaagacagtagtgatgctgccgcgggtggcgggggttgcgccgccgcccagagaacctcggcagtgtgcagggaggtgcatttcattttggctatttccatcccggcctccctggaaaattcttctgtgcgtgcccaccctcccctccagctgtcatccccccacctccacccaaggatttgcgctttggctctgatggacgggagggaaggaagaaaagcaggggccgcagagagctgggtgggttgggcggacattctgggcggggggcgtgtgctgggaagcgatcgaggaaagccgggcggaggggctgtgtgtcgcggtcgcagctccaggtaccgttgtacctgccctggacggccgacccccggttggggagcgcacggggcgggccagggagcacccagtgcgccccctccgcgggcggcacaagagcagcgctcggccgccgcctccagccaactcgggtccctcccacggcgaccaatcagtgcgaagctggctgggcgggaagccgcgagaggcttttattgcggcgcgggtggcggccaggagctgccaggacagtctcccggtgcttcagcctaacggtctcgctcactcaccgccaagagaaaccccgccctgcggccggtcccccgcctgcccggcagtttccgaggaaataaaatggagactaggtggtcaccgggagtgctcctggtccggccgcccgtgctcgcccactctcgcctctttcacgccgacttggagcatcccaccgcccccgccagcgctcactctcgcgccgcggaatccgggcctgagcgcgtcgccggggagggcatcctggcaggcacacctacgcgcgtgcgctgaccggccgaccgcgggccgggggctctactgacggcggggcggggccgtggcagggcccggagaggaggggtggggaccaagcctagtccgcctggccctgggtctccgctgccacctgggcgggggccaccccggttatgcccctttccgcggtgcccgtgggtgccgcgacgcgacctgtccacatggggcgggggaaggggggtgtttttgagacatcctcgcccccgggtgggagcgtgacaatggagcccggatatttggtgggccttttgggggatcgcctggcggtcctttccatcatcg

SEQ ID NO: 5425 - DNA, 2558 bp, Homo sapiens
tcgcgacagctaaaaacgggtgtctcgcttcgacaatagatccccgcggaccttctggcacctggttcactagcgcccgcgaactctgcctcgggagacttattgaaatccggatgctcaagccgggaggcgcgcagtaaccaggaggatgagagggccgggtttgggctaggaaagcggccttttaaaacagatgtcagggggactgcagccccgagccatgagaaaaaagttaaaggcgagatgacacgcactgaattggggcaaacattggaagaggagacaaaactgcgtgcttgagcaccggggtgcggggagggggggacaaaacccgtatccagtgcaaattaaaatcttgggagtaggtgggggctgctgcgcgcccttcaccctcagttcccctattaaggattctgagtccccatgcactcctgtcctctggctccttccttcctctccgctcggccggtgagaggcggccgccggcgccccagcagcagctagatgtcaggcgaagcccggagcgcggagcgcggggaagggaggggaagggaggggaggggaaaggaggggtggggcggggagcgcgcgcgggctcggccagtgcggggtggtgggcgggctgagcccggggacggcgcgggaggggggagggaaggggggcagctgtgggcagggagccgggctcggccgccagcactaaagatggagaggcgccggggccttgcaggggagggggctcggcgttgacgtgggacgcggcggaggcgcagcagccggtggtgatttgctaacctcgcagcagagaggagttgagggcgatgagagcgggtactgcgaactgccgggcgatgctgtcgctgccgccgtgatacggagagcaacagttccccagcaacacccctccccgacacaggcacacaccccccgacaggcacgcacacccaccccacagtgcccggctcggctgcggtgagtgaggggccgggaagaggcgcaccgcccagcgagcgccgcgcgccggggcttcccggggctggagaggtctggggggcgcgcgctcgcttcggccactcggccgctgggcttgtgccttttttatttggcgtgttcccttcctgccgctgcagccgtcgccgccaccggttgggggtcggctagaagggggagccccggctgtcagcctgggcgcagctgcctccccagcccttcctcttcagggcacggtcggggtgagaggtggggggcgtagcggtgtgcgggggctgagggcgtgagcagaggggtcggggatccggaggctttgtaccgccaggggctggcggagcaacagagcccgtgggtgctcttatgtatgcggaccggtgcgcgggcgcaagataaggttgtggtttatttatttgtgtgtttattcgccggccggctgggaagctagaatcggaggagctgacgagtagatctgggggcggaggggagcaggactgggactgcttacgttttgtttctctttgagaaaacgtggtgggctttttcttgattggacttgatccccaccccccttttgcaggggagggagggaagctccagagggtctgcagcgctgcgggccctcctcggctctcggcgggaccggcggtgacaccggagctcgccgtgcgctcccggccgctctcggtgggtgccggtctctgcacctgatgcgttcgggatgcctttcccaccctggcgcgcccgccgctagctcgcacagcgcctcgcacactcccgcacgcgcttgaaatgcgcacggtcccgccggcccgcggaaccacccggacgcacggagcgctccgcaccgactcgctcgccgcctccccgagacgctcgcaccgtgcttgggccgggcgcgctggccgctggcgccgctggccagaggcctgggacccagccggtcgctcccagggggtcacggccctgggtcggagagggagggcgggcagaccccttctcgcctttcctcccacaactcgctgcggggcttttgtgcttccccttcgccgcggggcgggtccgcctcccctgccgctctcgccgcggagtccagcccgcccggactgtcgccgttcctccccgtctctttcgctttccctcgtccctagctcagctctccttctttcaggagtctagctcctcgggaaaagttgcttccccaagtttgctgaagtcgtctccaagtctcggtgggggtcgctgggaactgggggggtgtgagagcgcggtcgatccccggagctcgggcgggttatcgccggctcttccccgcgccgcctggctggacgctgcagccagcgccagccggatcgcgggcgccgagcggcgggtgggggagacggctgcccgtgggcgcccagatttccctcaggacccaaaaggcttgtttcagggcgccaagcttccattcttttggctgttccctcctagttctcagaaaccccgatgtctgcgggaaagcacgcggtggctcggctcggctgaatgctcatcccaaccttgacggcctccgtccccaccccggggcg

SEQ ID NO: 5426 - DNA, 2558 bp, Homo sapiens; identical to SEQ ID NO: 5425

SEQ ID NO: 5427 - DNA, 1508 bp, Homo sapiens
ccgccccggggcgagaaggagaaaagttagagggctgaacaggtgacgctgagcttgttggagcgtgtgtgctccaccacgcaagggcgcggagttcggccgcctcatctcccgccatctgcgcgcccgggggcacgtcctctgcgatagcctggaacccagactacctgcgcctgcctggtcccgactcagtgcccaggtggcttcagtcggaaatgtctgccctcttccaacctcccgatcccggctgcctcgcggatcaggtacgcagcgccccagccgcaggtctggacatgccggacacctggacccacccctagcaaccccctctctccgggaagagggacacgccccccagcctgaagacttgtccccaggtccaactggccaggcgcggaagcggagaatctcgcatcttggggcgcgctgcccgaggtggccacggtggcgcaccaagccggggctaaagccggggcagaggggtggggtagggccgggggagggtgacctctgggtttggagaacaaacttgctatccgagggacctccagctctcgggactctcactatccccaccctgcctccagccaatgcgcggataagcgccatgcggtgcgccaacattcgcgccagggctggggtccgcggcgggagagggacgcacggacatagcggaggaatcagccgccgagtccgaggcctgaataagcaaggactcctaggtcaagagtcacggcctgaggacccctcgactcggagggcactccggggtcccagtgccaccaagccgcaggaagagggcaaggggctgggggaggggtccagggcagaactgccgccgtgcagggagcagggagatgaggggctcctttgccaccacccctacgggcgcgccccaaaacggcagacgcgggtggctggcggagcggtcgggggctgactctcactcggcccctgtcagggtgcctgcccctccccgctgcgccccacccggggccttgcaccccggtcggttcccccacgcacctggagcccgccgggcaccccgcctcgccgccagccgcgccaccctggccccgccgcctccgccgcccagccgcccgcgcaggtctcacctttgtgtaaagagtccaggagcaggaggaaagttaccagccacatgccataaagaggccctattctccggggaggtggtcctgtggccggccgtgcggcagcgcctctcccccgctcagcgcgctcccagccgcccgcactcggcgccccgctctctctgctcctcagcccagcgctcggctgcggcggcggctcctccctcctcggctccccggctcctgtcatccgcggggctgggctaggcggccgctctccccgcccccccgcggcaccccgggtggtgagcgccgcgcgagcccggagcccagacggaccccagccccacaagcccaggaacaggagcggcggcccgggccagaccgccccgacccggctccgctgtctgagaggcg

SEQ ID NO: 5428 - DNA, 1119 bp, Homo sapiens
ccgggcgcgcaggcggcggctagcgctggagccccagccagctccctctccccacgtgcgcgctaggccttggttactctggcaactcgccccgctcagacggcaccaggcagctgaatccagccccttgttacgggggaaaatgctctcattgaagcgccggagcgcagcttctgccttttattgcaagcggcgccaccggattccatttgtaaacttattagtgtgcgctcgcggggagggggctcgggaatccgggcccgggcaaccggcgccgcatgctaatcagggggcgcccgcccccgctttgcccgtggccctcctttcccgattccccgacgtttcgggaggagtggggtcggagcgcagggctgggaagggtcttaggacccaggaaggagacgggtgcctcccagagaggaccccatcccctccgaggtccgggcggctcccggcctctccctggggtgccgtagcccccctcgacccgccttcccgcagccgcagtcgttcgggcctggaggtggccgggcatcggtgccgacgccgcgagggcagcgcccgcggcgggaatactaatgcaccctaaagggcacggccgccgccgcagcaggtaattagctggaccgcggcggagcgcgcggaggtggctgctggctgcaaggactgcgcccagcctccgcctcgcccctcgaggctcccgcgtgggccggcgggcagtgcgtgggccacaggaagcgggctgactggacccggctcaggacttcgcacaagggcagctctttgtttacagctcctctcccagctccccgctttcctttcgcccaccgcctcccttttccggcgatcggctccgccggctgcgggggggtggggggggtggggtgtcctgtgtagccgcccacctcctgtcccggcctcgtgctcccgctggggactgtttgcggtgagtctgtcgcacgcacgtcagggccgaggcagtgatgcggggcagcgtgggaggacgggctgcggagcccgcgtcatcctgcctgtggggagcgctgtgcctgctctcctgccagcgcgcccagctgtcccggccgccgccacgcgggactgcctgccatgtcgccaccg

SEQ ID NO: 5429 - DNA, 1119 bp, Homo sapiens; identical to SEQ ID NO: 5428

SEQ ID NO: 5430 - DNA, 653 bp, Homo sapiens
gcggagaagccaggagcgatgaggggcggggcggctcccggcgccctcttttccagccccgctcccgcgctgccgccggagagggactcggggcgcagccgccccgcctctgccggggccccaggaggaatctaagaaaagagagatggagggaggaaatggcatcgcttcaggaaggggcaggacctccaggaccgaaggcgttttctttctctttcctttcagcgacactgggaaacaaagctccgcggctgaaaagaacaccacgcgcggccaggacccgagcagggccctggggcgctaagggcggggaaaatagggcatccggagtgcaggagattcctcagggccgcccccttctccgggggtgccctgaggaaccgcggcggggactcgccgctggcagcctgcgggtcctggtgccagcgcgcatgggcgggctgtgcggacgtggctggtcctccaaaggtttcagatcccgtccgggccgctcagtcccttaaagctgtgtcccaaagcctaggggagacagcgaggctggggacgccgggaagtttctctgaggtgtggggctcctgagcagaaacgcgcgggggattgccagggctgcagaaactttggctcgaggcggtggctggcccgccttacttccg

SEQ ID NO: 5431 - DNA, 1768 bp, Homo sapiens; identical to SEQ ID NO: 5421

SEQ ID NO: 5432 - DNA, 1101 bp, Homo sapiens
gcgccaagccggctccccaacctggtctgctgaacgcaaaccgctgagagtttgctgcaccgccccctggggcccctggctgccgagtcccgctaaggcaaagacgccagcaagcgaggaagcgcagcggaagaaaaacaagcgggcgcgcgaggggagccccaggagggctgccgagtggctggcaggcggctcccgcccctcccgggtggcctcgccggcggctgacggcccggaggacgcgcgctccgaaaagttagactccgggcggcggcgcgctacgccgcgtcccctcgcgtcccttcctcgctgcgctccgggaaaggaacttgttccttcggccccaggattggggagtgtgccgcggggccgagggtggggaacagccagagggagacgcgaaccaggccgctggcggagggctcagggggagcgcagaggcgacggcccccatgccggcggccaacatgatggagaaccggccgctgcccgccctgcaggtgcccgagccgcagggtgcgcccgagggcagcccggtctggtccagttcgtcgacccccacgcttcgccgccggcgcttcaagatgcgccgcatgaagaacgtacaggagcagagcctggaggccgggctggcccgggacctgcccgccgtcttggcccccggcaaggagttcctgcagctgccgtccatcgagatcacgccctccagcgacgaggacaccccgtggtccaactgctccacacccagcgcgtccccgcgccgaaaacgcttcctcctccgcaagtggctgagggtgagggagcggaaggagtgcagtgaaagcaggtacgtccccgttccgcccgtctccttcccttccctcccgtcctctccagagccgtccagggccccggggcattctgggggaaacgtcctgggggagaacaggagcccgtcaccagaggcgcttctggagggcgctgcgcctggtcccagggatggtggcattcagcttccacgcgtgccacccgctccccaactcagggtgaggggcttcatgttgcacgacacgtttacgtggggctttacgctgcattccatctcccttgatcctcgcagcg

SEQ ID NO: 5433 - DNA, 1101 bp, Homo sapiens; identical to SEQ ID NO: 5432

SEQ ID NO: 5434 - DNA, 2341 bp, Homo sapiens
gcgtggtccggagagcgtggacaaggtaacctgttttggatgtccgggagaagggagtccggccgaaagggcccagcccctcgaggctgctccaactggggcgcgcggcggcccaggagggaggcggggaggtctccgggttgggccggggaacgccggcctccaggctgggtagggaggacggtccagagcgcgggcctccgggtctcaccccgggaaaagtctgggtctgctctgcgctgttgcgtgctgcgctcctgggacctgctgactgtcctagagggaacgtcccgcggtagtgtcagttccctggggaccaggaagggcgactcttgcctgggagtcagtgcttgggccgtcgggtccgggtaagcgctgggggtttggctcgagaagatgcggataggtggcctagggcgccgcggatctccgccctctgcgggcaccgggagcccagggtcgaggcgcgccgccccgaggggccccttctcctaacaatgcgcccggaatggagtccgcgccctgacagcgcgggtcagcccgaaaccgcccagaatccgcttcgatgagtgggtgagccgctctgggagtctgccgcgtctcggcagcggagggcctgagtggaaaaattcttattggatgcactttttaatggttggtttgcctcggttttcgtccgagtcttccccggcagtaggcgctgggttacccgcagccctagccaactctccctccataccccccctaccccacccccaaaaagtttgtctccggctggaaaaagcattaatgaacgtatctgtgggaagaaacggaaagtgaatgagtcaggagggccaccttcggccaaccgcctcaggaaaagcaaagaagccaaaggtctttggctttggattttgggggaaggtgatggggggaggttcagacttcgggaatcagggcgcggacgctgggcgtggaccccgtcattgttcccggctagctcttatctcccaggagcaagtatcctgtgtgcgcagcgcatgaatgtgtctgggcatctccgcgtatatttatatagtgtgtgatgcgaaaagcaggaccagcaggggaggaagagggggtgtggggggggagggaagacgagggagagcagaggggagagaagagagaggagagctcgaggcgagagagagagagagagagagagagagagagagagagagagagagagagagataggacttcctccccgattcgcaaagtgaagtcacttcccaaaattagctgaaaaaaaagtttcatccggttaactgtctctttcgctccgctacaacaacaaacgtgcacaggggagtgagggcagggcgctcgcagggggcacgcagggagggcccagggcgccagggaggccgcgccgggctaatccgaaggggctgcgaggtcaggctgtaaccgggtcaatgtgtggaatattggggggctcggctgcagacttggccaaatggacgggactattaaggtaagcggcggggcaacggacgcgggcggcggggaccggccggggaggcgaagcggcgggcgggtaggtgcggggcccgcgtcccggaagacgtggcctctctcccttccctccgcgccccggcttcgcgccggctcctccggcgctcgggtggcgagtcctactcgcgggccagccggccaggcgcccgcattgagggcgaccctcccccgaaatcccagcccccaaagtggagccccggcccccctcccacctcgctgcccgccggggctgcaggaggggacggcgggaaaccgggggaccccagggtacggaacggagtcaagggcgagagacctcggggtccaccactcccaccgacacccggggctcccgtggccccagcgctaggcactgggcttcctctccgcagaggcggaacacggcgggggcgggggctgcagtcgcccgggctcgggtccctgcctggtgggccctggggtgggtaagtggcctcgttgcacgagggtaggggtgcaagtgagtgtgtcgggggatctatctgagcgggctcctccagatggaagcccctgtttacatgtcagcgctttcccttcctctcggcactcagtcgcccggctctaggcgctggagagccgccggctccgcgggactcctgggccggcctcgccgcctctccggcggggaaccttccccagcccccgtccgcacagatccctagcgccccgagcccccgcccttcgcgcctaggcgtgcgccggctccaggaccagggctcctggagctgtcgcctccgaaagggtcctgcgtccttcggagccgcctccgttgcaggggccg

SEQ ID NO: 5435 - DNA, 3857 bp, Homo sapiens
gcgaggggcggggggcggggagggaggcgggtcgcggcgctggctccggggtccgcggcacggcctcctctgccgcgctgcccagggcccggaccctgcccggcgctgcgcccaccgcgagggtgccagacccgccgcgccgccgccgcgctctcccagccgcggccccctcccccgccgcttcctcttgctctcccagccccttcccccacgtgtggatgacgtcaaaattccgcgaaaaagccgcgtggtggctccccgagcggaggcgcgattccgccgcccagcggccccctcccgggggcgcctggagggggagaagggcggaggcggccggttccttctcctcccgggaggcaggaccccccgacgccgaccgccggacgccccccgccccaaagcttattggaaaattcacttttgtaaagcaaatgtatttccagagctattttcggccgcgtgaggcgtgtcctaagctgaatcagacaggaagagggggaagttcgggtcttttaattttttttttttccgaagggaggggagtgagatgctaggtgggtgacagacggcaggcgctcgccttcttaactcacgcctgtcgcatctgccgcctcagtaatccagccccgtccaagccgaaattcgccgaagggagtgcggatgcacaggcctggcggactctgcccccctccagaacgcagcggcccagcgccccggcgggcgcggctgcgaccagagggtcccggaagcgagtgaacacctgcaatcgcactgcccgtccccacccaccctgctcccccgtgctctccgcttcccgacgttttcctcttctccttgtccgcatttttctactttgcctgcactccctccttcctcttgatgtgcctcctatgtgtcccctcggatttatgtgtcccctcgcattttgccagtcgggttttcggttttgattgaccgtccatccctccacggagaaacacaaacacagctccactctttgggggagccgaggggaaggcagtggctcccatttctgagcctgaactcagtcactacccgctccccacctggcctaggcgcccctgcgcggagaaggcgggactcgaactcgcgctgctcccgggccttgagccgaccgcggaatcacctggctgggaggcatcctccaggtaagcttgggagtatgtgtgcttagtgctgcaggctcctgcagaaaagtgcctataaacacccaacaccctgctgcaccctccacctccaggctttgtacactttccaaccgaaactccaaaacgctagcgtagagggtggggagccggccggaaaaagaataaaagtccaataaaactggcgttcgctaaagtttatcaccagtcctacatgggatatatatatatgtatttttttttccgtgaagggtgaaaaggagataaggaagaaccaacaatctaccccctcccgccgccccccacccccgcgccacggtgatcagtttggacttcaaagccagagcacaggctcttgcgctttttcttgaaaccgaagtctacactgaaagaaagtgtgcacttttgcctagaaggcaacatgcgttttcccgcgtgctaggtggagtgcattttaacaagacattagggttttaacacatggctggagtggcgaccaaaagggaaaactcagtttccagtccaagcctcctagagacattcctgccaacctccgcaccctctcacgccccaccccacgtgtgagagtctgcaaaaccaccggggattggattcgatggcgagcttcacgctcgggaacagtcagtaatcggaaggggaagtggacaggggaacttcaagaggcgagcctgccacgcgggaagcgcccgaacttgcgggtctccatgaatgcagagggcgccgggaagggggggcatccggccgcgaccctctctgcccctcccattcgctgcccccctccccgctggaatttctctgtaaagcaagacggagtagggggagggggagagggaaggggcgagagggccctcggctcactcccgagacgtgaggactcgccacccaggcattctcctcggggtgggctgggccccgggacgaccacccgcttcttcctcgcccccgctgcccccacttcgggagacccagagctctggatgcctttccccggagaagggggggtgtgcggagtcggggtggaagagaccttgctcgcagagctatatcaagtgatgtccagaggctgggagccccggcggcctctgtcccttgcctgtcgggttagatttatactttaaaaatacctcccgccctccctccttctctcgcctctccccgctgcaactttctttgatccgctcaaaggtggcttaggtgaaattggagtaattcccttatgggggtcttaaaatgtaagtgaatgtccttatccggggtgactcaaaagcttaagtcgggaagcccaacgtgactaaaaccaataggtgattgttcggggccgactgtgtgcgggtgtacacggtattcggcccgggtgtcatccgcggcgctggactgtttcattttgagtttgcaacttgggtttttcagcgagctttttttcttcctgaaagctaatggcttccacagcaattagacattttcctcgcccgccccttccctcccctttctttacatataggagatgggatactcattcccgctgctattgataaggtcggaggcggccgggcctctccccagctttcgcccgccccagcgcccgctctccctccgccctcccttggcttccttttgatgtagtggggaacgcgtcctactaaaaaaaaaaaaaaaaaaaaaaaaaaaaagtaatctgcccggtaacaatcagcgcgcagtagcaggagccccagagctattggctatgcaaatagagggaggggagacggcgccccaaactcttcctcacccttttaaagcgatatcccctcctttcccccccaccaccccttccgccccaccctcgtttaaagaggctggctccggggcctgagttaatcgcttgcacctctagtttattcgctcccctcctccgccttgcagggaacctagtgtacggctcacccagcccgcgccccaccccgccttgctggctctccgcgcccctgcccgggccccctctctcggtgagggaggcactcagtcggcctcggtgtgcccagagagctcgagccacgccatgcccgctgcacgtgccagcttggccagcacatcagggcgctggtctctccccttcctcctggagtgaaatacaccaaagggcgcggtgggggtggggggtgacgggaggaaggaggtgaagaaacgccaccagatcgtatctcctgtaaagacagccttgactcaagcatgcgttagagcacgtgtcagggccgaccgtgctggcggcgacttcaccgcagtcggctcccagggagaaagcctggcgagtgaggcgcgaaaccggaggggtcggcgaggatgcgggcgaaggaccgagcgtggaggcctcatgcctccggggaaaggaaggggtggtggtgtttgcgcagggggagcgagggggagccggacctaatccctcactcgccccctccccctcccgggccatttcctagaaagctgcatcggtgtggccacgctcagcgcagacacctcgggcggcttgtcagcagatgcaggggcgaggaagcgggtttttcctgcgtggccgctggccgcgggggaaccgctgggagccctgcccccggcctgcggcggccctagacgctgcaccgcgtcgccccacggcgcccgaagagcccccagaaacacgatggtttctgctcg

SEQ ID NO: 5436 - DNA, 1439 bp, Homo sapiens
tcgccaccaccgccacccctccggaaccctctgggtccgcgctagtcccacttggtcacgatccggcaggcgaaggggtgcggaggcggtttcaccagcccgctcccagccctgcctcgagagagaagcccgctgagagggcagacagttgagaaactcgatcccaactccccagccggcgcctcccgaaccgccccgagagcccagattagccgggcagtggatcccggagcaaagtgccatgcacatcctggagaggagggaggcgtggagggaaagggcggcaaaaatgaaatgcccccaagtcagtcccgcaacttctcccggtccgagggacgggcggagggtagaggaggcagcggcggctagcgcgaggtgagggactcacttgaaggtgaggacgcagagcggccggtaggacttgtggctggtgttctcggccatgcccttgccccagaagtcgttggtgaagatgccccagcggagcggggcgccgggccgcacgtcggggttgttcacgatcgcccacacgtcgtcgtgcacgaactcgccctgcagggagcggccgtagcacaggcagcttgccccggccagcagcgccgcggccccggccggcgctagcccgcagccccgccgccgggagggtgtgcggtccccgccgccgcctcgggcagaggtggtcaccaccatcgcgccgccgccgccgctgctgccctggcctctcccgggcgtctggcatcctcccctaccggggccccggcggcgcgcggcgtctgcccggaggggggctcgggcatggtgctgcggcagctggacccgccgcgagctccccgcgctccgccgccgcctgcgccgcggagttggcccagctgcaaataaacagcagtccccccgcctcccccggccatcgccacctcctccgccccactgcgcatgcccgctcgctctctcttccaccgccccccaatcccgggacgcgggccggttcccccgcacagcccggcgccctctgcccccggcccgccttgcttgcaggtggaccggggttcgcggcgcgcggctgcccgggagctgcggggaaggacaccccaggttcccacttgcggtgtccggctgtgctcacccccacgcccccgcccccatccttctcccccgaatggggctgggaaggggcacatctggcggacccctcccgggggacccaggagggtttagcaggtgcgcagtctggaacccccacacccaccttccagggagaaaagtgccgctgcttcccgggaagttcccggcttttcagcacccgggacaacagcagcggcgcccggagagacgctctccacccgccccgcgctcgcgtccagtcgccggctctgtgctctcctgcccgggctttctctcacccgcccggcgcggcgtcccgcttggcggaggaacccgcg

SEQ ID NO: 5437 - DNA, 1288 bp, Homo sapiens
ccgacaggttgcagccgcgggttacctcggaggccaaggcagccacctctgcaagggagttctgcgtccaagcatggcttgtccgtcccgcctggcccccatcaacaaggccgggaccagcggccggtggaacgagcgagagcagccctagtcccacaggtgagccgcccccacaagcagccaagccgcgagccgtcccggcgccgtcaccgcccgcactcacttctccactccgggagggagatgggaggcgtgggagaacgcggagaggcgcggcgaggctgggagcgggagacggcgccgggaggcgggaagcggaccagagaatgggagaagcccggcaggtggacaggaggaaacaaaacccaaacgccccaccctcgaagtcgtcaggagctgagcgaaggaaggagcgaggtaggaaagcgtggcgccccaaatatgccgcgggagcggcgcgggaggcgcagaaccccggagcttgcagcctagcgcgcggggtcccagcggagcgcgaggacgcgagcggagccctcccggttacctgtgctgcttccgccctggctgcccctgtcccgagggaagatgcccgagcacttctcccactccacctggccggcgaagcacagctcggtgacgatgtgcagagccttctggcacagactgttcactccgtcctccttgtggaaactcatcgtttggcttttctttcgttttctctttttttcccagttagccgtcttttcctcttcccgtacctctaacccctctggcgccctaagccatagtccgcccgcggtgactttggctggagattgcgccgctgagagccggcaactcttaggagccccacgttggccccatggcgggagcggagggcgtaggggaaggagaggcgcgcgaggaggctgcggctgccgcgaggtttgcgccaactctcccgccgcgcgagcgagccgaggcgcgctggaactagagacccggcatggagtgctgaggggaggggggagccgtaaaaaagccaaagcaagccctcgactcgcaagcacgcccccctcctctccccagcgcactggtgtttctggcgggtgcctggcggcgacgcgtccaatcgcagcccggcgcgggcgctaggtgacaggcggcggagcgcgcagacccggctccccgcgtcctctgaagaagggactcgcgagggagggagggagggagggcgggcggcccggcgcccctgccgaggccggggatgctcatcgttgcccagagttggcccgaggagccctctccg

SEQ ID NO: 5438 - DNA, 1006 bp, Homo sapiens
gcgcgtgaagaacttagaccctccaatgcgcacatcattcccacacgcagggccgaggcggcagcgcggcccggagggggcccggagggaggggtcggactcgccccggcgcggctccgtcggggaattagctcccgagccgaataaaagcagccaaagactcgcacacccggtagaaggggggcggccccaagaaagcccgggctggggcggccccgcacccccccgtcttccccgccgcccgaacctgttgtaaaggcagagacaatggagaaagctccgggagacgcgcggagagactgctcctccggggagggaggggcgggccgggggaggcggggtaaggaggagggaggggccgccgagggcgaggccggcgctcagcgtcggtctcccgcacggtctcctggatgccaaacccggtctagggagcccaggagccgttgcagcctcagctcttctccctccctctctcgatgacccgggcaatgccaacctcctttcgggattgaaagctctaaatccaaggtgctaagttgatgggcggtctttgctctcacccctcgatttcgggcgcgtgtcttgaaagacaggagagaaaaaagaccacccagctgcaggaggcaaggctggagcgagtagcgctcgcctgccctttaagcaaaggagggaagcccatgtgcactcgtgcactgggctccggagcagccccggggtgcagggcactccccctccagggcgtgcggaggaaggccaccaaaacacgctgcactgccgaggtggagctgggcaaagtaggtagagactggtggggacggatggcgagcctgggaagccccgggtgtcctggtggagaggttccctgccgggggcggggcgctggagagcttccccggcgcggagagcttcccgggcgcggagagcgcagagaacttggccaggaggtgctggacagctccggaacccgcgcgccccctgccaaataaagcgtggagacccggactcg

SEQ ID NO: 5439 - DNA, 1185 bp, Homo sapiens
ccggctctccctgggcgcagtgcgcaccgccggcgctcccagatccctggaccacccggcctgggggcgcgggcgcggctggggagggaggggagagctggctcacctggcgctgaaggctggaaggtacagtctcggtcccccggagcccggcccggcagcctcgcactgtccgcagagggactgagcacttgaaaagcccaccgcgttccgtagggcgccccggcggggctaacttgttcggctgcggggcacagctttaggggaactgggctagcaggcaggggccggagctgcgcgcccgcggtggccagggcggtcgccgggtcgtggggcgcgggcggctgcagcctgggcgttggggcgcccccgacccgcagcaaattctcgatcaggaaactcttgcccaggttgccaaagccgggcgcagcggggaggttgaggagcgcggaggaagccacaacgtcccagtacgcaccggcgtgggctgcgaccgcgctggggagcatagtgcggcgccaaccggtctgctgcgcgcccgccttgcgcccgcctgtcgcccgggcgccccgcaccgcacccagagccgcagcttctcgccgccgcctcccgcagggctggagcgcgcggagccaggcagggaggaaaggccacccgggacggcggcggacttggaacgatattatttatttgcgttgggcgtttttttaagggatgggaggagtgagtgtgggagggggaagctgtgagtttctctggccgacagcgtaggctctgggagcgcaggggggagtctttccccctctctatgcagatctggacgggttttttttttgttttttgtttttttctggacggacggaaggtgtgtccagcccatccattcatgtcaccagccccacaaagtgacagacgcggccaacaataagggtagtgctgtggcaaggggaggggactcgtagtgggaggaggtgggcgtggaggcgacgtgaatcgggcgcgctcgccacctccccgctgccgtgcagagccgtggcactctcgctagagcccaagcagtcccccaggcgtggggtctggtggacgctggcctggagcgcccggagggcggggtgggggtgggggggacgcgctgtcgtctggggtgtctccgcgtactcctgttgggcgaaccctggctctccg

SEQ ID NO: 5440 - DNA, 409 bp, Homo sapiens
ccgtctctcggggaaggggtccctgaggcccgggtggccgcttgggtaaccgcagcctgcctgcgtctcttccttcctccgcgtgggttctagcaacatccactgcagccgggccaggcgagccggcgcgtaccatcggcgcggggggaggagagggccgggcctgggaagatgctgcggaggacgctgcggattcgcgagcccggggtaaggcggcggcgcaccgccccctcccgccgcttcccccccaccccgccccccaccgccgcccttagccctcccccgggatgagagagagtcgcgctgcggagcaaccccagtggatgggtccgcgggggctgagcgggcggaggacgcgggaactccgtgacaccgaccagctgacgctgcccgcgtgaaaccagagccg

SEQ ID NO: 5441 - DNA, 1813 bp, Homo sapiens
gcgggcggcggaggagggctggcggttagatacagtatcgctggagctcagagagccgggcagaggctggcggagagccgaggctggcccagccttcaggagaccggcgagctggggtgtgtgggagcgggatgcttctaaggcgaaaagaagcgccagcctcgtaagcggcctctatctgggctgcccaggccggatgctcaggagcccacagcaggggggatggagcgaaggaccgaggggctgggaggcgaggccgcagcgcactgacgcaggccagcgaggccgctggccccgacgcagggcgcccggcaaggtgtctggcaccacgagagtcaatccttgcgcgccatctccggaggccagtgcgcccagggcgcgccggcccggcaggagggtgggtgccagcctttcttcccatctctcgagcctcctccccggcgcccacgtgggcggagcagcgcgagggtgtgcgtggcaggggccgcggcggcgtgtgccgtgcgtggggtggggtgcgggctgggcggcctcgccttcgggccccgcgccgccggggcgcggcccccagctccatcttctttgccacctgggcggagatctgggggactgtgacctaccctgcggaagacacggaggggacgggccggccacaccccccgcgccactccggcaggcaccgggtgggtccccctcccgctccttggcttgagggcggaatccggagaagagtggaaataggggtggcgtgaaggagagctgggggctgggggcgggaccgggagggggtgttgggggaagcgacgcagcggctgggagattttgcaagggggtctgaagaggagtgggggatgggtatggaagggtgggggaccactgaggtgggatgcgagagtggaagggggacccagagggggcgcgatggccggaggagggggagatggacgatggggcggggcggcaccggtcgccgcgtcccttgccgccaggtccgcccctcggtcgccgggtccacgggttccctctggccagcgctcgcctcccgccccccggcgcacctgtacccacctgctcggcgctcaggcccgagccgggcagcagcagcggacgtagcgagcgcagccccgcgccgcatcctccggccgccccctccccgctgcgagcttacgccgctgtcgccgccgccaccgccttaaaaaggacaaaacggaacagaaaatgaatgcatgcacaaaaaaaatcgtaaaaagcaattgaggaggatggcagtcgcgcgcgcggctcggcggggcgggagtcgagaggccgcggcactggtggccgcgatccgggcaggcggccggcgcgtgccgcacgcgggtggctgcagctccctcggtcgcccgcgcccggctcaggcacggcaccgcccctccccccggggagcccctccgattggtctgtcttcctgccagtcaggcaggagggcgcggcgcccgccccgccccgcccccgcccccgccccgggcagatgccgggagctctcctgccgccgtgggagggggagctgagctgccggagcgtgcgcactgggccagcgggcggccggggcagggctggggtcccggcgctgagcgcccccagccgcgccgggcagcctggcgcctcgctgagtcggagcaacccccggcaggagctttcaggctctggtcaagcctcgggacccgggaagctatccctgccctcgggggctcgagcctggagtggggcttgcaggtaaagcggggctggggccgtcctggccgtcagtggtcaggaagacgcagcgaccccg

SEQ ID NO: 5442 - DNA, 1294 bp, Homo sapiens
acgctccctccggatgcgcgtggagcgccccacaggaccgccgccctctgcgcgttggcgcgcacacgccccccgccagcctgggcgccgggctccgaacccccggtctgcaaacttgcgcatctcccctcgccgcgcccgccagacaacttggcgaacagctcgcccgcccgcaccccgcttccttcggcccttccttcaaatcccaaacgcaccgccgtgctccaaagaaggtgtccacgtcgcccccagaccccggagcgccccctctccacccccgggacttcccaggtcgctcactcctcccgccccccgcccagatctgagagggaccgaaaacacacccccgactcgggcagccagggccgaaactgtcaagaggagaaaaggtaaagcggaaggagggtggccataaacagatttttttgccccttcttaaaaggacactgccgctttaaaagtttctttcccgggcccccactccccgcatctccgtattttgggggagcgtatttaattgaggcaacgcagctttcctccagtgtttgcagaaaaatcaaagccaggggggtgagcccgccggctgtcaaccttcccgccgcctcccccgccccactctgctcccgcaagccgagaacgggctgcaaaagtttgcaacatttctggggggcggaggggggaggggaggggggtcctccgggctcggggcgccgccgcaggctcgcgcgcggccgccggaccccgcgccccgggcgcccgctcccggccgccccccgctccgcgcccgggctcccgccgccccctccccagcccctctccagcctcctacctctgctggtgctggaatagctctgtctgcgcaccggggcaggcggctcgctcttgcgggcggattcctggttcagcggggtctccctggagccggcggccgcgtccgcgccgctgctgcctggctcgctggcggcggggtcgggggctgccggagctgactccatgttttttcccaatgtagagatcgctggagatggcgagctccgagactccctctatcttctgttttcagagcaactctatggtaccaaaaaaaaaaaaaaaaaaaaaaaaaaaaaaaaaaaaaaaaaaagaaggagaaggcgaccggcgaaagcaggagggaaaaagcaggcggcggcgggcgggcaagcaaaagcgcgagggagcgcgcggagtgtctgggtggacgtgtgtgtgcgcccgaaaggggacaagaggcgggtctggccacaggcagcgctagcgagagcttctccagccg

SEQ ID NO: 5443 - DNA, 939 bp, Homo sapiens
ccgatgccgagagtggttctgctggagaaccgccgcgcctgcagttcctgcaccttttcccggagctgcgccagggaattacggacgaactggaaggggccgagaagaaaggtcttggccaccacctctagctccaagccttttcgctctttcagactttggatcctccccggggaggacctccaggagccccttggcagtttcccgccgcctagggccgacttttccatctcctcctctacctccggctcccgggcgagggaggccccgcgccgccccttagactggctgcggccggaagattgcagccgctttgagcttactccttgttttctcataatcaaggagtatggtggagctgggtcaatttcaggcacagcccagccgagtcaggcgaggtccagagagacctgactcgcctggcagcctcaacggacttgtccccgcagccgttgcggacctcccggtcgtcatggcgactgtgaaatgtggggtggggcgcatgcgttggaagccattcgcgcgggcagtccctgagtgtcccctcacgtgctccccagcgcgagcagcacccccgcctctgcgcttcccagagcgtgcagcttccggtgagggcagccccacgcacagccccccacaccctccccagcgcctgcagcctccggtgcgcgcaggccccaagcccacatgcgcagtcctcaccttgcgcgcagccccatgtacagccccggacgggctcccagccccactggcgcagaacccatcaccgcttgcccttcacgcgcttcattgggagtgcagcccccaccccgagcgcgcagctccacgcagcctctccacactctccccagcgcctgcagcacccccagtgcgcacagctctgccagtcgcttccccgggcgccgcccctgcaccacttcggcccataaccttgcggcg

SEQ ID NO: 5444 - DNA, 939 bp, Homo sapiens; identical to SEQ ID NO: 5443

SEQ ID NO: 5445 - DNA, 899 bp, Homo sapiens
ccgaacgcagttacgcgcccactggctccctgtctctggcgcttctgggcacgggggagctggggcggccccgcctgcgcacggcggtgccgggattgggggcgggcacgccgcctccgtctcccacgcgctcgctcgctcgctcgctcccgccctccccgcctcgagcgatctcctgcctcagccttgcaggctccgcactgcagatgcctgctggcttccctgcgctcggcggctcccgcggtgccccgtaagtccccgtgaccctccagcaccagccggctgtgcgctccctgctcccacgggccggtcagccgcagacactcacccagctccgcgagctcagccgctcagcgagtggggtagcggggaccgagacggacggtagccgtgccagagcccggggcgctctcggatgcggcaggacaagctgaccgggtctctgaggcgcggggggagatgcctgaagcggcagggcggcggcgtgggcaccatcctgagcaatgtgctcaagaagcgcagctgcatttcccggaccgcgccccggctgctgtgcaccctggagccgggtgaggaccccagggctgcagatggggcgctgtaaagtagcgccggggctgcccgcgcttctgccttagcctgactccgtctaggccggggagctctggggaaagtccgcgtgccacctggtgcggggcaccgcgttggcacctgcagggagcgattggtctggaagggtagagggcagacgggggcctgggtggggcagcggccaccccaggcgcggagaacccgctgcttccaccctctccccgcggacccccaccctgcggcctgtgtgctcggctttctccgcgtggcggggaagtgcgggtggctgcccgggccctcagaggccg

SEQ ID NO: 5446 - DNA, 899 bp, Homo sapiens; identical to SEQ ID NO: 5445

SEQ ID NO: 5447 - DNA, 547 bp, Homo sapiens
acggtagacctcggagggggtgcccaggacagtgacggctgacatgaagctagcggtgagggacagcgccacgggcactgcggtcattctgcggccgcccatcaggaagtccttggaggtctgctggccgcccccagcgaaggcgtagtagatgccgatggcggccgagatgaccagcatgcccgcgaacaccacgtagtcccacaccacgaaggtgccgatgccccgtggcgtgtccatggccgcacggtcgcctgagccctgcgcgcaaactggtggccccgcggcgcgcagccggagcccggcgcgcacttcttatcccggatccctggcgcgcaggcgtggcgtcccgcggggactggaggcgtcctccaggtgtcggcctccgaacgcaccccgaggcggggtgagggctggcagtcgcccctgcacccgccgctgcgagccgcgcccctcaaacccaggtatgggacctcggaaaatcgacccgctgccctgagtgctcaccacgtgaggaactggagtggccgagttcgccaaggcgccg

SEQ ID NO: 5448 - DNA, 2505 bp, Homo sapiens
tcgagttaacgcgccctagtggcaggtggcgaatggccggagatccggcctcccagtggtgtccaccgccacgggcctccgctcgacaggcttatttccctccatgctggagcaaaccccggctgaaagagggccgcactaattggtttgcgtacccgaagtgggaatagagagggaggaaaaccatgtttcaggtgttacggggggaaaaaagtgaaatgcgaaccgcaggggagagagcgaccgtcaggcagacaccttgtgaaccgcggtggagagcacacctaggtggggaggtcaccggcccaacccaccaccctccgggagaatgcgggcagggacagcagcagggggcagcatccacgtctctacgcttgcaagggttccccaagtccctggccactgctccccacttcctgcagcctcggtgtccgccgggggcgtgtgtgaggggcggggccgcatggggaggagggatttaaaaaaaaaaaaaaaaagcgaggtaattagcattctccgattccactggctctccgccgcccctgctttgcatacgcccgtcccactggctgcccggggtttgctggggttcggcaaggtttgcagccgccacggccgctgctgcgctccggtgcagggcaggctggcgccgagcgaaccagggccgggaactgggagccgggagccgggagccagctgcccgcggagctgcggcggcggcggcatctggggtggtctcagtcccacgaacaccgtggccggcgcccggtggctactgcgcccagcggggctcagggaagagcggtctagacactttttattttggaagaaaggggcaagccccggcgggagcttccttcccggcctggctcgctccccattgcgcccagctccggcccggactctggaagatgactccagggtctgctctgtatattccagcggcggcagttccgggaggcagccgaaagtactaacagttggtagcagcggctagtggaaaagtgagccaaggcggcgcggactcggctctccccgcgccccgcggcactcgctgctcctcgccgctccttccctttggctcccaggcggctgcagcatgaagtggcgcagcgatggccaggagaggtaagaagcccgtggtgagaacgctggaggatctgacgctggactcgggttatggtggcgcggcggactcggtgcgctcctccaacttgtctttgtgctgttccgactcgcacccggcgtccccgtatggcgggagctgctggccgcctctagctgactccatgcacagccggcacaacagctttgacactgtcaacactgccctggtggaagactccgaggggctggactgcgccggccagcactgctcgcggctgctgccggacctagacgaggtcccctggactctccaggagctggaggcgctgctgctgcgttcgcgggatccccgggcaggcccggcggtccccggcggcctgcccaaggacgcgctggccaagctgtcgacgctggtgagccgggcgctggtgcgcatagccaaagaggcgcagcgcctgagcctgcgcttcgccaagtgcaccaagtacgagatccagagcgccatggagatcgtgctgtcctggggcctggccgcgcactgtacggcggctgcgctggccgcactgtccctctacaacatgagcagcgccggcggcgaccgcctgggccgcggcaagtcggcccgctgcggcctcaccttctccgtgggccgcgtgtatcgctggatggtggacagccgcgtggcgctgcgcatccacgagcacgccgccatctacctgacagcctgcatggagagcctcttccgggacatctactcgcgggtcgtggcctccggggtgccccggagctgcagtggccctgggtcaggctcgggctccggcccaggcccgagctcgggccctggtgcggcccccgcggcggataaagagcgggaggcgcccgggggaggagcggcgagcggcggcgcctgcagcgcagccagcagcgccagcgggggcagcagctgttgcgccccgccggccgccgcggccgccgcagtcccgccggcagccgccgccaaccaccaccatcaccaccaccatgcgctccacgaggcgcccaagttcaccgtggagaccctggagcacacggtcaacaacgactcggagatctggggtctcctgcagccctaccagcacctgatctgcgggaagaacgccagcggtaagtgtctgcgcgggtgccactccctctcacctaacctggccaactcttggcgcaagtttgcctcgcgtccccctcccgcgtcttcccagccacgcgctgctgtcccaagccgctgaggaggcggccgggctggaggtagccagaacaagaggttgcctgtttgctcctgcactcgggtgcgcgtatttcacgctgctggtgctgtcccaggtccgggagcgcgaggttccgcccccggtgcggggcggggcg

SEQ ID NO: 5449 - DNA, 1587 bp, Homo sapiens
gcgcgtctcgatagcccccaagatggccgccaatgtgggatcgatgtttcaatattggaagcgatttgatctacggcgactccaggttagtgcgggcagcgccggccgcgcggccgtgaggagcccccgggcgcgccctgggcgcattggggaggtccccgggcgggcaggcggacgccctggggcggcgggcggcggctgccggggctcgccggggctcggccgcccgctgcccatcgataggtattaggaattgatctcgccgctgctctttgttcggttcagtcatcgattagctgccgcgaccatggagaagcgctagtgagccctcggtcggcggagcggccgagcggccaggcggccgggcgaggagcggggaaggcaggggctacggcctcgggcagggggctgctggcgggaacccccggcggtcccccctgagccgcactttgcgcgcctcccaacttcgcggcgcccggggaggccgcggagcgcgccgcttgccagtccgcacccggctggggctccggcgagggagggagggagctggcgggcagggaggaggaggaggagaggaggaggaggaggagagaggaggagggagccggggttggcgaggaggcggctccgcgccccgccgctcgccggcacctcagccttcgccgcccgcctggctgcgcagcccggacgcgccgccacccgggggccgccgccgccgccgccagagccgccgccgccggactggccgcaagcgccggcagacctcttctcctcgggccggggtcttggggttcgtcttgcttcttgcctttacccccccgccccttccatccccttcccaagtctagatgcagacgggcggtggaggtgggcccgggcgctcgcaagtttgcgctcctgcctccagggcggtggagagccgggagcggcgcagagcaggtgactcccagccctcgggcccaagggaacttttaaatgagagatttccttgcttgttctgcctcctgcgtttctccccgctgctcccctcgtctcctctctcccgtctctgcttttcttctgtttctttcctctcttccctgctctttctctctccttccctagggcgactcttcgaaaccccatcactttctccccatcctccctttgtgggagtctgtgtgcctcccctagatttggaggtgttctctgcggaccccgtaggagccggggctgggaggtggaatctcagagaacgcaccgtggaggcgcggctccggcctctgttctttcccggagtgccccggacgcgcctggcaaggccccccagccttggagtctcgcaaagtctcggcgggtgcggcggggatcaggggcgggaaaatggtgcggataacagggcggttagagcatcctgccttgaccgtgacattcgcggaagacgcgagatcatcagtctggagataaaaagggacccacttttttttttttttttaatccgccggcaaatctcgttaagtttcttctgataagtggttccagcacccgcgccttctccccgtcctggccgcttcccagtccccgtccttccgaacgccccactcctcg

SEQ ID NO: 5450 - DNA, 5693 bp, Homo sapiens
tcgcggttgctgggagagtactggcggtgggctgaggctcctggagagcccgcggggtggagatgggggtcggccccccctcggcgcccagccgaggagcagctgccagttgagtgcggacccgagagagaacccccgagggacacccacgtctcccaccgcgtctgcgtcgggcgttttggtttcaggaggctgcttcggggcggggcccccgggggccgagcgcggggggcggcccggcggccttaccacacggcggcttcgttgagctcggggttgggatgcgacaggggtccgctgtagccgctggtgccgctcattgggaagggcgggctgggcccgccgctgaatacctcgccgggcatggggtgcagcgtgcccggcaggcctggctcggggctcggtgtgtccgggtgcgagatcatgtcggtgaacctggggttgtccgcggcgtgcgggccggcgagcggcggttccagcgctcccagcggcgtcgagccggggccagaggccgccaggaagctggagtcggccggggactgcgcctgcgaaggcgggccgtgcgcgaagaagtcgtagttgcttcccggcgcgtagtagtcgccttggtagtctgcggagggggagcgggaaggagacagggcgcggtgagagaaggcgaagtaggcgggggacccgggacccggggaggggacccgggcgggcgagagaggggagcgcgcgacaccgacccaaggttagagagacctgcggaggccggcgccccttgagacggtggacgtcgcaggctcacggggagggttggggagagagacaatgagagatctcgaaagggcaagagactcagactgccagagaccacacacagagacgggagagactccgagaccgtgggggacacacgcggcaaaaactcggagacttcagtcacaggttccctgacacctagagatggagagagacagaggcggccagagacgcagagacagacaatgattcctaagtgtcttagggtcggtgagagacacagagatgcgggacagcgagagacagacggagagatcggcagaggggcagagagaaaggcggaaaagagacccagagacgcggagtccgcggctgagacccgaaagcccgagacatcggagggtcgcggaggagtcgaggagacgcagagagaggaaagacggccgcggttagagacacgcgtggaaacccccgggggcggcagcgagggagtcaggagtgagcccgaagatggagagaagtcgatgcgcccagagaacgcaagacggtggatcagagatgagtcccaggaacctccagagaagcggaggctgacaggcccggggagaggaaccgggcagggacaaaccagcggacagagcagagcgcgaaatggttgagaccgggaagcgacctggccgggggaaactggatccgggccgcggcaggagcgactggtgggttgggccgggcggggcggccttggcgccctaaactcggtccctgcgccctaccaacccagtccaagtccttcgcctcgccaagtacggccgccgcgtcgatcccggtgagaccatttgtaccggcctagcctagcctgagaaagagaaaactgagctccagcgacttgggagagggggaggaggacacgaagattctctgggtcatggccagagctccgcgggctccttggggtagaagctcggtcctccagccttgccccgggttggttttgccagcacccccaggttctgaagcatctgaggacattgagatcttttgagaagctggtgatagctatgggctctctctcaaggaaaatgcaaggatgagaattttgcccataaattcaggaggtgtagggactccggattgcaaacccattctgcctcaacaaatctgtatcaactctctgaccgccccacatagccccttttccagaaccttcgggatatcctgccttcccccaccaggtggggccctgaaggactgacgtgggggacgtcacgaaaggaccaccttgtaccaggcacccgctttgtacggcgggaaaaccagcgagtccagaagcctgagtctcttctgcaaatccactccccctgctgagtcctgggatctcagtcaaggggcgaattcctgatgccccctgccaccctcttccctctccaaaccctgaaatctgtccaaatggggggtgtctggaggcgtggcttggaggcagtttaagcaacagctaaaacggttgccaattactttttaaaaccattaatttaattctccccgaaagtgaaggggaagatggggagcggcaaatttggagccccaaagggacagggatgggagacggccgcggcccgcggcgagccggaaaaccagcgaaggccgctgcccccgcgccgtgcgcgccgcctccgcccatatggcggccgggccggaggtaattggaacaaacgccgtctgaaaagggcacaaaagccgcagctggggctttgtccgcgctcccacggggagccgccggccccgccgcccggcccctttctcgcccgctgccggtcgccaccgccgggatctcccagcgcggattaggcggggctgcctcgctgggggctggggagtcttccccaccattacggggaacgaggggcccccagtatccagctccccacctcatccagcgcgcagggagaggaggcggtgggataggtcggggcgggggcgaagtggtcctcggggaaaccttggttaattatccaggcggggaaaaattccgggccggtaccgcccccactacctcgctgctccgggcccagattttgtagggaaagaggcaaatttaggtggagagagtcggtgagtggagactccggaagacacgcccaccatccgggctctccagggttgggggtctgtccggggttgggggtctgtccagggttggggggctgtccagggttgggcggctggggcgctccagcctgagccctgccactgcctggggtctctgccctgaaaagcacagcctggcattttgcccacaatttctaggggccccggtccggtctcaaggtctaatcccccctcaggcttccggatgtgctgaggttagtgatggggttatcttcccttcccttctgcgtctacctgggtgcctagctcctgccttgctaacactgccactgaacccactttctaagagaaattgcctcttcctaacctgcgttacaactcagaagtgcagatgcctctcagacatagacagtcctggggtctctccaaattcagaagcttcagaatagaagaggagaggtgctttcttgagccctcagccctgggaagaacaggacagtgagcttggtgagctcaagcaatgcggctcagggtaaggagctgaaaaaatcggatagggggagttgggatggctcaccaatccagtgtgagggaagtgagaggaggaaaagctgaggtggcaaggggacagctcaccccaggcccaagcctggtaccaccatctgaagccctttgtaaactggggctcctcgctctctgcagccccaaagacggtggaaatctggggttggcccaacacttgtgcccccagtctgtaggaaccccaggggtctcggggctggagggtggactacagtcctgcccagagcaactgccggcatttgggctaacactgccagatgctgtgcgcacacaccccgccacatggaacaggagttgctgccttcgatgctagtgagcaggcggcttggaatgaatccagacccccatcccctcccctcacactaccctccagcgctcggaatccacctcatgccaagtacaccaggcacagggcggcaggaaggctgtgcgtctgtccgtgggggccgcatgcatgtggatttgccagtactggcctcagtgtgactggtgggagtgtgcgcgtctgtggagttgtgtctccgtgagtgtacctgtgtgtgagagggtggaatttacctatacgtgatcgtgcgatcgtgtctagacgtgtgtccctggagtctctgaacgcaagtgtgagtgcaccttgtgccctgcgtgggtgaatgtgtcactgtatctcgtgtgtgcttctgtgtgcatcactgtatgggtgagaccatgtatctgattttgtgtccaggacatgtgggtgagtgtacatgtgtctgtgatcgtgtgtccagcgagtgggcgatgttctggagcggcggaaagcgtgctggccgggacccttcgccctcagctcccggaataggacaggtgcggaacagcgaatcccggggcgccccttacctccgtagtaggtgtacggggtggaccccaacatctcagactcgtccaagcggccgcccagcggacgcatgcgccgcggactccggaagaaggcgtgcctccgggcgcctagggcgctcagctgtttcatccggcgttctttggaccgtcggttctgaaaccacacctgggacagaggagggggctgtgaacccaggatcaggagtgtcctctccccccctcttctcccttccctgactgggctgcccctgctgggtccttgcgcctcttccgcaccaggactcccccgaggcggggccgggccggattaggccgggaggggtggagagaggcttcggcgaaccagccaagggtgaaggatttcgcggacccgtggggcgactcataaagacttgggcttcctggtccccggctcgcccgcggcctgacggctctataaaggcctccctcccggcacggctctcgcctcggcccctcggctccggagccagcctctggccgtttgtctgcccgcgcttcggcgcagggagggagggggcatcgcctgtttctctgctcgaaaggtggaggtaaagagggatcccggaccccagagaggcttacaaccttccataagcaaggcggggggcggaattcagagaggtaaagtgacccgcccccaaatcgcaataccaggaggacagcagggctagatggaatctttcggttcacagtccccgacctcgggcaagtgccccactcgggcgcacggtctgctcccagaccagaaccaggcgcgctcgtagccaaggaagcttggcgggagactcctccgaggctcccggctcccaggccagcggggctaaggagctgtgcccgccccgggccgcacctggatgacgcgcatgttgaggccggtctcctgcgccagctgctcgcggatgtggcgcgtgggcttgggcgtggcggcgaaggcagccttgagcgtctccagctgcttggccttgatggtggtgcgggggccgcgccgcttggtgcccgagttctgctcctcgttctcgttgttggccgtctccttgtccgacgaggtcgagttgtccgtctctttggggtcgtcctgcagtgcgtcctggaggtccggggacaaactgcggtccgtacaggatgacactgcgggcggacggatcgggaaggggacagcggcgtcagcgacggccagacgcctcttcagtccagtggcgggttcccgccggcccaagctacggcctgcccaggctacggccagccccgctggattccctcccaaacctgcgacagcccctcccccagggacccggtgcccgcccactctctccaggcggggctgggcctttggaggggcgctcttaagccctctccgcgcg

SEQ ID NO: 5451 - DNA, 589 bp, Homo sapiens
tcgcctcgttctcggggcttcagggaggcggcgactggagccccgctgcctactcacaacaaaagaaagcagggctggcgcccctacacgcgctcccattcactgccggccgcggggagaatcctaccccgcgccctcgccagggtcccggggagctctgggctggcggaggcgaacaagatgcggtttgacagaaccaggccgtgcttctgcaaacctcaatgccgctccgccagccgcggcggcctcccagactccatttgccggggagctccgagccgcgcaaaatctctgcaagctgtgctctgcagaatgcaaagccgggctggaatccgccattcccgccgccccagccgactcggccgacgagctccctcctgagcctcccgggccatctgccgggacggttacctcgttcggtgaagccggtgcattcaccacatcctctgctgctcctagcagggaagccggcggtgaggcgggggagcaggcatggtggctccggggtttatgcggggtttactgcttacccagaatagcggctactgctgcctactagggcgcacctaccgctggagcctccgcggcg

SEQ ID NO: 5452 - DNA, 1294 bp, Homo sapiens; identical to SEQ ID NO: 5442

SEQ ID NO: 5453 - DNA, 1373 bp, Homo sapiens
gcgagcgtctggcgtcctctggggcgcagtcccgagagagccccttccgggacctcggacgcaaggcccctgagtggccctggaagttggatcccccggggaccctgctccgaaccctggccacctggaagcaacctcatcgagcgctccttccactgcccagccccgaaccgtggcggaacgcgcccctcggcctccctagagcctcctttgcgggagaagcacaactttcccaggttttggagacggcgctcttacaccccaatctcgcccagacggaagaagtgagaggtgcgggcggccccgccatgaccgcgggaggagagcgcaaggaggctcctcgcaaagttggaggccaggccggagcgatgttccgggagcggagccctcccagcctcgggcccccagccgcggacagctggcagtgccaaagactccgccattacctgcggctcgcagttgcgattcggccgcagagtcgggcaccgaggaaggcgtaaagttgagcttgggcaggtacaacggtccccagggactggcatcccccagcccgggctgcccgcgggagggtagcgagctgtgccaagggctccgccattaccgccagcgcacagctcggagccaagcgcgcggctgaggaacgactagggtcttgcaaagttggagcctgggcgcgtagacccccggaccggagcccccggcctgaggccgcccgctaggaggaaaatgaggccgcccgaaccaagttgggacgcgcagcaaagcccgagccttccgcgcacaccaggggctcgggcgggagcggggagccctggggacggagaaggggcgcgggacgcctggatcaggaactcacctgacgccgagccgggcagcgccgaggctgcctcttcgcgctgcgcacccgcccgcccgcctcgtactcctcctcttcctcccgggcgcccgcggccgccgcgctccgggttctgaatcctccgagtccgccgccccgcgcggctggagggcgccggttgcacccactcgcctcctggtaggagccgcgcgcgtccctccccttcccctccgctttgtgcctccaagatccctccccaccccctctcccctagcccccactcctcccttctcttcttccctccccttgcgtcccctccctcagcctcagcgaacccaagttcgggacggaggctgcgggcttccccggcgcagtgctgggcgccccgcgcgcgcccctggctcaccccgtccgctcggccgctgctcgctgcccggccgcccctcggaggagccgcggcgctaagtagctcctcacccagcggctggaaacgcggcataaatatgtagggactgagccgtgagctcagcgagggtcg

SEQ ID NO: 5454 - DNA, 1524 bp, Homo sapiens
gcggctctgcggaccccaggcctaagggggcatcgtcccaaacacccgacgcgcccccatcaccagttcctcactggcaggccccaagcgggaacgggattgggaaggcttcgggcctggggggccttaccccgatgccccaggggcgccctgaacccagttccagccaggcggcggcacctcaggcagcgcagggagcgcgaccggctcggggagggggaggacgcggcgctcccgccctccctcggtccgcctgtccatctccaggtccctctgtccgccggccccctggctctgcccaccctggggctggtggtgggcgcgggccgggcctaggcccatgcccggccccccttactgcctgccctcctccctcaccaccccaccccacccccccagtgctcggcctcgtttcgtcaccggatcccctggaatgggggacgcgggcgcgaaatacgaacccagccaccggcagctccctccccacgtgcgctcggcccgcagcgcagagggcggcccggggtgggggcgcctcacctttgccctccatggcgtgcacgaagtccccctggtacagctggctgcgaagcttctcctccaggctgaagccgcggacgctgacgatctcctccacgtccgacaagtcctcgttctcgtcgtatcgctggcggtcaatcgggcgctgcgaggacccaaaccagagagcccgggacattattgtgggggctggaggtcgcctctcaacctgggcccagcactaacaggtgcagcagccgagcgccccctgcaccccaccattgcaacccaagcaactttgcgcaattgccaaagatgctgaaaagcaggacaaggagaggggcccgcaccccgagggtccagctgcgctctacgcggggtactcccctccggtgtcttcggaagcactgaagggacatctggggaccctcccctgccccccgcccccgaaatgtgctgggcttcgcccactcggccgggagcctggttatgtaacccgcgaagggggctccggacacgggctggcggggcaaatgtaggccccaggaggagccgctgcggcgcccggctcggcggtaacagcagccccagcggccgcggcggcagagccgggaagccggaaccgggggccggcggcatttctaaagctggagccgcccccgagctaccggggaagctggaaagctgaaatggaagggctgagaccccagccgcccccgccgcccgcccgccagtgcaagaagaggaggtggggggaggagaatcggggcttggaagggggagaggcagacggcccgccacaaagctcggatcggagaccccaaaacgcaccagcagctgcctcatctccccacaagcgcgcgcgcacactcacttcctaaggagactcccccaccactccccgcatccccctgcctcctccctccaccgcccagcgcccggcccctcagccccccagattccgggcgaaccccgagcccgctcagcccccctccacgcctttccccg

SEQ ID NO: 5455 - DNA, 1009 bp, Homo sapiens
gcgtctgcagcgaaggactcgcgtgggagcgagaaatgtccctgcccagtgccccgcgcgctggatcgcgggggcgagtctgagggtggagaggccgccgggtggaggcgcgcaggggtgcgtgggtgggtgcggaaggagtgcagggtatggaggggaatcttggggcggcgcgaaggaggagcgcttggaaaggcgcggtgtttggtcacagaggggctcggagtgggagtgcaggggtgcggggagggagtgcagggacgcggggagggagtggaggggtggggacgtgctggaggggcgcgcctcgatagaactggagaaactggaaaagtggaggggcggggcagtggctggaggaacctctgaagcgacgcggggaatatgtgaaggagtgctatgttggaacttggaggggaggggggatgctggagaggcacacggtgatggacatggaaggacccgggaggtgtggagtggtgggcccggcccgtcgcgggaaggacacagagggacataggctgccctggagaggcgctttcggacatctggaggggcgcatagtgctgggacttggcggcgcctggggcggaggggcgcgccggatccagccgggcgcgctcgggggccgggcgcagtgggagttgacgggcgtccagccggcggcgccctgggctcggctaggcgcaggacggccctggcagcggtgcagcagcccaggctagttcctggggggtccctggtccccgcctccccgcgcgccccggccagcaccgcccggagtccgggcggggaagtgggcgcccgcggcttgggaagctgctcccccgccctggagcagagtcgtcgctgcggtcgctgaggaaggacggagcagaggcccgcgctgtctggggagaagactgtggtgtcatcccgtcgggaatgaagggaaatgcagcggctgtttgcgccccgggactccaagaagtacagcaggtaaagagaatagccacggcccgccacttcg

SEQ ID NO: 5456 - DNA, 961 bp, Homo sapiens
tcgccttccccgacacctaaaagccccggtcctgcgtaatattgcggatccctcccagcctcccgtccgctcctcctcccgcggggctccgctcagggccggtcccccgcccccacgccgcagcccgggccagcggggcccgccgcggtggcgttcgcggatgctgccgcattggccgctgcggcacggacggcgcagcctcgggcgcggcccggcacaggcgccggcggtccccgccagctagcagcccggcgaggcgctggcccacccatggtcctcgggcggcggcccctgcgcccagccctgcgcgtagcctccgtctctcgcccggggccgccgagcccccgacacgggcgagatgctgaacggcgcaggcctggacaaagctcttaagatgtccctgccgcggaggtcgaggatccgctcgtccgtgggtgagctgggaggggcgcggcgagggagggtgggcccggggcgggggcggcgcggggcgcgcctgcggttatgcgacactgccccgcccgcgccccgctcccctccctgggctccctgggctctctgggctgcaggatccgccgacgcggcgcgctggccgcacgggggctgggcgtcgctgcacctgcggggccaaaaggctccaggccggggcgaggtgagcggcgggcgtcagagacccccggctcgtccctgtacagatgtgtgtgtgtgtgtgcggcctccctgtgcgcgtgcccgtgcgcccctacgcgcggatgcggctcagggatgcgacctaggcggcagtcaccgcgatggtgggcacggtttggcggcgcagagaagatgcagccttccctgccggcggccggcaccgctgtgctgcagagctcaaaagcagagggggaaaaaggcatccgaagggtccctcgagtgattctcaccacttggagccccgggtcctcgcgcgctcacagcggcgacg

SEQ ID NO: 5457 - DNA, 961 bp, Homo sapiens; identical to SEQ ID NO: 5456

SEQ ID NO: 5458 - DNA, 980 bp, Homo sapiens
gcgtgagcgaggcaggcacacacggactcgcggcggtctgtttgcaacagcgctgggaatgcacattggaaaatcacatcttgcatgctgaaaacgaacaactgtttgacatctgggctgctgccgagaaaaccacgcggcagcggcaggtctcgagccaggggccgccatcctcgatggaatatttaaatcgcctatttccatcgaactcccaccctccaaacgcatcccccgcgcgcgtgcacatcctcaaacgcacccccgaccggaacaaagaggggctccagactccccccgtgcgcacggggcagtcgggagggccacgagagggaggtgtgtgcaatggaagtaccgagacagacagacagacagatgcccatgcactgctgccgattccctggcggcggggacgggagtcggacgcgagggggacagacagggtgcggggacaggcggcccgcgggggcgggggggtcatcgagggggtcaccttggctcgcccaggccgagggggctcctccggtgcttccgaagcgcgtgggctactcgtgtcgcatgtcggcgcagttgcccgctgtggcaaggggggggcggccgggctccggagcgggccgggagggcgcggggcgcgcactccgcggcaggtgagcggcgcggctgcaggtgagcagcagcctcggctcgcgcgcccagctttccccgccgcgcccgcccggcccacacgctccccgcgcgcgcgccgcccccgccccgcgcgcgcccggccgcccgcccgcccgcgggatccccgcgaggccgcgcgcccccacgggtcagggctgctctagggtgcgggcaggcgagggcggcccaggggcgcggggcgaggggcgaaggagccaggaggctgagaactgcatggtagccctgcctgcctgccgcgctgcgcgccccaccccagccggcggccccgggcttgcaccgggcggggcaggggagcg

SEQ ID NO: 5459 - DNA, 408 bp, Homo sapiens
ccgtaccccctgaagctcgctgggcgcgccctgggctgtccttccctgagcagccgggcctagagtcaaggcgcgatgattgccgcgcaagctagggtccacgcggccggggctcctctcccgcctcgggcgcaccagaggccagaaagcggaaagcggctctgccaggccaaggccgacagaaaccgagagcatgtcgctatttgccggagagaactgccctgccaggctgccacaggtgacttgcccgcgcgagccacggcctctgcgcagagctcctcccgaaggggagagtcagagccacccgcgggtttggtcggggctcttcccagcccggcgtccacgccccgcgtcctgcgctcgcccttgcggctgcttatgctcaggtgtttcggaagaggcgccgcg

SEQ ID NO: 5460 - DNA, 2190 bp, Homo sapiens
gcgctccgaaatctggctctctgcgcccaggggaacgaggcacaaatctccgccactcagccccactgagcagagactgcgagtccgaaccctcaagttcctcggggctttgacccctcaatggcggcggtctaactgctggtaaaacccccggcccctgactgttccaccgcccgtctcccaaacgcccagcgaaggctgacttaggtggcgggcggacctcatcgattcctcaaaccacatcgtttggtcaaaatcgcccgccctctcttcgctcggattttaaaggctaggcttgtaagtcagtaagttaacggtatttgggccctgggctgcccttgtgggtcagggtcactgatgtccgcgacacggactggaccgcgcaccacgcctgctcccggcagaggccccacccgggtggctgagcgcagcgcactggggccccgcggtccgagagcggcggggaggagcgggcgctcgccgagcgttccccgggacagtccggcttggggactcaagcgggtcatgggatgccggcgctggccctctcctgagatcctcctgctcccccgcaggcacgagtcccctccaaatcggctcccctcctacactctcgtgacgcgaggtcgcggccagtgcccaatatcaccaaagtcccggcctcagcccagccccgggcagcctggcaggctttcaggagcctctgctcccggctccgggggaccctgcgtacctgccccaggtcctctgggaatgggctctgggtgccaggcaggtcccggtgcgtgctgctcctagtgcccagggcctcggcagtgagaccccaacccgacagctggataagggatcagcgatcctgtcgcaaacggacagccccagcgcggacccggtctgagcgctgatgctcgcgggtccaggccagccactcctcgaggcgctccctcggagaaagggcgcagcggccccaagcgtgcccgctgcaactagtgtcccaggttctcgccgtagccagcttctccgggctacagcctcgtctccccgcgtgcaccccgccctggcctcggaggctctgccctccggccgccccatcgcagcccgcctcaggccccggcccccagccgcgcctcacctgtgagaagcagacagctgagcagcgcgcacagcaggaccccggtgtcccagtagctgaccatggtgagcgcgacgcggcctgctcgcccggtgcccgcgctccccgcggccaacgacccggccgccagagtccgtcctctcgttcgccgccgccggccccgcgccctgagcgcccgtctcgcggctccagccaggagacaaccacttccccgggtaatcctcgccgccaggcgcccgctggccgctgcacccgagccccggagcccgctccgagccgccgccgctgccggggaggagccgagaggagtgtccgcctggcgcgctccgagcctcccgcggacctcgatgaagagcagccgagggcgggggcgatttataacctttccccagcccacttcctaccccggcacctccttctggtgacgtcaaggggtcccccacccctcatccgcctccccacctaccctcttcttcctcccaggctcgcttccctgcggctacggagaggggcgggggccgacgagggcgggtggcccggggccgagcgcgcgtggggaggtgctggcgacgcgggcccgggagcgcggccccggcaggttcagggtctttgctccgcgccctcttgcccttgcccctcctcctgcccatcgcgctcaggaaatccttgcagactccctccacccggcttactcagctctgggggccgcccgaaactggggaagggacaaggctgaagctccgccgcctggccctaggggcggaaagtccgatccaagggaagctggccgcgcctccgcgacggtgttcttggcacggaggactgaggcgcagtccggctgtctccccttgcctgctcttcccgcgctgtcccgccgctcctgaccccttcagactgtcccgagaagtctaggaaggcaccggagaccctcggcacaaggcactgaacctggagcgcctgaggggaactgacgcttgcttggcacctttgggaagactgcgaaccagctcaggtcccaggggagcgtgtccgtgtctttttcggccgcattgatgcacccg

SEQ ID NO: 5461 - DNA, 2190 bp, Homo sapiens; identical to SEQ ID NO: 5460

SEQ ID NO: 5462 - DNA, 679 bp, Homo sapiens
ccgagtggagagcagcggccgcagcgcggcgccaggctcgggctgggctggccggcgcgaacccccgggggcgtctgggcggccaggccgggtggcggctgcgcacgtaggagtaccccctgagcccagccgctcggccggcctgacccgcgggtgaccggatacgagtaacgcgtgcgccccgatctgtgccctgcgcggggtcgggcggggaccggccgggggcgccgcgcgcccggtcgggttgactgtcgggggcgatttccgcggggcaaggcgggggcgcgggagcagcgcgcagctgcggggccattccacctgagcgccctgaggtcagggccggggcctgaggacacggcgctgggctccgggggacgcgggttcacgccggcgcccgagcgccacctccccgccctccgccggctcacgtagtcccggggttcggtacgtgaagtgccggcgcgaggctgctcaggccaccgcatgggccgggcgataaacaatcgcacaggatacacaacaccctggactgtcacaagcccctcgcaggaaaagataaataacatctgaggcgctgcggcgcggcttccccgggctgaacaaaaactaggaggtggggggcggtggggcgaagtaaacaacagaaccgaagaattgccgcacggagcctgggccggcg

SEQ ID NO: 5463 - DNA, 2013 bp, Homo sapiens
ccggcagacctggagacgcccccggcctcttgggagctcctgagggtccaggtcgggtggggcgcgccttgcggcaagttcccttcttccagccaccgtcctgaggagcagaaggcgcggggacacacacatacacgcccgggcacgtcgccgcactcccccaactgaaccttggtgtcttcctcctgcctgcaaagacatcccaggccctgggcctgggagctgtccccgcgcggtcctgcctgaccctagcggggtcatagtagtctggcgcccggagcggctccagcgcggcgccgcgggcctaggtgggtgtcccagagagcgggcggctgcgcgactgaggagctggaggcgcacccctccgcccgccagacggcccggcccgcgcccccgccccactcccctcgcgttctcttctctggaaaggaaggccggagttgcaccctcaaagcgcctccgtccccacccctcccggcccgccgcgccccaggggctccacaaacttgctgcaagtcgtcggggctgcagctgcaggtaagggtgaggcggggccgcggcctgggctgccgagcacgccccctcccagccccaagcgtgcacgccccccacggacgcgcacccagcaccccacccccgccgctgcccccgaggctcccgcccaatcagaggccgcgcgcgccgcgccgccggcgggcagacacaccggctccccggcctgcgcccctgcggccctggccccgctgcagcgtcccggcccggccacactcaccgtcccgggcgcgccgtccgcgcgcggctccgctccgggccggcatcccccggctcggctgcctccggtccccgctccggcctcggttcccgctccgcagggctcggctccgcgatggtggccgcggcggcgagcgcggcagggagggcgtgtgtatgcgcgtgagagcgcgcagcgtgtgcatgtgcgtgtgcgcgggagggtcccggctcccctgcgcgtcccgctcctgcctcctgctcgccacgatgcgatgccggcagaatctctaccgcgcgcccccactgcccggcgcccacactcgcgcacacacgcgcacacccaggcgcgcacacccggctccgcactcccgactcgccctcctggagcgctcacaaagaccccctgccgggacggccggagcctgcggagcgcggccctgggcccctccgggacccgccggccttaggtgccccgctgctccccgtagggaccccgcgggcggcccggctcccgcaccctgcctggccgggccgcggccgcgctcccagcccgaacctgggcccaggtgccgactcgggcttctcgcactcccgcgggaagcgccggccccctccgcggcgccgccgcccttctcccccccttccagtccggcctctccggcgcctccctgccttgtcccacctgcccagcccggtcctcgttctccccgctgctctccgtctgtctcgccgccgccctctcccgcgccccttcctccccaccgccctgcgctgcctctcacattctccgcattacagcgggtgccgcccgccgctcgcggggcccagggttcgagcgcgcagtgggcggcgaggggacccgccacgcccggccccgccgccccctccgctctccgcggctccgcggctgctagctccggcctggcgctagggtggcgacgtcccgcgctagcctcggctgccgctgacagctctcatctcgcccgggcttaaagggatagcgcacccggctcgaccggccccacccgggggccccggggaagggacctcgctgcgcgggaacagtccggggcggtggcacagccggggccgtgcgggcgacgccctctccgccgccgtggagcccggccctcggggctggaggtgagtcaaggagaaggacggtcagaccacgccatccagggggcgctcagcggccaagcctctgggccgacaatgggtgtgcggcggtgtaggctgagcgccctggactgcgtggcg

SEQ ID NO: 5464 - DNA, 1501 bp, Homo sapiens
tcgaaagaggggcgcgggtgggcgcgtctccccgcgagcatctcacctaagggggaatccctttcagcgcacggcgaagttccccctcggctgtcccacctggcagtccctctaggatttcggccagtccctaattggctccagcaatgtccagccggagcttctttgggcctccgagtgggagaaaagtgagagcaggtgcttccccagcggcgcgctccgctagggcccggcaggatcccgcccccaagtcggggaaagttggtcggcgccttttctccccgacgaagccgctccagggctgctctcagaggacgcgcggcaggcaaagagaatgaacctgagcgtccacgaaacgtcctgcacggctcccgggagctgggagaaacaggtgcctttctccgacgtccgcgggcgacgcctgccgcaccttgcccgctgccgcgcccctcccgggcacccctcgccctcggcgcccctgcccccgcccccagtgccagggcggaggcagtcccggctcgcaggtaattattgccagcggagcccgccggggagcgggggtgggcgcgccggcggtgggcgggcgggcgcggcggggcgcgggcataaaggggcgcggcgcggggccccggagcctggctcccgcgcagcatgcccgccagcgccccgccgcgccgcccgcggccgccgccgccgtcgctgtcgctgctgctggtgctgctgggcctgggcggccgccgcctgcgtgcggagccgggcgacggcgcgcagacctgggcccgtttctcgcggcctcctgcccccgaggccgcgggcctcttccagggcaccttccccgacggcttcctctgggccgtgggcagcgccgcctaccagaccgagggcggctggcagcagcacggcaagggtgcgtccatctgggatacgttcacccaccaccccctggcacccccgggagactcccggaacgccagtctgccgttgggcgccccgtcgccgctgcagcccgccaccggggacgtagccagcgacagctacaacaacgtcttccgcgacacggaggcgctgcgcgagctcggggtcactcactaccgcttctccatctcgtgggcgcgagtgctccccaatggcagcgcgggcgtccccaaccgcgaggggctgcgctactaccggcgcctgctggagcggctgcgggagctgggcgtgcagcccgtggtcaccctgtaccactgggacctgccccagcgcctgcaggacgcctacggcggctgggccaaccgcgccctggccgaccacttcagggattacgcggagctctgcttccgccacttcggcggtcaggtcaagtactggatcaccatcgacaacccctacgtggtggcctggcacggctacgccaccgggcgcctggcccccggcatccggggcagcccgcggctcgggtacctggtggcgcacaacctcctcctggtgagtgcgaggggccaggcggagggccacg

SEQ ID NO: 5465 - DNA, 668 bp, Homo sapiens
ccggggccgcccgcacgcaacgcccccgggtcgggccaggctggccagggcagggcggccgcctttcgaggaactgcgggcggggcggcggggccaagctgagcgcccgccctgccctcggcgccccgcggctgcgggcggagcgggctctgcggagtcccccggccgccctccccgcagctcccgtccccagggaaggcaaaccacgcaccggtccgcggagagacgccgccgggggtctttgtggccgcgctgggggccgcctcctggtgctgtcctcgccgggctgggcgcggccggggctgcggggctgcagggctggggggcggcggcggggccgggctgggcggcagcagctgctggagcgcggcgcctcggttgcggccactagtgcagggatgtgcctcggcccgtcctcattgaaatgcggcgcttcgcacagcctcactccagcctctctctccagaggagggcggcggcggcggcggcggcgggcgcgctcccttttcttgtctcactcgctcacacgccctcccgtctccctcctcctcctcctcctccgcgtgcgcgccccgtcgcccccgcccttcttggcagggcgcacccaccacggctgcgccccaggtcctcctccctcccagcgccctcttcccaccgcagcaacctcg

SEQ ID NO: 5466 - DNA, 1006 bp, Homo sapiens
ccgggcgccctgcccgctcgcccgcgcgccccaggacccaaagccgggctccaagtcggcgccccacgtcgaggctccgccgcagcctccggagttggccgcagacaagaaggggagggagcgggagagggaggagagctccgaagcgagagggccgagcgccatgcgccgcgccagcagagactacaccaagtacctgcgtggctcggaggagatgggcggcggccccggagccccgcacgagggccccctgcacgccccgccgccgcctgcgccgcaccagccccctgccgcctcccgctccatgttcgtggccctcctggggctggggctgggccaggttgtctgcagcgtcgccctgttcttctatttcagagcgcaggtgagtggccaccttcccaggggatcgcggctgagagcgcccatctccttcccccgcacttggaaactgagtctggcggcagggctgggccacccagagcttgcatattccggaagggaaagtgactccagaagggagagaggaagtgttgagtttggggacaacctggcgcagggctgtcgggcgcaccctgctctctctccgcccacgcaccccagcttctcggtgctctgggggcggactcccctggccggacgatgggtttgaatctcaccccgtcccttcgctgggaaacaacactggcctctcaccttttctggtagtgattgcatactttttctccctgtcatttctcacttgaagttaagaatcaacttctgttcacgtaggaaaaaagatgagcgccttcacttgggcatctacctttcccttcccgcccaccacccggcgggtttcggttcctgcgcctggctgctctgcaggtgtgctggggccacggtgctggagggctgcgcggagcgggaggtcgcggtgctcgtgcccaggtcgcccaatgggtgggcagaatgacacggcgcgaccagagaggcgcgggctcgggatgggggctctgcggctgtggcg

SEQ ID NO: 5467 - DNA, 867 bp, Homo sapiens
gcgcggaacaaggcgctgactgtctcccagcctcccctcctccgcgccccctcggcagcagcgaaaacccggaaatctgatcctggccccaggagagccgggttccatgaggtgcactgagcatgctctgcagggtccggcgtgggagggacgcgctggcgctccccaggcccgggcggaagcggcgctcgcaggcgctgaaagcgagcgaccctctgagcccgggtggtccggcgggcaagggcggcgcgggagacccgcagggcgcgggcgcggatccggggaaccagggccaccgctgcgggcggatgggggtcaccgaggcggctcgtctccaggcgcacacttcgcacatctctttgctaagtgaaggggccaaaatgcacagatgggggagtctacccaggaacagaggcgcgagacgtatagccacccctgggttgggagcacgagccagcagatccccggagcgcgttaaacggacaacatgcccggtgctgcaaatagaggcttttgctggcagggacattggaaagaagggcggagagggagtacagcgaaaggtggggaccgcagaatttggaatctctgcggagaccggaaagaaaattaatcggagcacttcctacatgcagagccacggaaactgccttggaaagagaaagtggcagcgtctgggtcccctcggtcagcccgggccagtcggctgcgcgtgcgaagtctcctctagcggagcgggaccggccgcggcggtggatcgtggcggtccctgcacttctgctccagccgcgcctggaaacctgagcccggactcgcggctgctgcaaaacccgcttccagcccacctcactgcgaactttgcttccg

SEQ ID NO: 5468 - DNA, 1072 bp, Homo sapiens
ccggttgcgccgccctagcccagggacgccttcgccctcggctgccatctatcggccaccgagcgcccgcttcgccccgggcccatcatgtctgctgcagcttggctcgcaccagaggcgcgacaataaacaagtgcactggactgggccctgcacccgctccggagcagctgtctcagagacccggtgttgcttaccgcgttgccacctcctcggcgcccgggaggaagacgcaactttctcggagttttttttagagccaccgggctgccaggacaagccacaggcatagaacgacgcggttgctgcccgccccccccttcccccagaaaccccaaaggatgtcggtgatagagagttccaactaatgacgattgtgcgccgcatctggggaagggatacagaaaaaaaccctgcaaacaccgtgaggatgaaactgccaaagggatgcaagagcctctcaaatactaattaggggccgcggcggcggcgggctcggcgcggagacagcgtcggcgggatcccagcgcggtggtcgccgctgcgctggggggcggaggacagcgcaggagctgcagccgccgccttcgctggagcagccgaggggccggtgccacctttgctcgccccctcactaccatgtacagtgtgcgctgcaagaagaaggcgggagatgcatgcacacccccgcgacccgctccctctggctcgtcccccggcgtgcgccactgaccaggggggaatgtggtgaagacggcgaggaggagagccgaggggggaggggagggccggccggcgcgaacccaggccggagggtgcgaggagccagaggaggctggagggggcggcggccacagctgggtcggagaaagttgccccctatgcagatggcaactgtgagtacccctgtgggggggagggtgcagcgaaggctgccagggaccccgcgatcgcgccttaacacgtattggagcgagtgtgcgagtgatcatgagtgtgagcgggtgcgagcgctcggcggggctgaccgtcacgttggcggggccggcggggccaggcagtcttctccgcg

SEQ ID NO: 5469 - DNA, 1633 bp, Homo sapiens
acgcgcgcatacacactcgctctcgcttgtccatctccctcccgggggagccggcgcgcgctcccacctttgccgcacactccggcgagccgagcccgcagcgctccaggattctgcggctcggaactcggattgcagctctgaacccccatggtggttttttaaacacttcttttccttctcttcctcgttttgattgcaccgtttccatctgggggctagaggagcaaggcagcagccttcccagccagcccttgttggcttgccatcgtccatctggcttataaaagtttgctgagcgcagtccagagggctgcgctgctcgtcccctcggctggcagaagggggtgacgctgggcagcggcgaggagcgcgccgctgcctctggcgggctttcggcttgaggggcaaggtgaagagcgcaccggccgtggggtttaccgagctggatttgtatgttgcaccatgccttcttggatcggggctgtgattcttcccctcttggggctgctgctctccctccccgccggggcggatgtgaaggctcggagctgcggagaggtccgccaggcgtacggtgccaagggattcagcctggcggacatcccctaccaggagatcgcaggtaagcgcgggcgcgctgcaggggcaggctgcagccctcggctgccgcacgtcccactggccgcccggcgtccccttccttccccctgttgctgagttggtgctcactttctgccaccgctatgggactccgcgtctccgtgttgggcggcggatgctcctgcggcttcttcggcgggggaaggtgtgcgtctccgccgcctcattgtgtgcacacgcgggagcaccctggctcccgcctcccgctgctctcgcgcccttctaccccttagttgatggctcaggcccggctggccagggagcccgggtcactccggggcggctgcaaggcgcagacggagagccgagccgggcgctcactccgcgttctggttcgggcaaacttggaagaactgcgaccgcagtttgcccagcgccacagtctgagtggcgccttctccactcccgcccttgcgccggcaggggcggtggagagacgcggagggctcccccagcccctctctcccctatccgtccttcgggcgacagagcgcccggcgctcgggccgggggcgggcaaggctgggagggaccctcgccggggacctggcctctggacgccggcgtttcaaggctggtttggggacttcacgggctgcctgtttcagatgtggggcgggctttcccgttagggttcctcagtgcttccccagttgctgttggccactcagggcccggggacaccctgccacccggtctggagccggcctcgtctgccagcgaacagccaactttagcgggtggctcagctggggattcgggtccgggttcgggggccccgtgtcccccgcatgcccggccactggcattgctccaccaagagcttgagagcgcccaccctttctctcggcgccagtgtgtgtagcacttggtctccgacaacttgcgcggcagtctgggtgcttgttttccggctcttagctccaaccgaatccgagcttctctggggctctgtgaatgaaacgtgtcg

SEQ ID NO: 5470 - DNA, 1143 bp, Homo sapiens
ccgcggagcccccgcggagacctgctggagccaggctgcccacccccacctccccacccgcgcgttggcccagaggtttacccaggcagcggccctggtgccgagggggcaggtgcagcgctgtagtgatgcccagtggcctcgtcctcagccacctgccccccaacacctgctagatgcccaggcggggcaggcccgaggtgtcgccggccctgggcttcccaagccagcccaggggcatcccgcggcaggcgcccccgacacccacgcgcaggaatagggagggcgcatcgcggctcccgcgccccggccaggccggcaaggaccccaccgccccgctctcgggtggaggcgcccctccccacccctcccccgcgcggggcccccgcccgcagcccctctagcagcccctctcgcagccccagcgcccctgagccgtcctggcccggaccggccaaggaactaacgagcgcgcatcgcgggcctcgggcgcagggcacggagccggccgcgccgcagcctcccgggcaccggcggcggtgaccaacctgtaaccccagcgctcagagctgtcatggtgcccgcgggcggcggcggcggcgacagtgggcgaccggcaggatcagtgccaggcgcggcgcccagggcgggcggggacgcgggcccctcacctacggcggctcagctcaggcagcgcgctcggcccggctggggccgcggctcacgctcgccgtgtcactcactgagcgccgccgccgccgggcaggctgggggaggggtgggagccggagttttcgggcctttaaaaaattattattttatttaaatttttaaagttagctttgctacagggactgcagtgatgccgaagggcgggcaccgcagaggaggctgcgccgcagttggtggggagcgccagggtcggtactggcagttccttcttgccggctgccacccgcagtcagtctcacagcaacagctaggctctcatctgcgagctcctctcgggggtctttcgtactcaacagcacggcggcggtgtgcacgggagtccgccgggcacacgcggggtacacttaagtgcactgccaggaggccgggagcccagcgtgcgagcgtgaggtcagactgtgcacggtaccg

SEQ ID NO: 5471 - DNA, 1143 bp, Homo sapiens; identical to SEQ ID NO: 5470

SEQ ID NO: 5472 - DNA, 1371 bp, Homo sapiens
tcggttgagagcgtatggcgttctgagtagtgcaggcctcggcaccgagggcggaaagcgctctgagctcacagccgcacgacagaccgccggcctgggccctccaggaattccctgcagccttgcccggtccccgactctcgctacccaccagccctcccaggcacccaagagcctcccagcggcgggccagggccggcttcccccagcaggctcctctggagagcgggaggaagacaggaggcgctctcccggtggagggtccctcagcgacgcagccaggagcgctaggaggctacaaccggaggagaggctggcgctccagctccagccccagtcccgaagcgactcccctcttcccgaggtggccttggccaagtcttcagccatctccgtcaaatgaggaggtgggcgggatgcagacggtggagcgggaggcttgggcgcgccagtttgggagccagtgcgcggggcagggcgacgggcagcgcggggacgcgaatccccaactcctgcgcccaagacgaaggacccggtctcgacctccccatcacccggcgcgtaccagcgcccgctcagtgactcccaggtttggtggtggctaggggtgggaggtgagccgaaagggaaaaagccaccccacccaagtcgccgccgggctggagccagtctgcgcgggttccgagtccccggcgacggcgccagccctctccgctcgcccgcgcggtgttctcgccggcagcccctccggaccccgcgccccttctcgggcgcccgtccctccggagccctaacgcctgtgcgcgtacctggcagcagagacagcagcagcagcagcagcagccgcggcggcgacagcgccaggggcagcgagagcgggccagagcccatggctggtggccgggctggccgcggacccggacggtcgggagcgggcgcggcggtcgcagagacggcctctccccgcgcggctccagcgcagaccccagacctggagccgtgcgggcggagacgcgcggggctcctctccgcttcgccgccgctgggtttccagcgccctcggacccgcgggaggacaggaaccatccggagtgaagctgcgccaggcgcgggcgggcgggcgggcgtgcgcggggcggggcgtacgtgcggtaggggaaggggctccaggtcccagtccccagcgccgggcgagctccttctccgccgggctgggtgctccggccggcggcgtccgaccagatctgagcaggtgctgtcaccaccaccaggaaggagagggactcagtttctgtcccaggtttccggggcgtgtgcagctcccgcagggggttgggaccaccgggctaggcgggcgccgtaggagagacg

SEQ ID NO: 5473 - DNA, 1545 bp, Homo sapiens
acgcgaaccccgcgggtggctccgggtggtgggctccctccagcgcgcagcttccgctcgctttcccctcggcgctgcagccgcgacctgggaccgaacggacaccgccttcccggggctccggcggcgctctgactcccactttcctccgccgcagcctctggcagggcacccccttggcgcgacgccgcgcccctccccgggaccgccccctcggtcccccagggtgcgctcagttgctgcccgtgcgccccgccagcttgagcgccccgggcgggcggcggtggagaagcccagcccagctctccccagccgcgttcccggcccgcgctgctcccagcctgcaagcccatgacgtggcgacgccgaccgagacacaaagaccgaggctgagaccgccaggggttgagggtgaggccgcgtcccggggccgctggagcgcgggcgtcatgcgagactgtcccggctgcgcgccgccccagaggagtccgagcgcccccttcagccgcggcgcgctggccctggccgggactgcagccaggtgggcgccgcgcgtgtgagcgccgcgcgtgtgagcgcagacctggactcgggcggcggaggcgaaagtcgctccatccgcggggtgcaaccctgggcgcggaatccgggctgccgggtgacagtgaccagctgactctggagcctaccggaggcgcggcatcggaggccgtgcggaccactgccgaacagccgctggagacccgcagagaagggcgggccctgcgcccggggcgcctcggaggtaagttcggagagcccgggccgggcggagggcgggagcgcacgagtgtgtgtgtgtgtgtgtgtgttcgcggtgtgcccgcggctcggtgcacacgcgcgcgggttgtaaagtcaggagctgcgggagcgcctccctgcctcggcttggccccggagcattgcgggccgcggaggtgtgggggcccttgtcgctgcgctcagggcagcggcggaaaaggtgtgtgcggatgcggggcggggccgcacctggtggacagagcagggattcgggaagagaagccacggaagatgatcatgcagtttggggcaagttttcctggttgagcatcgcttcaggaaacggtgttttgagggttaaatatgtgagctatctgtgcaaaaagcctgacacatcagaggcgcgaagtaagatggaaagctggacaagccccaggtggaccgaccggtgcatccaattcttaaattgagatttccagtcacgttgatgtggaatgggatcgttgttcttcccgagggtttgataaggatgctcaacttcacctgtcagaaagcacgggagctgggcctggcccgcggggagcgtaagctcgctcacacgcggtccaactcaggcaaatgcagcatgcccgacctgctctgccgccatccctccgaaagcgataatttccttgggctaccgaatccatcagagtagtcatttgtcccctcgccggcggtgcggggagcgtaacatttgagtagcctaactctcacagcgcg

SEQ ID NO: 5474 - DNA, 1545 bp, Homo sapiens; identical to SEQ ID NO: 5473

SEQ ID NO: 5475 - DNA, 1027 bp, Homo sapiens
ccggccccggtcccagccccgacaacgcctccagtgcccgcagaagcggccctcggacagcgaggacagcccgccgtcgcaggctcacccggcgcttgatggacatggtggccacgttctggagcacaacgtactgcacctcactgcggagaggacgggtcagagcaccccgggcccctcggttggggcaagggtcagcggatgaggggaaaaggtggggcaagtcgttgcggggagaggaccagtgcggagggcaggactacggtcagtgtggagcgggtgggcagaggtggaagcggctggtgggcgtgagggggcggagccgggcagcccgtggggcggggcaggaggcgagggagggggcggggctgggggcggagcgcacctgtggctgcgcagcaggcgcaccagcgccttggcgatgacgcccacttccgccttgggcgccaggtggaagtagagctgcgccaccgccatcaccaccgcggcgctgcggctctgcagcaggggtttggtgttgcgcagcagcagccggtggtcggggtccatgacatagggctttcgggagggggcggccgcggcggccgtctcctcagaccccgcgcccttggcctcgtcctcctctgagccgtagaaggctttttccgcgttctcctctagtagggattcctggacggggagaccgacgggtctgtgggcgcctccccgggacacacttcggcccgctctgcctgggctgggcccacttacgttctgggtggggctcaggaactgcgtgcgggcgtagcgggtgagcatgctgatgatgaccacctggccccactcctccacgtcgatcagcaggttacagagtttccggtagtttttgtgaatcaggtcgatgcgctccgggcagacctcctcaaaggccatcaccacactgcccgccaccagctggggaaagaacaaagacgagagggtgaacgcgaagggtggaaggccggctgccggtcaccacccctcccggagcgcccctatacacgcaccg

SEQ ID NO: 5476 - DNA, 693 bp, Homo sapiens
acgaacaaacgttttatccccgggtagccggcgggtgcggagcgagtattcgtggggcgggataagtgcggaagtcgctgcgccctcgtcccttcatctccgggggacggccactctcagggttcccgaggagcccgctccgtgcacctaggccctaggtcggctcccaagccctggcccgccgctacaccagcggtttcttacccgcaagtacaaatgtgacacagacaccagctcctcgtgctcttggctcccagggtttctttcaccgcgcctcagcacctgcagcttctccactcttacagcgcccgccgtcgtcaaggcaacagagggatgcccggtgacagactcggcgccggcttccggcgccgtaagagaagcgtccgcgcgggcgttctggacccgcagagttctcggcgtttccgaagctcttggtgtggccgggacccgggagaaggagcagggctggtggggctgctgcagccggtgagtgtgtgctggcgctgggggctggaacctcctaggccagtctctgggcggtgccgcaggaccctgctcgctgcggctctgaggcggaaacaggggctggggccgagcgcgggctggaagctttggtccctggagtgtcgcttccagtctggggccgaggcggtcgcctgtgtagacccgggatcctcaaatagaacgaatccg

SEQ ID NO: 5477 - DNA, 1496 bp, Homo sapiens
acgccgagcgatcagatgcaaaatccttcagcgtctgaaaccatcgcggacgccgccgccgccgccgccgccgccgggtgggagccgcgaggagcgcctagtggcgcggtctgccgggcatggtggccggctcggcgatcgctgactcgccgggtccgggggctctggaagcgaggcgcgctctccgactccgagactttgcagggttgcaacagacggtggggaggcaaaaaaaaaaaaggaaaaggaaaaaatggtgctaaagtcaccaagtcccacctactgggcagaattaaaacggacacaccacgcacctgcaaaacacacacactcactctcacacatacacacacccggagcccgaggaaaggaagagaaggaagatgcagtaggagctgcagcagccgccgcgaatggctcgccgcgcggctgcagaaatgtacaagtgctccgagccttacgaaacgcacgggttatcggagcgtcttcctcggctccctccctcccttcctccctccctcctcccctccctcgtcgcggcctcctccccccgccccccgcccgggctgggagcggcaggagagcggaatctccccctccctcccctccccacacccgtctctctccccgcctgtcctctccctcctccccacccacccacccacccactcgccggctcgcggctgtagccggcaccgccacccgcagcctcgcggcagcccgcccgctccacgcctcgcagcgcggcgcccgctagccgcagcccgggggaaaccgagaccgaagggaaaaagttgcatttgagattgcgagggtcggggctggggagggagagttggcgagctggctgcacgacacggaaaggcgctctcctttccactttttggccctcgcgctacccggttttgctgcaatccggaccgcggtaggaagtgaaatgaacgtggcggaggtgattggggagtgctcccaagccttgggtggggggcgctcccaagcctgggtgggtggggggcgcaggctcacggacggcgacggggggtgccggagcgcacagacaccccagagaagcacccagagccggggaccgggaccgcagacgcgcagtccttggtctgaatgacactcatttccgtaatctagagtctggggctctggtcttggctgggaggggactgcgggacatggcacgctaggtgccccccgtgcccgctgcgctttcttggaggtgggttttgcattcggccttgagcaggcatggatcggggaaggaagaaacaggggtcgaaagggctgcgctggagagccgaggtggccccgggcgagctgtgcgtgcaagagaaatggccgggggaaattgagatgcaaggggcatattttggcaagcgccacgccagcaccgtcagaggccggcttctcgggctcagctctcgggtgagctgagctggctgccgggtgagggggcgggcgggctgctttctccggattcgggggcg

SEQ ID NO: 5478 - DNA, 5820 bp, Homo sapiens; identical to SEQ ID NO: 5231

SEQ ID NO: 5479 - DNA, 699 bp, Homo sapiens
ccgtggtgggcgaggcatccggggcttccttttctctggtccacgaactcccaactccgaacgctgtgggactgcatgggcctctgcccgggccaatgaaatgcgctgccgagaggaggctgcggcgcggcctgaggccggatctccacaggccggagagttctctgccggccgcggccggacctcccgggaaatgggaccagagcgcggagggagcctggccaggaggcctcctaggactcagccgcgacgctgaaaagcatgaagggtcggaattaggcactcatttagcgagcgttactaatccgaagttacagcgctaattccctgatccggccgctcccacacgcagcgccgggattagaggcgcggccgccgcccgccccgccctcataccccaaacgcgcccgccccgcgccctcgaggctgcgggctcagggctaatccgccgcgccgcgctcgcctggcccgagcgcgcggcgggtcgggctcggccagctggggcgagccggcctgttcgctggctcgggcgcccggttccgggctgggcaaggagcgcttggccatgagccgcgggacagcccaggcgggacggatgcgccctccagggcccaggcgaggccgcgcggtgcagaaccgccgggatttctccaacccgggtatgcgcacccacagcagcggcctttggaggccgcggcg

SEQ ID NO: 5480 - DNA, 1845 bp, Homo sapiens
ccgccttctcgccgcgcgctgggggctgtccccaggtgttggtctttgtgtcgagaaaactttgcgaggaggcgagggagctggacaaagagcgggcgagggagggcgtttgccagcctgaggggtgcgccgggcggtgcgcgcacttccctgggctcagctccgtacccggtcgctcgcggtggccagagcccagtctctctaggccaggagtggcgtccggctgcatccccgcgccctcgggagctgaataaagccaggcgggagaagcaaaggctagcgcctggacgctggagttggtgggaggaggcgagcagaggcgcggagcaaagctgtcaaactgcgcgcggagccgggcgcggggcgggggaagggagaggagggagggaggggcaggcgggagccgggagggagcgagcgggctcgccgcgcctgagcaacccctgcctgtcgctgccgctgccgctgccgctgccgccgccggcccggactcgtccggagcgcagggtgtctgcccagctgcgcgcggcgcgcggaggctccggcgtccgccgctgcgccctccggcccctgctcctcgcgccggcccgcgtgggtcccggcgggcgcgaacccaccatgcagctgcagttccggagctggatgctggccgcgctcacgctgctcgtggtcttcctcatcttcgcagacatctcagagatcgaagaagaaatcgggtaaatagctgctcccaggcccgtgccacgagccctggcgggatctctccctccttctgtactctccaccctccgaccccctttgtgtgcgccgcgccccgctgtagctccgctggagagatggggacggtttggcagaaggtggcggcgacaggggcccgggacggtttggggagaggagggtgggggcgcggctgctgtggggtgtccccgggcggggttcacgggaagcccccagctggcccgcgtcgggaagcggactcgcccaccctgcccccctgcctggcgtgtccaagcgcagtgtcgccggggtcgagggagggcgccggggagtgtctcgggcgggcggaggggccgagagtggagggaggcaggagtttctttgtctccagcacggccgctttctcgccttggcaaagtgggcagggggcgcgcagggatctctgagctgggggaggggttcctggggccggagcggagggcggggttctgcatgggctactgggaagcggaatgtcccctgcacacacagacaggcacacgcgcctcccgccggcccgggagcccggcgtaggagctggcaccactagagaagggctcgcatagctggactgagaccccccgccctcgcctggctttggacgttcagccaagccacggcaaccccggcgaccctgggttcctgtgcgctcgcagcgcggagacggagacatttcgggaaagtctgtaccgccgcccggtgggcttctgggccctcaggcgggcgatctggcgctttttttctcccgacctcgccagaggtagggtgggaccgcgagcccggatcctcccggctccggacttcctggagtgcgcacttgaggcgcgggacgcaccggctgtgtgtcccaggggctgagactcgcgccccgccccgcagccttcggctcgccgggccgggcccctctccggaacctccaaagggcggtagacgacaggtggggaggcagccggggttctgaggaggcccgaggagagcttcctggccctgggcaaggggaaggtgaggtctcaaagagggcagaaggtctcttcttctgtgggatttgtgctctgccaggcgctcttctcgagtcccgcgccgcgtgcg

SEQ ID NO: 5481 - DNA, 1844 bp, Homo sapiens
tcggcgaccctctggtaccctggacagctccccggggagcagtctaccgctaggcggcggctgctaagagaggaaccctcctgacgcggagtctgccgctccggggctcgctctccggcaggcccggggagaggtggggtgacaatgggttggggtgcgcgcgtgcctcataggtgcgagacagagcgagccgccggggtgtgagtcagcgcgctgggggctaagaagctgggtgaatagtcacggaatctcactcacgctcggctcctccacccatcccgtctacagcgcgtgtcccagtccagggcgtgcgtgcgctcggtgtccgattccgggctgtgtgtgtccatttggcgagatgtcgagagcggggggagtgtccttgtcggtgtatctgggcccaggttaggggacttctcctccccacccccgcgtgggtgtgggggtgtgtccgggctagggcgcgtgtgcttctgtgcctgtgcgtgcgtgtgcgggtcagggtggtgggaccgcgcatcagggcagggtgcctgcgtctgcgtctgggtctgtctggtctgcatgtcggcgcgatctcgacctggattcgtgtccctggatgtcgagaggccagcgtggtgggggtgtccagcctcccggaggagtactatgccttgacaccttcgtttcaccgccccaaagctggcctggggctccgtagggagtggcctgcatggggagggcccgcgtgctgtgtttctgggaggggtaagagagtgggggcgcagggggcgggccaggtccctgggcgcggcgcgggctcgggggacccgcgcggctgacgtcaggccactccttaaatagagccggcagcgcgctccgctcggcatttcccgaagagccagatcgcggccggcgccagcgccaccgtccggtccacccgccagcccgcacagccgcgccgccgccgagcgtttcgtgagcggcgctccgaggatcaggaatggggcttcgggcgctgggcgcgctccgaacccggcgcacgtaagagcctgggagcgcccgagccgcccggctgcccggagccccatcgcctaggaccgggagatgctggaaatgcaaccgcctgttccccgaggagccgctgcccccgggaccccctggcactgtgcgcaccctggtcagcagcccccggagaagacggcgcccccaacgcccgacccgcgtggccgtggcagcgccacgcgagccctctaggcgaccgcagggccacagcagctcagccgccggtgccccctcggaaaccatgacccccggcgcgggcccatggagccatggcctatagggtcctgggccgcgcggggccacctcagccgcggagggcgcgcaggctgctcttcgccttcacgctctcgctctcctgcacttacctgtgttacagcttcctgtgctgctgcgacgacctgggtcggagccgcctcctcggcgcgcctcgctgcctccgcggccccagcgcgggcggccagaaacttctccagaagtcccgcccctgtgatccctccgggccgacgcccagcgagcccagcgctcccagcgcgcccgccgccgccgtgcccgcccctcgcctctccggttccaaccactccggctcacccaagctgggtaccaagcggttgccccaagccctcattgtgggcgtgaagaaggggggcacccgggccgtgctggagtttatccgagtacacccggacgtgcgggccttgggcacggaaccccacttctttgacaggaactacggccgcgggctggattggtacaggtaaggaccaggagctccgctccgtgcgccgggtctctgatcg

SEQ ID NO: 5482 - DNA, 1480 bp, Homo sapiens
gcgggtgcggctttccgggagcccgcgggactcccccactccccactcccgtctgggaggttcggcgtgggttggcgatgggggtggaaggctcccgggtctgtggatctgcggcaggaggggcggctggtagcaggagtccctgcatcacccccacccccaggggcgttccggggtgggtgggggcatctagtgccccgcgaaaggaagaggaggagggggcgagcgtggagatgagttcaggagcggaaagcagcgcgcgcccctccgaccggcagcgggggtgggcgccttcccggggcgcgggagcgtccccaaagccgcggggcgtccgcagcgggtaggagctctgccttgcacctctccacggcggggcgtcccgcacgtccccccatgctggtccccggccccggaacggcgcgcgccccctgccccggaacgtcgcccctagccaggcggagcgctgggagctgggcccaggcggcgggaggagggcgaacgggtccggggctcgggcctcgatggccgcgccgccccgggggagccggagccgagctggccgccgcccgcgcgcactcaccaagcccgctgagctcctcctcgcacgagtaccagatgccggtgtggaaattcctgaagaggaagcggtcgtcgccggtctcccagctgtagagcgcgccgccaggggggccgttccccgaggcggtggcggcggcggcggcggcggcgggggcggcggtgccgttggccgtggcgttggcgcccgagttggggcagttggcgcgcccgccctggccgcagcccggcttggggacccgctgcgtgccctggcaccagtgcgtggtgaggaaagcggtggtggcgaacagcagcgccagcaggttcagggccacggccaggagcgctcggccgcggcggctagtcttcatgccgcccgcgccgccgggacgggactgcaccgccggggagctccgcgcgcgaagttggcagctggcgccccgcgtcagcggccgctgcccgccgcgccccggggctcgggtgcctgagatcggcggcggcggacgcggcgcgggcccatgccccccccaaccccggggtgggggcgcggcgcggggggcgtgcggggcgggctggcggggcgggcggcggtggaggagcggctacggcgcgcccggagcccggagcgcgagtgcacctcggctaggagccgctggcgcctggcagcggccacggcgcagggacgcgcgcccctccgtggggagacacctgcaggcggccggcgacactgttccggagcccgcccgcacggggagagggggccgccacgccgggcgcgggcgggggcctgggagtggagggacgcccccgaaagaaatccgagccagggtgagggtctgagacgcaaggagaatcccaggcaaggcgctcctgagaaaagatccccacggcggacgtggggcaacaaaacccgccgggagcg

SEQ ID NO: 5483 - DNA, 5065 bp, Homo sapiens
acgagccggggacctgggggcccgggcggccgcagcttagtgggctgaggtgccgatcagggtcacgcttcggagctctgtcggggcccagctccctccttcacaccccaaaatgccgcctagggcgtgggcatcccgagtggcatccggagccgctgagaccccgccgagattgctccttgtgcgtcctcccacagccgagaggccagcatcgtgccgggacgacccggggacccgagtccgggcgccgctacaccgcctcgggcgctaggcctgggagctttgaggccggtaccgtgaaacacctttaggagcaaggagggattccaggtgtcctccctttgtaccccaactccctgcccggatctcttccactctctgccatagcccccacacacaaactttgttctggacttgttcagccccttcgggacccacagttgtcgcctccatcggagaaaacaagtgcccctgtttcaggggggattccactctggctggccacccgcaaacctggaaaactattctatgacttcttccctgacccccctggaagtagggagcaccacgatccgcagagggcgcataccgaccagaaagattttggggggcagagggtgcaagtgttgtgggaagagatgcggagataaattttgcgagccagaccccgacactttccccgtccgtttgcaccgtctccggaacaactggcggccagcagcactctccaccccggccgcaaccccagcgggtcaggcgctggcgccccgacaccagtccccatcttcttgcagctctgaacctccaaagacacccggttctgcctcgcaggccgagggggagtgtgcgtgggggcaggggggcgcagcgaactcccccacgctcggagttcagcccagcgcccgaagtaaacttccttaccgctggcagcaaggccgggcggcggaggccgggccgggtgccctggggccggcgccgggagcgctaggggccccgtgcggtcaggccggggcgacctccacccgcacccacgcctcatggggctcccgggtcttggccgcggctgggatccccggaaaagcagggacggagaagccaggccggcatgcccgccctccttcccccgggaggacccaacaactccggaaagatcctgccgggagatgtgctcgctttccccggggcagcgggggaaagcccagcaaaggcacattgaaaattaaaaagaaaaaaaaaattacgccgagtggaagaagcaatcggggccgcggcggcggtgaggtagggggcgcgggggccagccgcgtgtgagtgggtccgagtgtgcgtgagtgtgagtgcgtgtgtgtgtgtccacggcgcgggccggagcactcaccatctcgccgggggagcgaggccacttcggggtcggattggaaatgttgaggcttcgcttgcttcctccgcgacatgctggctcaaacatcagctggggcagaataaaaaattactaaaaaaaaatcttctcaaaattacggaaatcgagcggcggcggcggcggcggctccccccgcccgccggcccgcccgccccctccccggctccccggccccgggcgcagcgcgcatgtgtcctgctataattatgattatcaataatgcattgcgattaatcatagaggggctctttgaaaggcgattggcaccgggccagcgctattcaaacccgctcgccttaatcaattagttcgtgatttgctgcagacccctgtctctccgcgcgctggcccaataagccggccgcggggctggctctgcgcgccgcgccgcccgacactgggttaaccctctttgcgaccgcccgggactccgcggcccggccgccgggggccggcctcctctccactgcgggcccggcgccccggcaggcgccccccgctctctccctctcccctccctcttccctccctccttcgcccccccccacaatcccgggctgggccgacccaaattagcatgccctccccggaattgagccgccccgggtggggggtggggccgggcggcgagggctggggacccgggctgccggcgcgctgcgaacttcccaactcgggggcgaggcgcgccggcccgcggggggagggagtcccgcggcgggatcaggggggagggcgtcccgtttcgtgagtgtttcttcgtttctttaagagctaccagaaagcagcccacccccacccccattaaaaaaaaaaataagcgagtggggaagagccagccccacgccggtccgcctcccgcccacggctcggcctccctcccgcctggctcggcgctcctccgccccgagttctccatcccctggatcccgggctcgcgggggcgcggagaagaggatccaggaaaggtttgggaacctgatgggtttgtggctggggggaggggcagttctcccgccaccccatcccctccccgccaggggcactgatcctccagcttcttgcttgctccctcgctccctttctctacctcggacattcccaggacaattagggctgaagttttcgggagaagcagccccgagcccgtgggataagggggcggcccggctccgcccaggacccctcccggacctcccccccggctgccccggttggctgcagggcgcgtcactccgcggggaggcggcggcagcggtggcgccgcagagccccgggcgggcggagagcggggaccggcctgggctccgagttcagctccggccggggggaggggaggggctgcggctcacactgagcgcagcagcgagcaccggcctagggagacacagcccgggcggacccggcactggactgggccagtccctgggacccctgggcaccccgccctggggagggggccgcgccccagccttccgggacgaggtggcggcgcagagccggaaagcggggtggggggagggcggtggggaggtgttctgtccgaggctgcctggcggcgccgaagctcgcctccactttttgggcacttgccgagcgcggcgcccgaacttttcgctctatcaccatctccctcaagctgagatgcaacctccctaccctcgccccagagcccagagccaggagcccgatccctctgccgggctcaggcgcccgcgaacctgagactcggtacgcggctcagcctagctctttcccctcgcgcctcggggtctcctcgctccaaggttctcgaagtcttgcgcccgaaggactaaactaaactaaacttcggctgagtaatgggggaggaggggggtgcagatacacaatccctgccctatctcacgatcaggaaaggagagggctcataaggacgccccaattcgcgagcgcccttgagtctggccggtgccacggtcggttcgcgcgaagtgggcaccggtctcccgagccgacttcgtgtactccggacctgtactgcgctccggtagaggacccttccctttctcttagcttcttaaatcttttcttttaaggtgtaaatgtgtgtgtgtgccgatgaatgtttctgtttttcatctgctgactttatttttttttattggtataacttctcccttctctctccctgctcgtccgttttccaccttttctcttacttatcttctgccctcgctcactccctaacacacacattcacaccctctccgcctcgctctcccgttctcgccaggtcctgatgggtacagtagattttgataaaaagacaaacgaagctatcagtggggctgatgttgaagaatgaagataataatgtttccataggtggtgcttcaaatgccattatttctcactgaatatttaaagagatccctcggcaaagatggatctgcgcactcctggggtgtgagcggctcgcatctcccagaccccggggaacgtgtacgggagcacgtgtaaatcccgcacccgcctccatctcacaaacaggggtcctcgcacacccaccaatccacactgtcccaggtacacgaacgcgtttgtgtgcacttgcacactcctttcccggaatgtgcccgtgtttggagccgcccgcatccttctctaacaatcttggcttcttgaaagtccgggcctcccgggcaccgcatgcagccaggaacctagcggagctggcggtcccgcaaagcttttctcctggtgcgcgccgcgtgcgcagcaggaagctcccgggaataacttcacacgtgtttgttacttggtctacgtgtgatttaagattaagtgtaggaaaaaaaaaaattccccccccccaaaaaaacaccacaacaaacaaccaaacgaaatgaacatgcgaaaagcagctacgcgatgcttaattaaaaatgggcgagcagagacgaataaattgggggatccaaactttaataacttttttcgtttttttgcgtcctcgacggcgtagaggcgggcgtttcgatctgcgcttggcgtcccccgctaatttcttgtttgttttctttccctcggtggccccgggaaaggagatgggaggtggaggagggggggatgggaggagggggatggtcggaatggcggggagaggagaattggtctttattgttgatggcaatacatcaattacgggccattgtctcggtcccaagttccgtggttcgctggtgcgggcgctgcagtgtcagggcgctggcgaggctccgcgtgccgcgatgcaaagaaatacatcaataaaaacagaagcagagtgggggttattctttatttttgtgcgggtcgaaagtaggcggcgagcgggagtgaggtgccactcctggagtccctccacgcgccctgctcaccccagagacctgcgcgctctacgtgcggtagcaccctcctaactctgggtggaggtggggtgggggggggactactggggaatccgggtagcgaagtttggacttgcaggttccgccagagggcctggtacttaggggctgatccgcaatagcgaatggggatagcccgaagtgaggcggcagctgcgccggggtcgcgacctcactggcggagaggaaccgcacccgggggaggcgcttggcg

SEQ ID NO: 5484 - DNA, 2372 bp, Homo sapiens
ccgcgactgcgcaaactccggtcctgacactctagtctcaggtcccaactccggaagggttcaggcccaagcctgcacgtcgcgttgccatggcgaccgctggctgccctctccgctctgtcttttgagcacgtggcaccaggaccccgcgttctctccagctcgagagccaggtctggcccagagccgggctcatcagtattccgcctgcggcgtctccccgaccctccgccgtgcctcaccaggtccgcctatccagcagcgacagactcccgccgtccgcgcgaccccaccgcccccatcccagtccctccccgagggttcgcagcccgccctgccctcgagcgtgcctagcggccctgggcactggcgcggctctacccagctatgcagtgctttcccacacactggccgcggccactggctgcagacccgccgcggaaagggggcgccctgagtcccgctcgcaggcagcgcgccccgagagacccgctctaaggcatccccgcaacaactctgtgggggcattcaactcccccgtgcgccggttaagattcccccatgcctcctgcaatgcaccagaccagggaggtaaacatcgaaggcacctgcattgcgcccccactgggatgcgctgtgcgcaagagacggggaccgtctgctgcaaaaccggatgatcggagacgcagggagttaggagtgggttttcttaggactcaccttatgtagtttccacatggcccccagagccttgacttcgtggctggagtgtttgccctcctccaagcactggtagcacacgggcatcttgcattgcacgcagtacatgctgtggttctccagctcgtggtctgtgcaggtggagaccttgcgtgggctcagcctccggctcacacgaccctgggccgggggcaccaggcggtgcttggctaggggcccccggggcgggtggcagcgcaggcggcacggatcgcagtagaagacatcgcactgttcgcacatgacggtggcttccttgggcgccttctcgcagagctggcacttgagggccgcggctttgctctgctggtagcggtcaattaccccttccagtacgcgattcttggggaagccgcggagcccccggtcatccaggatgaggctgcggtgacactgggggcaggtgatacaggagttgcggggcaccggggccagggccggtgacaagtgggtggccggtggcggcatagccgggggaaacacgcggacgccgttgggggacttctggcacggggtagtgggggcgctggcgaaccccccgtaggagccatagccgctgtccgcctcgctgtataggctcatcttgtccaggtccagatagtcatagtcggagaccccggagcccgcggcccgatggctctggggggattcagactctggggtctgcaccaggatgttgcgggcgcacgcctgacacaaattgtgagagcagggcaggatgatgggctcccgatagaaggagccgcacacggggcatttcaactcctcttccatctcctccatggggaccggtctgggaggagacagcgacggctgcagcgggtgcctgagctggcgaggtggccgacgggcccgtcttgtccagcaccctggccagcggcggcggctgtggtggtggtgccttcccgcgcagcactggcacggacacccagagaggcgctagctctgtgagccgcagccgcgtagccgccgcgccgcgcgccagcccggaccgcccctacctgccctcctagtcccgccccggcccatgagcagcggcccattgggcggggggcaagagatcgaagctctcattggccaccagacccgtccgtctcctcgtctccgcaggccacagggggttcggtagagtctgaggatagggcagtcttcgctcgcggctgcaagatctctgaagggggccggcgtgcggaggctaggggaccgggaaggaggagttaggcgggatgattcatcctcgcccggcttacttccgacctccggtgcagtctcccaggagctgggggcgtgagaaacccctccccgcagcgagtgggctgccggagggggctggggcttctcgccagcgtttgcgtttggctcccagctctgagctccgcgcccacctaccgcgggcgagtgctgcgcagcacggaggacgccccttctcttccgctgctggcagccttcgcaggcgtctcacccgggcctaggcttctgcacggcagtggggcttttctccttctccgtgaatccgctgacgccgtgccctggagctcccccatcccgggagtctgacggcgctggcgcaagccctggcgacactcttggcttctttcatcctgcgtccctcg

SEQ ID NO: 5485 - DNA, 2372 bp, Homo sapiens; identical to SEQ ID NO: 5484

SEQ ID NO: 5486 - DNA, 2372 bp, Homo sapiens; identical to SEQ ID NO: 5484

SEQ ID NO: 5487 - DNA, 2142 bp, Homo sapiens
ccgagggcagcgccccgcgcttgacctcctcgtaagcgcctacctgctcccaggtggccaggaaggcgtgggtgggggtaaagcgcgcagagcgcgggaagccagcgcgcacatagcgggcggccaggcccagcactgcgggggaggtgtcctctcggtacaggactcggcctctgccgtggctcgtgtcgatgtccgccagaaaaggggcgatggccgggaagtcggtggggaaatcatagtccacatactgcgtttccctggggaagtcctgagtggagatgatgccgttggtgcccacctgggagaggagagggacaaaaaggtgacagtcgctcaagcccaaggacgctaccctttcgcgcagggagggaagggaactgacttaggcaaaaagcctctctctccttccccactggccagggagtctggattcagggaaacaagcgcaacttttgcgactgtcccagctccgcgctgcagtaggtccaggggccctaaaactcgttcacctatcttctcactcccctcacaaccccggagccccatgtcctcggagaggaagcctccaggtctgaagagggaacaccccagctccgcagacgggcacagccttctcgcggtcctaactgcaaagcccgctggccgccctagcaacgccaccttttctgcctgggacgcgtacgtggctgcgaacaattcttgctctcccctccaggtcattcttgctcccctacagcagcggggcaggcagcggcatcgctctctggccgggtaccaccgcaagggtgctggggggctccaggagtggggtctgtttcctcccctctggaggcagggtttccgtgagaccgaccccagggaagaagctgcgggaaaagtgccaggagggggctgaacttacgtagaggttgctgaatcgggcttcgtagaagtgcaggggattcgccagcttcaccacggctgagctttcgtcgtcgccttcctgcaggagctggtccccccacgactccccgtgtgggaagagctcgtctgggtgcagcgccgcggcccgcaacattagcaacggcagcagcagtagcactggtaacgacgacagcaccggccgcccggccacccggtccccctccatgctcgctcggccgtgcgcttacccgctgcacaacgcgtcccgccccggcctccagcccactctccgcgccgcgccagcctcgaacctggatctccgcgggcgcctgggcggggcgggactccaggcccacccagcaagctaattggctgaggccctcggctggggaccaatcaccggctctgagaaagttcggcagtggccaccacatctggttctcgttaacttttctaaggcagcggccgctggagcagcggggctggcggggtaaaagctcctggccagggctgcctggagctgccccttccactccgcccccagggagctcccgggtcatcctctcatccgggctgccccgcggcccccaaggagccccacccccgggaccaaatggcccgcaaggtttggggcagcggcgttgcaggagatgagctcagcgcaaagggaaccccgcagcggcgagtgcggctgctggcctgcgcgctgtggccccaacaggctggcagggcgcgggcgggtggcggggttgcggtatgagctttgctccctgccctggggtcccgggcgctcctggctctggaggcctggccatcggtccgaaaagcaaagggacattgtcgtggtcccctcggccgcttcgctccacccagagacgccctgaggagaagcgagcctttgtacgaaggcagagggctgactcctaagttctgtccccctcccgaaggccggccgctagggaagacttggccaccctctggaagtaccttcccccgggaaaaccgcagcaggaaagaccatgaaatactactgtgtgtgatccgctccgtttggggagtaggatgaggcatcccgcttggttaccaggcagaaaggggcgagtcgcggggatgggaagaccctgatctcttgcccattgctgcggccgtcggagatgccctcccccgcggccacggaggcggtaacctgagctgctccgcaggactggaaaccgcacaacctcgaaaccagctgcg

SEQ ID NO: 5488 - DNA, 544 bp, Homo sapiens
ccgaacctgggcggccgtcgggcagccccctcgtccgaccatggcgactgacagtgagtgcgctccggccgcggaggccaggggtggggggaggccgcggtgcccagggtgggaagttcgatttcagacgctgcctttgtgctggctcgcggcagcagcggccgggtccctctccgctcctcacccttggctgcctggcggggcttgaaagggcaggtggccctggcggcgcgccccgcgagggatgtggcagaagggcgtgcgcctggcgccgaggcggagggaccctcgatgccgtgtggcagcggggcctgccatcgcagcccttcgcgggcactgcccccaggcccagagccagccttcagcgagccgggcaaacgaaggcactgcgcgtttttggcgctgtgagttcaaggttcgcctcgagttctgggtcgggtttgtgcgtctgccttttggggatcagggtggcttgcatggctcggctgcccggtggcccacgggctgtattcgcagcgggcagcacaaggccggctggagaccg

SEQ ID NO: 5489 - DNA, 2002 bp, Homo sapiens
ccggaggctgtgccggggctcgtcaaaggctacaaacaaaccggacgggtgggaagcacgtttcagcggcgactggatttttaaaaatctgctggtagagtgaaaacaaaaattgtcctccaagttggcaaaatcggcgtcccagacggtgcgcaggagggccctgcgaggcctgtccccggagccccgcgccagtcctgtaggcccggctgggtccgcagcccggtgttccactcgtgggtcgggcccggctgcggggtctttccgcagccgggacacccaggacagcagcggctggggagccggggccaggggcttccttgcaattccaatgatttttattattatcactcgcaaaggacaaacgcggccaaggccgggcctcacagtggctgtgctggtcatcgcgtggaggagtgtgcgctaacccaggggcgaggggggcgcgcccggtgtcccggggagagcttagaaggaagacgccccaccgtggtccctacagtcagggacagtctgggtgctagaaattcccagagagaactcgaggggctgatgtcctgggtcaccagtccctggtgcctgtggggcttcctgcgcgcccacccccatccccctcccccctctcaggttcgacggattctcccggaggcttaggacagtgatttacagtaagtggtgacagtggaataacgtgacagtccgctgcatttgccagctggctcctgggcaggcctacccgccgggcccgaccccagagtcgagtcctcggagccgccgggtaaagccccctcccccgccccggtgcagccccgcgttccccgcgcccggcgctgccggggaaaagtggcacaacaggaaagcctcgccagagggcccttcccagtcggcttcctcgccataaaaagccagactccagccgaggtcctgaccccttccaaatatacgttcccttgcccgcggcccgccactcccgcccgggcctcgggctgtgcagcttcctcctaggcctgcccgggcccatgcctcccccgaagcggcgggagtcggtgcagcctcaacttctactgcgtgtcccaggtcgccaaccagctttgctcgcgtgccgttggcccggaggctgccgcgccagtctctgcgtgcgcctgagcgcgctggagcatttgcgaggccagggctgccgacggcgagaggatactttgaggaacacggtgcttcagtcccgcccccgctctccgcccgagctggaggttggggcgcgctgagccgcagcgcctggacaagtgcgcgggccggagccgcccaggcctgcacccgggggctcgcggccgacgcatgcgcacgcgcggtggcgggtctgcaggcccgaaggcccggcccctccctcaaacccggagcggggaagcccaggggctgagagcctcggcccgggtcgcaggagctggggagcggggacgcgggcaggctaggtcttcccacctgccgtcggggctcctccccgcagcagcaaaggggtcccagtgcccgtggcagtgcatgccccagcggacacgctggctcccaaattcagagatcagaggggcggctgagaacggggcgtccgctgtgtgtgacccctgaccgtggaggaagggcgggagccgggagtaggcggtggggcccggggtcaggccgcggtcgtcggctcccggcaaaggcgctctggccggggaagggggcgagggtgggcggccggcctctgccgtcgtagtcatacctgggacgttgaaatgggctttggggatagagctcactcccagcgcgccccacaggagaagcccgcagctcaggcctgggccgtgcagaccgctgggcgggctcggggcccgaggagagcaacacggcgcgaggtccagtcgcgagtaataaccccgacagcacggcccctcgaagacgtgttccgggcaccggggttgtgagcgggggagcctcgggccttgggcccgcttggcacggggcgggggcg

SEQ ID NO: 5490 - DNA, 983 bp, Homo sapiens
ccgtttcctctcggcctcccgagcggagtgggcaagggaggggggtgaggaaggtacgcgatgcccccgccgcccggcgcctcaccggtcgcagcggctcatcgcccccgcgggctgcccgccggccgcagccgcgtccggggcatgtcagtccgccgccgccgccctcccgccggggttcgtgggctcgcagctgtcagggagctgcggggcagcgcatctggagcgcggggtctgggagggagggtgtctggggccagggcgaggggccccgggaggggtccttccgcacggatttcagaaagagggaaaccccgacccagagcggtgactggaatctacgcccgggagaggcccggagtcccggccgcgggcggcgggggattcctgcaggaaggggcaggaaggcaagcagcccggcgcgccctggcggctccgagggacctgggctcgggcttgcggtcgcgtcgcctgggctttccctgggctgggagcgcgccgggtctccgccttgcacgctgtcaccgcgggagacgtctcggcctcgccgcgcgcagaggggacgcgcggagaggctggtttctgggcgagcggagagctttgcccattaagctgccggaagaagccaaatcaaaaagccaatctccaagcctccaaacggaacgtcaccctatcagctgggagacagcgccgcactgactgacaagccgcgcatatttatcctcgcgcgcggaggggagactctcagaacgctcctcgaccagcagcgaggaagtcgagcccgcatcccgcatcccgcatcccgcatccagagcccccgagggacgaattcagatccaacccctgccccgcggccacccaccctagtcgttggagcctggcgcccgcgcctcccggccggcagcacgtcaaaacggcggcgcgtcctgacctggattccgccgagttgggagctccaggcagcaggcgggcgcgcggcaccg

SEQ ID NO: 5491 - DNA, 947 bp, Homo sapiens
gcggagcgcgccagagcgcgagggacggagggagaggaggagcgcgggagctgcggaggcgatcccgcgaattcattactgtaaacatatccgggggtgtcaggaggggtaggggtgggggccgcggcgcctacattagcccggccgcgtcggattgaggcagtagtgtggtctgagcagcctccagacccacgccgggcgggcgcagcacttggagcgagccctgcgcccgcccccgcgcagcgccgcacgcccggctccgagctgtccgcacacacgcgtcggaggagagcccgcctagctctcccgccgagtcccgggatcctccaaatccgaggagctccggcgccgcggggcagctttctgccgccttccccgctcgctgtacttcttttggggttcgttggcttggcgaagcggagagggggaggcggaggaggagagaaggcgggggtcgcggcggccgaagccaagagaaagtggcatgcccgaaccctggaggcggtggtggcggaggacgggggaagacgatgccgcagctccgtaggggacgtaggcgagagcaagcgaggcgagctgggcgccccggccccggcccgctgcggggaggcgcgcgccgctctgaggctccggcctccgcacccccgcgccccgacgctgcgggcgacagggcttggctccagcagccgccgccgtcgccgccgccgccacccggaggacccagcaaaagtttggatctgggggagggcgcggcgctgagcgggattaccaccagggctggaaggagacctcgagaacctttgcaggtaacgcgcgcccccaaccctcttcttccatgccccgccgctgcgctcccgcttcctcccagagcccttcctggccctcgcgggtctggcagaaagtaagagggaggcgaagttcaagatcccggggatgagcaccgagcg

SEQ ID NO: 5492 - DNA, 1362 bp, Homo sapiens
gcgcctctttcacccgcgtccccaggtccccatgtacgccacgtgggtgggagcgtgtcccacacacccgcgcgcccaaagccacattcgccacgctcccgccggggcgggctcaccgcgcgcctctgggtgccgagcctccacaggccacatagccgccacctgctgctgcatccccactgcggggacaggggcactcagtgcctccctccgtcccccccgccccgcgaaggcctcccatcctccagggccaggcggaggccacgtctttcccgggccccctccccaacgcggagagggaagcggagggaggagcttggcccgcagccgccggccctccccgcactggagctccccctcccctccctccccgcccctcggctgccgcagcccggctcgcagcgcgcgtcagcgggggctccccggagcgagtcgctaggtaacggggctggctccgcagacgcggggccggggaagcccgcgcgcgtcatcagcagcggcgccgcggggcggggggcgcagagaccctccccaatcccggcctgccaccacctggctcgcgcgcagccccggcccagaatgccttaacctgcgccgattgctgccgccgaggtgcccctcccctgtagggaccccgacgccgccagccccttcctcctttcccgcaggtgcgcactgctgtgcttgcggccgggtgggcgccccgccgctgcggtcgcggtcgccgctggtaagctgcgctctggggcttggggcaggaagcagtggggggcgctcgaagagcagggcagctacggccaccgtggccgccggaccggccatgtgctaaagtttctggggctcggcgccccgctgggcgcgcagcgcggggagcagacgcgccgtgggtggggcagcgcggtgctgctggcgcccggcccccgcggggtgcagctctgcgcgttctcatgctgtctctctctctttccctccgcgctgcctctccgaggtcctcccgccgagccccggcgcggggcatgaggagcccccgggtgccgcccagagaccagcaggctgcgcgcacacctagccagcggcagacggggacatgagcagcgcgcacggggtcccgcgcccggcggccagccctatccggcggcggccagcgggtcaacgctgcccgggagaatgaggcaggagccggcggcagcctcctttttttccttctcctcgccttcctgcggctccggcgctccgggtccgggccgggctgcggctctgctgcgtgccccgcgcgcccctcaaccgcctccggatgcgcttctcggtaagccaggccctccgcctcgcgaacaaagctcccttcgcagggcccggaggccg

SEQ ID NO: 5493 - DNA, 1092 bp, Homo sapiens
ccggactctgggaggagcgttggcgtggaaagccaggtcactccgatcttggtcctcaggctcgggataacgtgtcagccccaagagagcgctgcccacagccccgggtgggttgggttcaactgcacggggcggggcgccaacagctcaggacttgggttgcaggctggttcttgcaccaaccagcggggcggcctcgggcctcagtttccccatcccgcccacgaagggaggcgattgcgagcgcttggggtttctgacggaccccgccccgggggtggggcggggagtggtcacgtggaggggcgccccgtccgccgagccccgccccaccccgccccgcccgcccccgcgctcggggccctccgcctagtagagatctggagccagaagcccagagacagccgagtgcgccgtgcggtctccggacgctcgctgctcagcccgatccccgccaactgtgcaggcggctgacccgcagcggcagcggcagcagcgaggactcgagcgctggctgcagcgacaccatggatctctcctttatggccgcgcaggtaacggggcgtcccccccacgcgccccgggccgccaagtttggggaggttcggggccacggtctcgccctccacgctggggctgggcagtggcgcccgcccgcgatccgcgtcccggtcctttgtcccgagccggacacccccacttggtgcacgcgtcgggggcggcgatcgcggctctcccggggtggggcgggctgcgcgccccgcacccccgcggctcgagctgttcccgcccgggcccctctcgttggcaggaaggctgcgaggagcctgggcagcccgagtcgcccccttctgcccatcccccactgctgtcccccttctggggtcccggagccctccaaggccgggccagctcagacccgcgcgaacgtggatgggcacacagtctcgcccttccccactctgttttcccgaggcgccagtaatctgtctcttgccggtgacctcgggcgccccctttgccgccgcctgaggaaggctctgagacccgctttgtgaccgtgacccgccaagcgtcgacgcgccgcggtcg

SEQ ID NO: 5494 - DNA, 1092 bp, Homo sapiens; identical to SEQ ID NO: 5493

SEQ ID NO: 5495 - DNA, 1092 bp, Homo sapiens; identical to SEQ ID NO: 5493

SEQ ID NO: 5496 - DNA, 580 bp, Homo sapiens
ccgcccgggcccgcggattgccgggtcggttctcagtcaccgcacaggtgccctggagagtgcgaccaccccctgccctccgccccgcgccggccctcggctcagtgccccgcccttcctggagcacggcctgcgcatgcgcgcgccccagggcccagccctgttcctgctccggctcctgcggggatggatgcttcacgcagtaagcgagtaagcgagccctggagaccggggccctgggtgtgcggtcggctcagtgccacgcggtgagataggcatggttatcaacccacgccaaggcggttgtgtacctggcatagaaaacactgctgttgaatgttgtttccatagtcattcgccagcgtccactgatgagaggtgccaccacggacacccggccttgctccgtcgaagctttggtccattaggaccaaagtcaggccccagcgggcctccctgccattcctggacggcctcgcgtcctcccagagcctgaccttctcttatctctgcagcctaagtcgcggaagcgtagacacccggcttttcccgcgtgctctatcgggctcccctggacacg

SEQ ID NO: 5497 - DNA, 888 bp, Homo sapiens
ccgtgggaggtcagagcgggcgctgcccggcgtcacccctgcagcgtccggatcgctccgcataggcaggggtggtgccccctccccggggcacagaaacgccacatcccgggggcgccgcccagaggctgtctctgtttctgtgtcccttcatgaggctctgtcccacaaaggcagcctgagccaggaccctaaagaggcctggtcatcgggaccggagggagttccgcttcccaggccggctctgcaaacgcgagcctgcgccaaggcgccctgcgggtttgctggtggcatcgaggggcagcgcggggccagcgctgggagctccgaacccacacgctccggccagctgcccgggaagcgcccaagcacacgtcccgagtcccagattggattaagttgcccaactacctactttttctctctttaaggagaagcctaattggagaagattcggttttcttcgccatggcaggtccctttctcctgacccgcagttgcaggggctgagggtaggcgcaggtccgccctggggtcgaagccaccatcgggcctcgaggttgcccccctaacatccggcctgcacgcctggcgggggcgcaacagtgtctcacggctcgggagctcgtttttggcttctgagcaaggtatttttttcatctgccgtgtgtttagctgaattcagtatatttttctcgcacttctcgcttttttttttttctttctgaatctgctcttctgctttgcgggcccctaatctctcccgaatctcgggcgcccggcccggcccaggcgagcgctcgcggttggggacgcgggtggggacgcggcggtctgggcgctgcaggatgcgcctggccgcggaggagacgaccagggagcgggtcg

SEQ ID NO: 5498 - DNA, 1483 bp, Homo sapiens
tcgaatactgatatcgccccaaagctgcaactctccggccccgccacggctccttatgtacaaagagagggaatcagtcgccggtgacctcgacggccctcggatcagggatgccccgagtccgagcgggcagggtgctcagcagggccaggtgatgggaatcatggggccatcgagcacggaccctggctcccccggtggcctctgtgagctctggggtcaggcggggactggaggagcgtccgcgccgggagggagcgcaccgcgccacgtgcccgcccggcgccccgcccccaccccggccacgcccctcgcgcttccctcaaagccccgcccctcagccccgccactctcgtccgccccgcccctcgcagcctcaagctcagcgctcccggaggcgcggacggtggggccccgcgccttttgtgtcgggctttgaccgccgcgcgcgctcattcacctcagcggccgcgggcggaggggcgcacgcgcgcgcagtcccctcggagggcggtggggcgaacagcaacgcgcgtaccctagctcttggctgctgtgctgagactagcccgcgcgcccgcgcgcctctccctcgaggactcggagccgcccgcgcactcgccaggggccgccgccccgagtctcaggcggacgcgcacgcgttcccgccgcccggaccccagccggctcgccccccgcccccccatcccccggcggcggcccccaggcacgcgcccgcgcacacgccggcccgggcacgcgcccgccaagatggcaggggccggggcccagctgtcagtcgccgccgccgcggcccttccccgcagctagcggccccgacgcccacccggagaagatgagcccccgctgccccccgcagcccagtcagacgcggagccgccgcgcccggggccggctcccccgctagcgcccgcgtcccgcgccccgccgccgccgccgccgccgccgggtcgcccctggcccggcgcgcccgtccccggcagcgacaatgaggtgagtcggggccggcgcctcgtgggaggtggcagcggccagcgtcggaggggctgggctgggggcccgcggtgcccccgagggcgggaggggggctccacgggcgcgggggcttccagagaaccgcgggggctctgcagagattcgggggcattcagagcgcgggaatggcttcgcgagagccgtgggggcgtctggagagccgggagggtctgcagggcttgtggggggcagtgttctgcaaggggcaggcggcgctggctttggctgcttgtggggtcctcttaggctccggggggcctgcggcggcctgggaggcagacccccgcgggcaggtgtggccgtgtcccgaccgcgcgaggaccgaagttggcggaagcccctgtgcggtgccttccagcccggaggaggctggcctgaagcccccaggcgttgccgaagcctccccctgccagcgcccagagccgcg

SEQ ID NO: 5499 - DNA, 3714 bp, Homo sapiens
gcgcgcgaggctggggcagcccacaggaggagcgcgggacccgggcttgagtttgcacccaggcagagcgcccacccccgcccctagcttcggaccctgaaagtaaagtcgtcgtgcccggcagccagcccgaatcttccagccctcagggagtcggggtcggggcagggaaggccacgggtggcggcacaatcgggatcctggagtggaggcgcagactgcgggtcccgctgcgcacgctccgtggtccggttggggtgggccttggaggtccataggccaaggttgaacgggggctctggagcgtgggcggggtggagtgcacaggtcactgggctctgagcgtttccatgggccaggaccccaacgcgccgtgtcctcaggacagattggagggggaaggggctgcgattatgccccagtcggaagggttttacagcagccgcgctgccctctccctgccggatacccggcagtagacaccgacgtctgggggctagcgaggcaggtgggcgcggaccgcgacccgattctggcttccaacctccgcccagtggcgcgcggggccgtcgccccacacctccagtccgcgtggctggtgtctggctcgccgccggggcggaaggggcgctgtcggcgcaggcgggcggggccggagcgcgggggcgcgcggcgcggagcgagcgcagggctcgggggcgcggggcgcggaggaccgggggcttgacgggcggccctgcgcggtgcggggcgcggcggcggcgggcgcgcggccagtgaacgcgcgggcggggcggcggtggcgggaggcactaggggccgctccccgcgcttccctcttccatggcgctgccccagccgcccgagccgccccgcggcgcgccccgcaaggctcccagcctgctggagatgggggcgctctgcctggactcggagatcatcctgggcttcaccagccacctcctgcggcgacgaggcaaggtgagggctgtcgggaggggggcgggcggcgtaggcgccgtcccgttactttgccgcgcggctcgcgcggccgggggtgctgcgccgggaaggagacggcaggtccggagccgcgtcccgcagcccgggctgggactcgctgccgcactttcccccattagcgttgtccaagtctccctctgccttcaaggctgtgtcccaaccggacccacccggaggctgtggctagggcggagagcgcagcgcagggattctcgggctcaccttgcgccttgctaggatgggcgaagtagggggtcggggcccctgactgatcgtgagcccccgaggtgactccagccttgtgcaccccgtgttctgcggatatgggatgtgagcttgtgcttcccgaagcgccgcggcggtagaagcgctgaagttgcgggtgtggctggccaggggcgcaggaccggtgctcccgaccgctgcgtgcttctgtgttgcgtgtgtgggtggggggacgggatatagagagtgtgtgtcccggagcagtggagcggcgggaggcggtgctgtctgccggcagtgcggggtggggtttgggtgttgtcctcagtacccagatccagatgtgggctgacgcccgttttcattctccaggctgcgaagagacgggtaggggaagcgcttccggccccccaggctgggtggaaagcgactgcaggcttacggatctcagaaagagtggagagcccctgccactttattccatacccccttgcgttttcgaacccctaaggtcatcaacgacccggaaagccgggaggggatcacccaccccactttctggggagtgcgtgcgtgggcggggaggcttatccaagtaaaagggggtgggcaaaacggaaagggtcactttgacgtactgagtctctgcgaaggcctcaccgtatgtgccggcagccgcgtgtcctggtctccgccgggtcacgaccttcggagtttccgagtgcgcctcaggcctgggacgcgcggcgctgtctccccagtctcggagccgtgtgcgcagcggccggcagggggcactcgcgtcacggggagcccgcccgccgcgcccgcctggcttgacccgggctttggggctgacccggagcctggcccggagctgcctgcggccgcggatgccggcgacatttggggcccggctaggcacagagcaactggtcgccagggaagggcgggggggcggcctcccagccggagacaaacaagcaattaattccggagctgagttcccatctgccaggcctgctgacaacaggtccggcgcacgcccgcaggacctcccgcttcccgggcggcacggcgcgcacacccacttgcgggcacacgcgcggctgtaaagacacgtgccgttcgcagacgcgccgaggcacagatacgccggcgcggtcgctgcccggctcgaggcgcacaccgcggcgacactaacccacgcgcgacagttagacctaaagtggcccgcgacacgcagagtacgctgggcttgctggaaaggcgcctgggagtctcggggccggggtcccgccccttcctcggcccacctcgccgtgggccttgggcaagagcgtcccctccgcagcctcagttttcccgcctgtagagggaggggcgtcggcgcctcctgggagacgcgcagccctggtgtcccgggagaggggcgggaggcgcatgcgcgcgcgcaactagatcctcgccgccgcccccagcgcccctccccggggcagggactcacctaacaggttggggtccttggagtgcgcggggccgcgtggggaagcggggaccctaccccccccacgcgccgcccagcactgggcaagggcggggcactctctgggctcccgcccctcgccgcccgccccgggagcccgagccccgcccttccccggccccgccctcgcctcccgagcgcgcccaccggagccaccgcgctcctcgcgacactcgcaggctctgcgaacttccgagcggctgggccgggccatgggggcgcctcggggccggatcacgtagccgcggcgcccccggagagccagcgtggccgggagcgcctgccgggctcttcccgcgccccggccatggtcggccgcggcgtccctctgtgcgctgcgcagcccgcggtacgcgcggcccggcctggagagggaggcgggcggcgggggcccgggacggcgaagatactcgcggtgtgcgctggatccctgggggccgggcctcctgctgagggtagcggacccgcaggcgggacctccggggatggagggagtgggtgagcgccagggtcgtgcccagggctcctaactttggcaagagcgtcacgctggggcagggcgcgcaggggtctggatccgacggacgtcccaggctcactgtccgcttccgcccccacaccctgcaggtggccgagggcggcccggcccgcgagccgccgccgctgctggaggtgtccccccgaaagaggctacccgccgggcccgaccaggacccatgcggcagccgccctgctcccgaaggcgccggggccggcccagagcagggccactcggccggcggaggcggctggtgccgccactgccacacgaagctggtggagctcaagcgacaggcgtggaagctggtcagcgggcccgggaccaccctccgggtaagtgacacttccttaggccgacccctccgagcagggccacgccg

SEQ ID NO: 5500 - DNA, 1266 bp, Homo sapiens
gcggcgaggagggctgtaggtgaagcgcggggagagggaggtcgcccgctccggcctctcccccaggggccctgcggctggccagcgctccggctgcacctcctggtgcgcgccgcggcggcgccacaggcccctcgaccctttgaccaccgccctcgggccgcgcgtccggcagccgggaccggtgatggcgcgggactgacggccgtctcctcccagacccctctgtcccgcctggggctcgctggggctgcggcgccgccccgagctgcatgtggggcgggcgcgcccgagcccagagcgagcggccctcggcgcccccgaggcggtgccccgccgcgccagagtacgaggaggagcggcgggccgggccaggctccccacgcgccgcagcctcggagcacgggctccccggaggggacttggggcgtcccagcccaggaggaaggacccggaagcagaagcggagccgcgagtcgagccgagccactgcccccgctgcccgcgggcgccgggtgggggtcccggcggctggatgggcagcggcggcgcgggccgcgggcggcgatgggcgaggagcagagcacggtgagcggcggcggcgggccccaggagtcgcagaccctggccagtggcactgcgggccaccctgagcccccgaggcctcagggggacagcgcccgggcgcccccgctgcgcgccgcctccgcggagccgagcggcggtggctgcggaagcgactggggctgcgcggacaccagcgccccagagcccgcgaggagcctggggcccccgggctggagtaagagccgagcaccggcgcagcctgcgggactggcactcaccgggcctctcaatccccagaccttgccactgcagttggagctggaggaggaagaggaggaagctggggatcgaaaagagggaggggatgaacagcaggaggcgccccccggcgaagagctggagcccaggacccgcgtgggggccgccgacggactggtcctggacgtgctgggtcagcggcgcccgtccctcgccaagagacaagtcttctgctccgtgtactgcgtggagagcgacctgcccgaggcccccgcctcggagcagctctcgccgcccgcgtcgccacctggggctccgccagtgttgaaccctcccagcacccgctcttccttccccagcccccgactgtccctcccaacggattccctctcccccgacggcggcagcatcgagctggagttctacctggcgcccgagccg

SEQ ID NO: 5501 - DNA, 1316 bp, Homo sapiens; identical to SEQ ID NO: 5378

SEQ ID NO: 5502 - DNA, 10783 bp, Homo sapiens
tcgcggagacatctcgagtcccgcaggtgtctgagctgcgctgcgcgccccagccgggaagccttttcttatccaaccgcgccgccccgcggaaagcctgggtactgcagacgccctcaccggcccaccgacagctggttttgaagcgggggcttagaaaagtaaaggggacagtgtttggagccacgatgcctttgatgtgaggcggttccacccaacaatcaacgaatcaagctggaactgcaggccctacttttgttggggggaggaccttaaggaatgtcacccccttgtcccctaccctctgccccacgcccagcctctcagaaggcaccaggcgtgagtagagtgcgaggcgtccacaccctcgtgtcccttccattcccggacacctttgcaccctagccgaggcctcagcacggagtgagggttgcctggggtgccctgctgtgtgtggggcgttcttgcctcccgggccctgaccccacggtctgggtcggcgaggcgtctctccctggcgtctggactgtgcgcctgccccgcttccaggcgacgaacggcaggagccgggggtccggcgggacccggatccagggcgggcggaaggcgagggtctctccttcccggaacccccgccccggaaacctgcaaccaaaccgggtccctcctccgcatcgctcccgcgctcccgggccgcctccccacgcgggcacccactctccgggccctcgcagcaccgccctctccgcgtccacccgcgcggccgacgccgccaggggccctgagatcgcggagacagcgcgccctggcgcctggtggggccctcccagtggccagagcgctcctggaccagtcggctgtggtctgtgcccaaacacgatggaaaccggggctgggacgggcggtggtacgcacgtggaggagaagaggcatggcgggaaaaccacagccgaacacaggtcgactcgcacctcccaggcacccgccgccgtctgactcgcggctctccccaaggttccgactcgccgccacctcttggcaccactcaccgggctccgacccgggccgcgagtccgctgatgcgcagctgcctccggcggctcccgggctctgcccggacccgcgcgcagagacgctcgggaacgctgggctcgggcgcctcctggcggcggcagcacgcggcacacgctcggttctccggcccgagggggcgcgtggagcgtacgcgggatccgcgcgcgggcctgggctgctggcccacatttccccgcttgctcggatggcggcgctgaggcctattcgcctctttattaataacgatgcctcgggagggaaaaaatagagcctttaaaaatcagagtgcgagagaggagtgtgtgtgtgtgtgtgtgtgtgtgtgtgtgtgtgtgtctcggggcgttggtgaaagcaataaaactcagatcgcttccttggcgagatagcggcggctataatgcgccggggggatcaggggtttatttgcagatcctggataaaagatgatatatcgacacggtttagagtgtcactgcgcttggcctctcagggagccacaagtacatatttcctgaaataccgcccagcacagtatctaatccgcccgccacttaacaccgggaggggaacttcagcagcgcacaagcgcgctcccggtttcctggttctgggtggggagagcccaaatgagaaggatctggtatgcctagacgccccctcccctggcctttgtcttcagtccaagtaatcacttagcgatgggccttaataaatacgtctgagaactgtccttatgctcggtaaatattggattagcttttcaatgaccaggctcttgaaaaggctcgagaaatacacaccaggtctcaactaagcccaacagtcaataggtaaggaaataagttatttccccatctgaggtggggaatgttgggaagggggacttccactcttaccaaattatctgattctactaaatatgaccgttgtactaaataggaaagggggcgcatccaagtttcccattagtcggaatttccaccagctcagttctgctcattaagggccgagtgactttgtggggaacatatctgggttccagtttttatttccacagagctcagcataaactatttttgtttagtacatatggtttatttggggactgcttatgggagttttgacctggcaattgcaggggagaaggcatgacccaaattatttccgactgcctcgcgccaatttggaccgcttagaggaggcaaaaaatgggcaaattccttggaagccctgctgtgtctccctggtactgaattttgtaagcacgcgatacaggagacattgaaaattaaagaggaagtatctccctcctccaacatggggagagacgctgttggaagaagtttctgaagtggtttcccatcgcaccaagaggccagtgggatggatccccgcgcataattcaaaggaacgcgcgcgtctttagctcttcggggttggtaaccaagtggtccggccgggcgcaagtcgccttggaaccggctgcagcccaagtctagctgggcccgggactgagcggcacccttggcctctcagaacctttctcgcggtgagtggaagggcggctccgcgcgcgggcgcttcggggccggtcggttgcgaaatcagggggtggattttcatctacccaggagccgctaagcccgtaggggaccgagcatcacccaggccctgggtaccctgagttgcctcctgagccccaggacggtccgatggtgcagagctcccaggcagaagttagtttcctgatacacacacagcagtgagcaaagtgcgcacaagtgagccaaaccctgaagacgcaggttcgcggactcccatcccagcgttagagtcaaggagacagaagagaggaaggagagaagtgaggaagggagagagattatgagaaaaagagattatgaaagtagagaaagagattatgagagcgagattatgagaagagagaaaaagagagattttgagagagagagacagaatgagagagatccaactttcagtgtcacggggcctaggcggggcaagcgccctccgaagccatcaaagacaggggtggctttttctcccctcctccagcctcctccccaatagatatagcacgaatttttaatgcgtcttcctttcacagacaacaatacagggtttgaaagccggacacaatttaggttttgtgcgggtccctcctcgcgctccctcggcccagctggccatatggaatccagcatggagcccgtggatgacaaagggacccagtgacaggcccaacaaaaccccaaggagacttctgcctgactccgggattcactgccggcgataagcgcgctgaatggtgcggggtggggcggggggtggggggcgggccccttctccttcttcccctctctctgtccccgcgatcctttctctgtccctttttaatatgcacgcctctaacatctccggctcccagctttcccattgtgcggttttgtaccgcccgctgtagattgggcgaagatagactgctgaagcggaccccgcgccgggtgcgctcccagggcgctggggttagggccacacagggctccgcaggcgcttttattgactccatggggacccgaggacagagagaggcgggcgccgggtccacctcccgggctcccggccggccacaggagcgcacacccagattgcaggcccgcggtcctggccacagctccaaatttgtcctcaatgagcaagtggtggaagcctgccagggtgaggaccttccacgcttcccccttcctctctggaaacctgagggtctcttgtgatcattctcaccctggaagccctggggcctggaaaagtcaaaatggcctcaggccttctgacagctccgctccaagagacttgaaaccctcacctttcctcccaagaggattttgggattaggggaagttgcaagtggatgttgagtggttagtaccagggcaggttgggcgttcaattattgcacaacaaactatttgggagaaattcgttggcctttaaaaacagtaagacataagcccccaaacattgccaagctagtgtggagaacaaagggagaccttttagcatttagaaaaactgccctttccccgaggatgagcccggagatgggaaaggacctttactggggtattagaaagacttccgagccctcaattatccaggggcggtgtggaacgcgggaataaagtgtcatcgcgtccctgggctgctgcgcagagtgctatcgacgcacagatttggtcgcacggataatcatgtttgctttagatattgaattaaacctgatcatcaactacagggagcgagaaagtcagctgggaccgctccttttgcccggcctcctcactgccacccaaccccccagccttgatggtgcagcttcggagagaacagagatacaatttccaaatgcgccgacgttcagtccctcagcgtctgcagcacccgctgggctctgagctagagtcccaagtatttttagaaacccgcgagatagaggagaaaggctcatcctccagttggccaggcttcctaagacgctcccccgcgtggccaagtgtgcgccagcatctgccaaggagatcttcctccagcaacaagggtgggacggaatccgttccccgccggaaagatggatgcgcccttcccgggcgtgcccggggctgtgtgcccacttcccatccggggagctcaccccacccccaaacctctacttcctagcaatccacccagttccacgctcaagggctgacctggggggaccgcacaccctggttcggaccgccgaacgctggagggaaggaggcccgggatccagtccccggagagaggcctggaagcccggaaaggatgggagcgtaagggaagggagaggcatggtttgctgggattgccaaagattctcgctccctggcttcctggggccaaagatcctagggagggctgcagtatcccctccctcccccgagcccagaaccccgcgtacttcccccaagccccctaagccaaagcctcgcgcgccctgaccgttcccacccccagccttagcggtctcctaggtcagcaccagcccgcagattttgaaaaggagtggggagtggggagaaggcagccagtcttaacctcagacccccacccacccactttcttagcgtgaggtaagtcaaatgtaacaaagtgaaagtcatcgagtgtagtggcttcaacagcttctcaggctgaaggagccactcatagatttgggccagcgaggggggtttgctctcctcgcctttgcggctcccgaagtcacttttcctcccgtagccggacgctgccgcccggggttcagacagcgcgcgagaccaggggagatgcgggggagggtgggcggccctgggcttccggccgaccgctcgcaggccggaggccgagcgttctcctccccgccccaatcctaggcgcggggtgcagcctgtggtcggaggggcctgcaccgggagccccgcccgccccagggccccggtacccccggcctccccgcccgagaggaaccgcctgtgggagccccgcgggcggccgggcccggctcccaggcccaggcctccggcccggcgcagtaggacaaacgggagggcagggattttttctttttttcttttttaaacacaggatttttattaaaattcttatttaaaaaatcgaaagctttctgcgcccggcgctgttggggaaccgcgccgaatagctgagctccaagttcggggctgaaggcccggaggacagggcagagggctccctgcctacagggttttcttttccatatttgagaaatgtttgcacaataaaataaaaagagaaaggaagaaagcaggggaaaacgcaaaaacaaaaacaaaacaaaaaacaaacccaaacaagccacaaagaaaggagttggacccagacgggaaacaggccggtcctgaaggtcattttggcaacaatcaccaccgatatttacaacgaaaagcgaaatctgccaccagttgtcagaacgtttacatggccataaatatttagcattttcttatttttttttaaaaaaaggaagaaattctctgtatttttaaagtgttctccacttgctttagaagacggctgacaatatcgctactcacacaaacatattttacaaaatgcacgaaagcaggggtggggggtcggtctttttctcgttttcaagtgacgacattaacgctgggacggtttggtccccccggggagaggcaaagaagcgaagctgcgcaaacattctgtaaacacggcgtagagttcagccctctcccaaggttcagaaggagaggcatgggcagagctgggtgggtggaatctgccactccaaggagacgcaggcaacctcccggcgcctccctagtggagccgagagtcaactcgactccataataataattataataataataataaccaccataaggaccgaggcctcctcgccgccaccgccgccggggtggggcctgggcctggggccgcgagtctcgttggggcggcgctcaccaagtccactgctgggcctggaccagggggtgtgctgtcgggtactggggggtgctggccgagctgtactgggcgttgtactgcatgtgctgcagcgactgcgcgctgtaggcagaaaagggaatgcccgcctggaaggtggcggctgccaggtcctgggctttgagcgcgtgacatggtttgccgtccctgaccaagacgggcacggccacccggcgcggcgagggcaggggcgtcacctccatacctttctcggcccgggcgcgcttcatcttgtagcggtggttctggaaccagatcttgacctgcgtgggcgtgaggcggatgaggctggccaggtgttcgcgctcgggcgccgacaggtaccgctgctgccgaaagcgccgctccagctcgtaggtctgcgccttggagaaaagcactcgccgctttcgcttcttgccggcgtcccccccgccgcccggggtctccttgtcattgtccggtgactcgtcggccgagggctccggggacttggagcttgagtcctgagggggcgccccggcagccagaccgtgcactggggggagggggagagagaagcgcgtcaggcgtctggaggccgcgcgcagcctgcaccagactcggagcaccctggatcctccgtgcgaccctggacctccgcgcctggcagcccagccccgctgcctttgccatgacccctgccttcctctacgcctgacgaagacgtcgggacctcccagggtaaagagggaaatccgtaggagtgggggctaggggctcgcctttcaaggggctcacatagtgtgggtgagaatttggggggggaagtggcactgaagatcatcgcgggttaagggctccggcgcccttaagcggtttcctctccggcgagacgtgggcagatttttaaaagaaataccccacaatcccagcattgatcggctcggccatttaaggcaggtttttgggggctttcgtttctgctttcgggccttctagacaccccctgcactgcacaaagcgtcctctatgatcgcgcagggggcagggtgagctatttatacccgggccacccgaagcctccccaccctccacccgtacccggacgaggctcgctggctacctccagggcgccaggccagtccctcccagcggccggagtccgggggctgcggctggagccatcggtccgggttgacatcatataccagcccctgggaggtatagcccttctccctctttctccttaacttctcgcattgaaaaaaattttggagaccaagttctttcccggaactaaggaggcttgaagaggagggcagaggacatcctatacaggtgttaaaaatctttctacggatccgagtgagggggtccgggcttacatggccccttcccctttcactcccagcgtccaacccgggctgcggctgcaggaatggaggggaccacggcctcggcagccaagttttgctacttacgggagtactgaaggccctcggtgctggccagccagcgcgtgtacgggttgtcgctgctgtcgtagaaggggttcttcaggggcaggctctgcaccgcgtccagggcgccctgccccagcggcccggccctcttggctggctcgggcccctcgttctcttcctccggaccttcggccacagagccctcctcatcgttggtgtccggcaggtctaagatgtccttgaccgaaaaccccgtctttgtgttggtcagcgacatggttcgagaccccaaaatttatgtcgcaaagttgtagcttcacttggtcaattcgtggcgctcccctgccccggcgggcgggggaggggggagttggggggagggactgggggaggggaggggggaattggctttaattattgggataattattatttttaaaaagagaaagaaactggggatggggaggaaaaaaatgaagcccaacccagtgcctctctctgtcttctttgaaagcacgcggaaatggacgcaggaagccgggcggcctgcgcgccgagcgccgcgggccccggccttagtttctaactccaggaggggtgccaaggcggcgtcagctcgggctccggcggccgctcggcgcgcggtggcggctggtggcgaggaaaaaatgggccattgcccgagcgatcagtccatataaggctgggctccactcacgaacctggggaggcggggagagggggagaaagagagggagggagggaaagaaagagggagggagggggagcgagagagggagcgggagaagggtggaaaaaagggggaagagacattaaaaacgcaaaggttggccacgtgtgggcgggtcttgggagtcaagtggatgaagacagtatttgcagatgtgaaattgtgggttttggggagctccgcgctcccagccaacggccctctagagcaagatgagaggtgtaacgtgtcaattaattgcaaagacggggcgagcctttttttttttaaacccagtatttacatacaaagggccaccgcgtcgctcgcgagtccacacacttgaaagggccgttttaacaaattgcatcttaaaaaaggtgggggtggggaggaggaggggagaaaacaaaacagaaaccaggaggagggaaaaaatcctctttaacattcaccggttcctacctccccgcccccgcgcgcccacccccggcaagccggaaaattggcgatttgtggcgcctttggaaaagggggagggggcgaaggccgagctgcggaaatctctcctttccatcgttggtggttgcctaaacaagatccggttcaaatggcaagagcccaacttctgtaagcctcctaggtcaatattttggttgaggcttaaggatgagtgctagaaatgacaaggcaagtaattgattccagttaaccgcgagagagcccaaaacccaggagagagctccgctccgggccggccagagccaccaccaagcgacccgcccccttccagccgccctttatttgctaaagactcatttatttccttcactccgcctccccccacctcccacccccaaccccccgcctccacctctctgcggccaaggaggacgcgcagttcactttctgctttgcgggcggtcccggggagggcggggtaagagtgaggagctccaacttcgtctggggtcggaccctggccctgctgcctctgggctctgcgggcctctttccccgggtggaggaaagggcagacggccctgctctttcctgccctctattatccctccctctccggccccctccctctccagcctctggctagaggtggagcagcgggaaggcggcggggcgggattgcgggggtgggggtgggggttgtgtctccagcctgggtgaagacccagaaagctgcgggggaggggggtcgctgggtggcccgacgatgcctcgttttctccccagttttcttctcccacgcgagttctttagtgtggtctctttttggacgccttgggtgcgttcggagtacgcgctccacgtttccaggttaagtcaggttagtgtgaagtttccagccactctcggctctgggaactgaactttcccgggacttgcacttcctcctcggcgctggggttggaaaagaccacgccgcatttgccaccccttcttctagttaaaacttttttggggggggggtgcaggggtgtagattggctacctgatgctcgttcgccccagaggagtgtcaggaaggagctttgtctgggggcggggaggggcacagaaggccacccctgcggggtccaggtctagtcttcccacaacctgggctcctccgcgcgggccaagctgagcgcgcgggcaccgggtcctcctcgcgcgcagctgcagcggacgccgccgcgccccagctgcccccgggttgccagcgctgggtgagggcacctctccccgagccgctcggcggctttctgcagccctagctgcctcgcccccagtatgtgacgtgggtgacaatggcccaggttagagcaagcccctcgtcggcgcgtcctgggtggtcggacccgggcaaacacaaatacaaaccgattgctaagctgcggacaatgagcgaaatgtagacaaatgtcccgctcccgttggaagcctttgtcccggctcg

SEQ ID NO: 5503 - DNA, 810 bp, Homo sapiens
gcgcacgggtcggggagggggctaccggacctggatcccgggacaccccgggggtctggggggcgggccgcgcgcttacctgcgtcctcgtcgtcgaaggagttcatgcacgggaagtagatggcgagcgcctcgaaggaggcggacagactgaggcggctctgcgagcgctccatgcccgcgccggcgccgggcgcctcggccgcggcggcggcggcggcggcgggcggcttgggcagcttggccgccccattcttgacgcggagtacggcgcgcggcgtggtggcggcggcccggggccgggccgaggctccgctgcggggctggcgggcgcggcggggccggcgggcgggccaggagctggcggcgcgcggagcccgaggcgcgctgtgctgctggcggcggcggcggcggcggcggtggcggcggcggtggcggcgcagcgcgctctggtccgcggcgccccccgccggcagcgcgaggcgggcttggagcggcgccgcagccaatccgtgccgccgggggagggggcgccgctgcggggcgtgggagcccggagggcgcgggctgcggcctcttctagcagcccccgggcccggcaggtgcgcgcggggaggcaggcgccgggcgaggttgtctgggccctggtccgagggctgttcccgaccccgcctcggcccccaccctcagccggccgacttgcggagaggccggcgtccagtccctcacccagacaggcctctcccagagacactggcgcgctcggaggggatgcgctcaaagggtcccgcccaggcgggtcggcactcg

SEQ ID NO: 5504 - DNA, 1142 bp, Homo sapiens
tcgggggagaaacctcggcccacagccgggatgcgcccccgccggggtcaccgcggcggcgaacgtcccggacttcgcatcccggtgaccccttgggatgaaccgaagccggacccgcaccttggccgtaacaagcgcgctccacgccgccacgcaccagcggtgactcccgagtcctctgtcgccctggcctccccgcaggcgggtttcgaggcccccgcagggagttcagggccacggccacgtgcagccgcccccgagcccgagtttgcaggctcggggtccggttcgcgctttggtggcgcccggcgaggctgcagcgcgcaaagttcccacctcaagttcccgtcgcggcgtccccgcctcggagttggcccggccgcggcttccgttccccccggctgcccacgggtccggggcgaggacgcgagaggggcctggaagtcgcccggggagcccgctctgcctcccggagccgccgccaaacttcggtcccggggcccggctcagctcccgccctcggagccacggccgccccgtctctgcctcccggtccccgccgggctccgagtgcgccgggagcgcggcgcagcagccgccgagggagggagcgaggcaggaggcgggacggagggaggggactgagcgcggggcggggagaaggggcgggcagccgaaagcgcagcgcctggcctcgcctcgcttcgggacagtggcagcggcgccaccgtcacggggcgtccaggcgcccaatcgggaccccgcaccttggatccgggggccctggcgcgcctgctggattgcgctcctcgcggccagttcctgagcccgcgtccgggactgctcgcgctacgccctccctcccgttgccttcttccccgtctgctctcccaggagcgaccaccctgcggccccttcgcctgcacgcgacagccttcaaggtccccgcgctccgctgccctggagcttcacgcaccaggcggcgcggcagcctcctagggtcgcgcgccctgtcagctttccccgcggtgcaagtgctccggtggtcccgggtccgcgcccctagcagcaccgccccagggtctacatgtgctagatattaaaaccccactctccgctgccccggggccgcgctccacgcg

SEQ ID NO: 5505 - DNA, 2885 bp, Homo sapiens
acgctgtagacaggcgcgttgcagggcggcggccctctccccttggcattaccgacagccgaggaaattgggttaataaagccggatactgcggcggggccgcggggcgcaaaccggcgcggacagatgggtccccgggggcaccctgcccggctccctggatcccggatggtggcagagctgggagctgcgcaggacgggcactgcgcagcgcatctccgttcacacccggcggggcacggggcccgcagcagcttactcacccgtagcccggcctcctccctcggaagggagaggggatcggtggggagggggtttgctggacaccagggctagacggggccctcccctgaccgtcagggttaagtagggcgcgggctgtgaggaccctcctccacgcagccccccgaggcagagggcccgcaaagcggtctccatccaactccaccccgcggacgtcccaggcagcggatggcggcgggggggggaggccaggggacatttaggggacaaattcctcagacttcgaggcagccggcgacggcgtccaattcccaaataaatagaacaaactcctacttggaaaaggccttccccggggtcttcctgcgcccgcggtccagctcctctgcagacggccatcgtgggctctccgcagggctgcggagtctcggagtcaccgaggtgggaggtgccggccacgcgcgtcctcaggaacagagcactgccctgcagtttagcacgaagggccggctggagcgggagcgcgaggcccactgcaagaggatcaggagccagtaagtccggcttttcttcgtctccacctttcgtgcgcccggggccaggaccgcctgtccggaatctgaccagtgcccgtcctcgccgtggccctgggaccccgcggtggtcttcttttggggacgaacggcagtgcccgaaggatgctctacccacccccgttcctagacttgctgggtcccgacaatacccagtgggtgccgcgagttcccgggcgcagagtccagcgtccggctctcgagctcaatcccgcgccccgacggccttggcgcttcccgctgcgctaaactgtccaccgcgcacaggctggaagcgaagtcgggccccctcctcctggtctgcagggtccctccaggcctttcctgtccgggcagagagacagtcacaggggcgatcggaggacgcgtgcgggagggccgggggcccgcgcggtcacggcttctcgtgacagtgtttgcaaagcgcggagggcgtcccggagaaggcggcgcacttgtcagggcagggccccagggcggcgcctgcggagaaggggcacacagtggcctggccgaagggcgtcaagggcgcggcgtttacgggcgcggccaggccctggccctggttgaggaaggccaccaggcgccgcatctcgtccagggcctgcgcctgcatgaggatatagttcttggcgagcagcagcgtggcgatcttggagagcttgcgcaccgacgggctgtgcgcgtaggggatgacggctcgcagcccgtccagcgcgtcgtttaggtcgtgcatgcgccgccgctcgcgcgcgttgatgctgagccgcagagaccgctgctctcgcggccgccgccgcccgtccgccgcgctccctggcccgcgccgccgccgccgctgctcgaaggcgtcgtcctcgtccccgctctgttcgccgctgctctccgccgcctgagctggggcgcgaggtgcaggcgccgcggggaggtcgccgcccgggcccggagtgccgtagccgcgggccgcttcgggttctcgcgccgccccgtaggcgagacccgcagccgccgccgcgtagccgtggcttagtgccaggtacgcgtcccccgacagcgacttgagctcggccatggccgcgccgcctgggctcgggggctcgccgggtgggcggatgctcatgtgggtgagcagcccccgaggccggcccgagcccgccgctgccgctgccgctgcgatgaggctcccggctctgcgcgtcggtctggcttgcctgcgggtcccagagcctcggcgcccgctgcctcctccgcctcttccttctctcccacctcctctccctcccagccgcgacgcgcagggggcgggctctacctccccctcgcccccgcttcggttttaagccgcggaggcgcccggtgggacctcgctgctgtccaatcaggggggaccgggtgagctcctcttcctggagccgggctccaccagcgccgcaggctcacaggccgggggtgggggctctggaccgaggggcggcgcggggcggcgcggggcggcgcgcgcggtcctggagcgctagtacttgcttctcgactccccggccgccgcctccggccgccccggggattccgccaccaaacgcacgcgtcccaggtgggcacccgcctcggtccgtctttgagtctgaccctagcgcaagagtccctggcgacacgcaggggccagagcgggggggcgcgccgcaatagcagcagcgccagcgccaacaccctgtcccgctgaggggccgcttcgggtcggggtcagggtcgtgggcgctctggtgcagccgcggcgcagcgtgtacccggagcccgcacactccctgctcggggcgccctgtggccaggcttgaggggcagagtgagagggagtttctagaacctgttgaaaaacgccacgagcgttgcaggccggggagggcgggaaggtggagggcagcgcggcctggggctccccgggggtgggaggggagctctgtgagctgcaggaccgcctcttccctgccagccgcttcctgggcatctatcagcgaaacgcgtgaggcttggtgggctttcccggagcctccg

SEQ ID NO: 5506 - DNA, 1460 bp, Homo sapiens
acgcgtatgagagagcagagcggcagcgacgcggtcggatcggtcgcgggggctgcgggaggaagcgctgcagggacccgggcggcgccggcggcctagccggagatgcacgcgctgtaatagaccgcgctgctggcgtccgacagcgcggagatcaggctgctctcctctgggcaggacatggcgcgcgggcccagtttggccagtgccacgtggtacgggagcccgggggcgtcgggccgagtccggctgcagttgaggtactggtcgaactcggtgaggtccacgtcggcccacagatcggcggcgggccccagcggctcggcgctctccagcggcggggcctcgggcggcggcgacagcgggccggggtacgggccgggcgtgcccagggtgccgtagtacaggccagcgagcggcgccgcggggggcgcggtcctgagcgcctccgccaggggagccccgtagcaaccgccggggtcccgcgacaactcggtgggcgcgtagggcgcgcggaagggccgcagcgcgcagtcctcgggcgccgcgggcggtgggaagaaggcagcctcgccgggctccaggccgtccagaggcgagcgctcgggcgtgggcagccccaggccgtcgaactcggcgcccagcgggggcagctcgcggaaggcgcgagccgagccagacgccgcggggaaaggctcgggcggtggctgcgggggcgctaatcccgggagcaggaggccgggctccagccgccgggccttgcgcgcctgcttcttgcggcgcggccggtacttgtagttggggtggtcgcgcaagtgctgcacgcgcagccgttcggcttcctccacgaagggccgcttctccgccgcgttcagctccttccacgctttgcctgcgggccgtgggcgccagtgagtggaacgccgtcgggcgggtgggcgccgagccctccgtgcgcccgggacgccccgcgagggtttggcgcagcccccgcaccccgcggcccgggacccctgccccccccgccccaccccggcccgagccccccccgccctctcccccttctctgccgccctcccgccgctcacccagcatcttgctgagcaccgcgttgtgcaggtccgggttctgctgagccagccgcttgcgctcgtcctttgcccacaccatgaaggcgttcatgggccgccggatgcgcgactcgtctgccgcctggcgttccccgcggccggccgggctgaggccatagcgccccggctcggggctgcgcgggggactgcgctgcgggctgggcggcgaggcgggcgcggcgggcgcggcgagggcggcggggccggcggcgaggccgcgcgtgtcagcggcggccccgtgtcccggggcccatgcacagtcgcggcgggcgggcgggtcgtcctgtgcgccgtagccgggcggcgatctctgcattccagctgggcgcg

SEQ ID NO: 5507 - DNA, 1560 bp, Homo sapiens
acgccttgcagtgccgggtcctgcggcgaccactgagccccttcgtcctcgccctcagtcccttcgtcctcgtcttcggtctccgctttcccagtcggccggggctcgtcgtccacgaccccgcacgtgccgccgacgtcgccctgccgattccgccgcaggaggtggaactgtagtggtgccggcggcttctcccctggggcggcggtggcgaggcgctcgctggcggcgggcagcggctggatgaaatacgcctcccccagcaggtagaaggcgccgcgcacgccctcgcagaggctgagggcggcagccgagctgggatcgccattcacggtgccggagtagaagcagtgcgccaggtcggtttccggaagcggcgtctcggacccggatttgcgccccacgttctggagcgtgaagccgggcgccaaaaagctgctgtcgggccgcagctccagatccagctgctggtcaaaggcgtgcaggcggaggcgcgtggtcccgtgtcccggggcgcgctccagctccggcaccactagctcctcgtcctcctcggaggggcgcccgagtgcgtccgacacggccagtagcgccgcggcgagcagcagcagcgtgggtactggcccaaagctccgagaccccggagcccgctccgcgttccccatgtcgctgcccagcttgcgccttccgaacccctcgggcacagctcgctgcattggagccccaggagacaccgctcgtagcagcgcacggagcgagggacctttagttcgggtcgggagagcaaagcctcgttggcctgctctggattgttaaaattaacaatttctattattcgttggaagggcgcgcagagccggctacagccgaagctcccggagtcactaaaaggaggcgctgcagttctgccggcgcgcgggaagtttttcttccagcgcaaagttggagacactgagaggcaggcgcaggcagagtggctctgctgggacaagaagcgctctggggcgcctccggggctgaggcaacgcggagattggtgcctggcgcccctcttcggcctccgccttggctgcgatgttgctcactctgctcagggctctcccctctccgtccggtagcgcaccctggctttgcaatagcccctggctcggagccgctttccagcgagtgcaagaaccgggcagccgagcggtccttttatagtggaccagtgaaacccccacccccaccccactcctcccctttggcccttttccatcccaaagacgccgcccccggctccgttggtgctaaaccgcgctccgcgctgcgggctcgggagggggagggggcagcctccgcgctggctccacgccactgctcgtcaatctaggggcggaaggggcgctgtgaccagcactttgtactgctggggccgctccagggagaagactctcccttccaccgcttttctccctcgccggtttcctggaccacccttcctccccaccgcccggttgcggtaactcagttaccgcgctgggctgcggttcccaggagggagggttcggttggagaacg

SEQ ID NO: 5508 - DNA, 5118 bp, Homo sapiens
ccggtgccgggagccttgcctcccgccgccacccctggtcagctctgcgcaagaacgtcgttctgtttggcagccaggccgagacgcagcctgaatgtgagcaggaactcggagaagggaagggagagaatcagaaagaaggcccgggagggacccgggaagcagtgggaggtctgcgccctggagccccgcgagagcccgccggtttggcacgggctcctcccgggccgcccggcggtccaacaaaggccggccccgacacgcacccggtcttttgtgggagagaaacacaaagaagagggaaaaacacggaggaggccaacagcaccaggacgcgggggccaaccaggaactcccggagccggggcccattagcctctgcaaatgagcactccattccccaggaaggggccccagctgcgcgcgctggtgggaaccgcagtgcctgggacccgcccaggtcgcccaccccgggcgccgggcgcaggacccggacaagtcctggggacgcctccaggacgcaccagggcaagcttgggcaccgggatctaatttctagttattcctgggacggggtggggaggcataggagacacaccgagaggtactcagcatccgattggcaccagggccaagggagcccaggggcgacacagacctccccgacctcccaagctactccggcgacgggaggatgttgagggaagcctgccaggtgaagaaggggccagcagcagcacagagcttccgactttgccttccaggctctagactcgcgccatgccaagacgggcccctcgactttcacccctgactcccaactccagccactggaccgagcgcgcaaagaacctgagaccgcttgctctcaccgccgcaagtcggtcgcaggacagacaccagtgggcagcaacaaaaaaagaaaccgggttccgggacacgtgccggcggctggactaacctcagcggctgcaaccaaggagcgcgcacgttgcgcctgctggtgtttattagctacactggcaggcgcacaactccgcgccccgactggtggccccacagcgcgcaccacacatggcctcgctgctgttggcggggtaggcccgaaggaggcatctacaaatgcccgagccctttctgatccccacccccccgctccctgcgtcgtccgagtgacagattctactaattgaacggttatgggtcatccttgtaaccgttggacgacataacaccacgcttcagttcttcatgttttaaatacatatttaacggatggctgcagagccagctgggaaacacgcggattgaaaaataatgctccagaaggcacgagactggggcgaaggcgagagcgggctgggcttctagcggagaccgcagagggagacatatctcagaactaggggcaataacgtgggtttctctttgtatttgtttattttgtaactttgctacttgaagaccaattatttactatgctaatttgtttgcttgtttttaaaaccgtacttgcacagtaaaagttccccaacaacggaagtaacccgacgttcctcacactccctaggagactgtgtgcgtgtgtgcccgcgcgtgcgctcacagtgtcaagtgctagcatccgagatctgcagaaacaaatgtctgaattcgaaatgtatgggtgtgagaaattcagctcggggaagagattagggactgggggagacaggtggctgcctgtactataaggaaccgccaacgccagcatctgtagtccaagcagggctgctctgtaaaggcttagcaattttttctgtaggcttgctgcacacggtctctggcttttcccatctgtaaaatgggtgaatgcatccgtacctcagctacctccgtgaggtgcttctccagttcgggcttaattcctcatcgtcaagagttttcaggtttcagagccagcctgcaatcggtaaaacatgtcccaacgcggtcgcgagtggttccatctcgctgtctggcccacagcgtggagaagccttgcccaggcctgaaacttctctttgcagttccagaaagcaggcgactgggacggaaggctctttgctaaccttttacagcggagccctgcttggactacagatgccagcgttgcccctgccccaaggcgtgtggtgatcacaaagacgacactgaaaatacttactatcatccggctcccctgctaataaatggaggggtgtttaactacaggcacgaccctgcccttgtgctagcgcggttaccgtgcggaaataactcgtccctgtacccacaccatcctcaacctaaaggagagttgtgaattctttcaaaacactcttctggagtccgtcccctccctccttgcccgccctctacccctcaagtccctgcccccagctgggggcgctaccggctgccgtcggagctgcagccacggccatctcctagacgcgcgagtagagcaccaagatagtggggactttgtgcctgggcatcgtttacatttggggcgccaaatgcccacgtgttgatgaaaccagtgagatgggaacaggcggcgggaaaccagacagaggaagagctagggaggagaccccagccccggatcctgggtcgccagggttttccgcgcgcatcccaaaaggtgcggctgcgtggggcatcaggttagtttgttagactctgcagagtctccaaaccatcccatcccccaacctgactctgtggtggccgtattttttacagaaatttgaccacgttccctttctcccttggtcccaagcgcgctcagccctccctccatcccccttgagccgcccttctcctccccctcgcctcctcgggtccctcctccagtccctccccaagaatctcccggccacgggcgcccattggttgtgcgcagggaggaggcgtgtgcccggcctggcgagtttcattgagcggaattagcccggatgacatcagcttcccagccccccggcgggcccagctcattggcgaggcagcccctccaggacacgcacattgttccccgcccccgcccccgccaccgctgccgccgtcgccgctgccaccgggctataaaaaccggccgagcccctaaaggtgcggatgcttattatagatcgacgcgacaccagcgcccggtgccaggttctcccctgaggcttttcggagcgagctcctcaaatcgcatccagagtaagtgtccccgccccacagcagccgcagcctagatcccagggacagactctcctcaactcggctgtgacccagaatgctccgatacagggggtctggatccctactctgcgggccatttctccagagcgactttgctcttctgtcctccccacactcaccgctgcatctccctcaccaaaagcgagaagtcggagcgacaacagctctttctgcccaagccccagtcagctggtgagctccccgtggtctccagatgcagcacatggactctgggccccgcgccggctctgggtgcatgtgcgtgtgcgtgtgtttgctgcgtggtgtcgatggagataaggtggatccgtttgaggaaccaaatcattagttctctatctagatctccattctccccaaagaaaggccctcacttcccactcgtttattccagcccgggggctcagttttcccacacctaactgaaagcccgaagcctctagaatgccacccgcaccccgagggtcaccaacgctccctgaaataacctgttgcatgagagcagaggggagatagagagagcttaattataggtacccgcgtgcagctaaaaggagggccagagatagtagcgagggggacgaggagccacgggccacctgtgccgggaccccgcgctgtggtactgcggtgcaggcgggagcagcttttctgtctctcactgactcactctctctctctctccctctctctctctctcattctctctcttttctcctcctctcctggaagttttcgggtccgagggaaggaggaccctgcgaaagctgcgacgactatcttcccctggggccatggactcggacgccagcctggtgtccagccgcccgtcgtcgccagagcccgatgacctttttctgccggcccggagtaagggcagcagcggcagcgccttcactgggggcaccgtgtcctcgtccaccccgagtgactgcccgccggagctgagcgccgagctgcgcggcgctatgggctctgcgggcgcgcatcctggggacaagctaggaggcagtggcttcaagtcatcctcgtccagcacctcgtcgtctacgtcgtcggcggctgcgtcgtccaccaagaaggacaagaagcaaatgacagagccggagctgcagcagctgcgtctcaagatcaacagccgcgagcgcaagcgcatgcacgacctcaacatcgccatggatggcctccgcgaggtcatgccgtacgcacacggcccttcggtgcgcaagctttccaagatcgccacgctgctgctggcgcgcaactacatcctcatgctcaccaactcgctggaggagatgaagcgactggtgagcgagatctacgggggccaccacgctggcttccacccgtcggcctgcggcggcctggcgcactccgcgcccctgcccgccgccaccgcgcacccggcagcagcagcgcacgccgcacatcaccccgcggtgcaccaccccatcctgccgcccgccgccgcagcggctgctgccgccgctgcagccgcggctgtgtccagcgcctctctgcccggatccgggctgccgtcggtcggctccatccgtccaccgcacggcctactcaagtctccgtctgctgccgcggccgccccgctggggggcgggggcggcggcagtggggcgagcgggggcttccagcactggggcggcatgccctgcccctgcagcatgtgccaggtgccgccgccgcaccaccacgtgtcggctatgggcgccggcagcctgccgcgcctcacctccgacgccaagtgagccgactggcgccggcgcgttctggcgacaggggagccaggggccgcggggaagcgaggactggcctgcgctgggctcgggagctctgtcgcgaggaggggcg

SEQ ID NO: 5509 - DNA, 1423 bp, Homo sapiens
ccgcacccgactgcacgcgcctccctgggaccccgcactggcgagccgtccctcccggcgctggacgccccacctgtcccggcgccgtcggaagagccctgcagagtgagcccctagggccaccccgctgccttcctccccgtccccgcagccgctgtagccagcgtgggagccgggcaggtcgcgtggggcgctggacttaccgagaggttagcgccgccgtcgggggagggcgtgtcccgcacgtgtgtgtccgcgcgtgtccgcgcccgcgtgtgccagcgcgcgtgccttggccgtgcgcgccgagccgggtcgcactaactccctcggcgccgacgggctcagcccatggtgtgggcgccgggttcagggaggctccggctcccgccaatcgcggagcagggcggccgccccgacgcgcgacttgcgaacccggagtgcgcgccgggggcggggcagggacgcgtgggcgggaatgcacgcgcgtggccaggtgcgcgtgggtgcgagcgcgcgggagtcttcgagtgcgcgcgtgtccgtgtgcgcgtgggtgtgggtgtgctcgcgtgtccgtgcgcgcgccctcggggccaagagcgcgggccgcgcgggcaggtttggacactacgcgccctgctcgggtttaggacgcggctggcggctccgggaggaagaggaggaggaagaggaggaggcggaggaggaggaagaggaggagggaggcggaggagcagaggctgggacggccggaggagagagtccggccccagcaggaaaggaacccagcacgcgactactggaggggcgaggagcaagggaaggaccagaggggaggagagggggtcaggggagggaaagtgtgggagggggagccgcgggggtgcgcgctcctcctaactcggggtcgcttttagcgagaagtgatatttttccagcctcattgaaaaccgttgcaaacattgaaaatagtaaaagtgaaaacggttgcgacactaagacgtttataaaatgaccgcggactgccctcgatgctgatgagaactgggacgacgtcgcgcagagcgtccggagggagaggcgcggtgcccgggacctcggtcgtggggaggagccggatacagccgccgggacgcggggatgccgagggcaccgcggcctggtctgaccgacgcacgcggtgacagccgcccttgggagacgacggcgtctgcaaccagcagcctccaaagggtgcagccaggaggctcagcttgtccgcctccggggctcggggctaagccccttccagaagttttcgtttctacgcgaattccgaccgcaaaatccagcttacctgagcgccgctcctcttctctcatgtccctcgggggccgtcacgaccgtcccggagcgatctctaggaacctgtcccgcagcg

SEQ ID NO: 5510 - DNA, 1384 bp, Homo sapiens
gcgccgcgcacagaaaaggaaacttcattccgtctgttaagggcagggccgggctagtggcaggagaaggtcagctgcgggcgcaggcaggagcggatccaggagccgcgtcggggcgcagagccggacgttccgaggagcctgcgcgccgcgctacccggcggaagccgcggtccatgcggggctccccaggcttatccaacgcctcgcaggcgtggctggcaggaggggcccggccgtgcccagcgccctcagacgtagttcttcttgtcgtagtcgccggtggccgtgggccgccgcggcgctgagtacttcacggggaagctgaggtcgggacggccggtgcagacccaggcgccgcagcacaagaggcagccgcctaccatgagcagcgcggtggccgcccagccgatgtacagcgctgcgcccagctcgtacttctgcgacacgggcacagacgggtcgtaaaactcgcggacgacaatgttggcgaaccagcagagtggcacgagcgccagcagcccgcaaaacaggtagagcacgcctcccgtgagggccacacgcgccttggccgggcccggggccacgcaggtggtgcactgcgcgcccgccagggtcacgaagagcgcaacgaacgccagcagcacggcgctcacggtgagcgcccgcgccgcctgcacctcggtgctcagagccagcaccgagtcgtacactttgcactgcatgtgcccggtgctctgcaccacgcacgacatccacagccccttccaggtggtctgcgccgtcacgatgttgtggtccaggaaggcggtcacctgccacatgggcagcccgcacgccaggatcagacccccccagcccaccaggcacagcaccaggcccaggatctccaacgctgcggaccccatggctagaggcgagacgcgcacccgaaggcccgcagaacccccaaggccgtgctgcgcggcgccctgggcgggccctggtgcctttgcgcccgcgctcccggctcttggccccagtccgtttgccccgcgggtctgtcgcacctcctgggtctgccagctcctgccggggggtaccctctttgaaggttcgggggcggattctgtcccccgggcccggccccccggcccgaagcagccaatccgtgcgcgggtcatcgtgccgcagccaatcacagagcctctggcagctgaagttagggaaacaacggctcttgaggggtagctgagggcgcgggaccgctccccgcccggcagccgcccccagccccacccgccgttgtcctagtcgcggccgagcgcattctgggctggcctagggcgcgcttcttgggccgcctccctgcgcgtcccggccccgtcacttcagaaggcgctcg

SEQ ID NO: 5511 - DNA, 1361 bp, Homo sapiens
gcgcccccgacccccgccgctgggatttcccgccgcagctcctgctccagtctgtgctgcgggtggggtcgggttgagcagcccggcgccccccaccgcgccccccaccgcaccgccctcgatctaaccccgcccccgggcgctcattggcctgcagcaccccctccccagcctgtgaagtgagcagggggaggcggtggtcggtcgcctccctccagcgcccagcctggcttcgcggcggaggcggcgcctctcccgcaggacggagccaagctggactgccgcgccgcgcggggcgggcaaagggggcgctgcgctcggccccgggcagggagtgacggcggcggcggcggctccgggcgagcgtggtccccgcgtgcgcacacgcacacgccgccgcgcagggacacacggaccccggccgccagccggccacacaggcgcggagacccggctcggcgcgcgctcctcggcgcacacgctccccatccccgcgccgcgcgggccgcggacttgcaggctgcgcgtcctttgcggagtctgccccggccccacggacaggccccgcagtgagcaggtaagggtcgccccgccgcggctgcccctccacgcctcggccgtcttctccccctccagaaccttcgcccagccgggacctcggatcccctcctctggcttggcggtctccgccagccgcgacctccaccgacggagagcgggcgagggccggcgccaggcaagcctcccagatctgaaatgaagccccctcccgccgctgcgcccttcctgcgcgtcaggctgacaccccccaacccaagtgtctggcgctgcgctcggggcggccgatcgccgcagactgccggggtgggggtcgacctagctatctcacgcccctcctgatgcggagaagggagaccaggggggcaggcaagccatgcggccggagggacccggagggacatgcctccctacccttaggtggacggacgcacctacgcggatcgggaaggcagggctggagggtcccccggggctaggtaccgcaatccgcacggggtttgaggggtgggcaagcaatgtgctaggtgggggttggggtaggggccagtgtagaatgcccctctgtggtgacacatccgggattgttcaaaagagtgtcgtcttcgtttcccgtggcgcggaggggctggggttggggatgccagggcttcagtggtccccagaagaaacgccctgcggggtctgtggggaaacgcaccggccttcccaggttgaagtgggcccgctgagacccctgcctgccgctttagaggcagaagctcctgcggcggctgcggggggcggaggccacatcctcggcg

SEQ ID NO: 5512 - DNA, 1175 bp, Homo sapiens
acgctgtctggtcggagcgctccataactcggccaatggggagggagtcgcccgctaagcgcctgtcaggcctcgaccaacgggatgggcccttcccgccagagcacactgctccaatccaggagcggctgcaggacctgagccaatgagacgcaacctccgctagccgcgcggtgcccggccaataggaggccgcccgtgcccggtagcgtgggaggtgtggggtggcgggcggcgctgcgaagctgagggagctgcgcgcggacgagccacagcctgctacagggtgggtgcgcccgccctgcccagctcgcccgccgcctcccggctcttcttgcgcggcggcttctggatgggggtcttcttccggggggtctcaggcgcgggcaagtcggtcgccgccttctcaggccccggggtttcggtcgctgggggcgcgcgggcgggcgaggctggcggcacggagcgcttggctttctgtgggggcgccggcttttccctggggccctgcgcgcccagggccacctcggcgcggcccaggctgcgagtcttgccgcgcacgtcagcggccaacatggaggcagcctcggcgcgcttcgcgggggaccgccggcgtccgtgggctccaagaggccggggcgcggcgcgcgctcgggccctgggcggcgagggcgcagcgagggctgtcgcctcctcgggcagccccggggggcgcggcgttgggtcgcgggtccgggggctgccgtgttcgaccgtatgcgccgatttgtcgctgggcgtccgtttcctcttgctggggctgggcgcggcctcggagcctggcggcggtggtgagggcgcacggccagctgcagcggcgctgtgcttgccgtggatccaggacaccttaggcttggtggcggggtcaggtggcggcggtttcctgcgctcgggcgatggcgacagcgacaggcccccaatctcgccccgggcccgggccggccgggcctcgcgtcgggccacgcgcgcgtacagagcccctccgggcccctccacgctggacgccgaccgctcgctgtcggaggacgcggggaggggtatcgcctcctcggcggaggctggcgtggtcaagggcacaggggacggcgccggcgcctcggcagggacagtggggacttcggggtcccggctctccg

SEQ ID NO: 5513 - DNA, 1087 bp, Homo sapiens
tcggcacccgcgtccctgtgcttctggtggttccggcgcttcctcggagcgcgcggcatgtctgctcctacacgtccagcacctctgtccccagagcaaacccacctcccagggcacacgcagaggggcagtcaggcaccgcctccaccctgccccacccaggccgcgcgcaccccggaaacctggactccgcgaccagctccctcctgttcttttccgaggaccccagcggcagtgtgtcctggacccacctgtagcctccaagctcccccacctctgcgtccttcctaggcgcttctgagcctgcagagcctacgacccccaacaggctgctccgaagtgcctctccctacatcgctccaggaatgactcccctacacccgttccccgcaaaaaaaagttggcccaagatccaggcgtcccaaggatcagcccaggtccccatccgacgcgggccagggggtgctgctctggcagctccggagccccggcaaagagcaacctgcagggaggcgccacgcgcggttcccactacccgccagagacccggtccatggggccaaacggaggggcctgtgccggtcgacaccccaagccctgtcgcgccccccccgccgcctaccgtatgggaccggcggaggagaaggcgcggtcgcgggctccctgaggcagcgtgttccgtcccgggaggaaagtttgtgccatacagaggaggcggcgcggggaggacttgggcgccggtgggtggaggcgtgggcggtggcgccgcgtggtcgtgtgtctgtccctccggcgatcggtgcgtctgtccctcgccggagcccgcggccgccgcgctctcgctcgctgcgcccagcgcccggcgcgctccggctccagccccgacgcgcccccgccgccgccgccgcgcgtccgccggctacacttcctcttcctctgaactcatgtgcaaaatatgctacgctgcatcttcagggaaagcctcgcggcccctgacagcagccgctggagcggtgggcccgcccagctctccccgcgccccctcggagttccgcccggtcacctccacgcggccgagctgcaagcg

SEQ ID NO: 5514 - DNA, 693 bp, Homo sapiens
ccggcagccaacgctcagcccccgcctcctctctccattccggaccccgcaaccgcgaggcgagagagcagcgccggcgaggcactggctgggctctgactgtcacgttaattccctgctgctttttctagtccccagccgcctcgcccctcctccctcattcccagcctgggtttggaggcgatttccctctattgactgagccgactgcatctctgggcaagcggcgctttgcctctctcctgtctttgtctgctcttcctgcaaggctacggcgcctggagcagggtctgcagcggccgccgcagcaacgcgagccaagtcgtgccccgcacggccgcccggggccgcaccctcgctcggtggcggcgcccgaagacgccagccgcgccacgcactgcctgcgtcccgcgccccagccgccgcgcaccaacgccgccgccttcgccgggagccaagcccgccgggccggcccggtcccaggtgggcagctcggcttgcagctggttggaggtggcggccgctgcagccctggcagcgggcacacccctaagcatacgcacccaacgcctcctccctgagccacgaggatggagcagccaccccggcccgggactggcgcaaggtaaggtgcagccgcctgttgcttttcgcagagcgcgggatcatccctctgcccgggtacctaggccg

SEQ ID NO: 5515 - DNA, 5065 bp, Homo sapiens; identical to SEQ ID NO: 5483

SEQ ID NO: 5516 - DNA, 307 bp, Homo sapiens
gcgcgggggccggaccatgagccgctgagccgggcaaaccccaggccaccgagccagcggaccctcggagcgcagccctgcgccgcggagcaggctccaaccaggcggcgaggcggccacacgcaccgagccagcgacccccgggcgacgcgcggggccagggagcgctacgatggaggcgctaatggcccggggcgcgctcacgggtcccctgagggcgctctgtctcctgggctgcctgctgagccacgccgccgccgcgccgtcgcccatcatcaagttccccggcgatgtcgcccccaaaacg

SEQ ID NO: 5517 - DNA, 1563 bp, Homo sapiens
tcgggctccgaaaacggggggagggggacgacgccccagaggcccctgagcccctggttcttcccgaccctaagggcttttctccctcggttcccaggcggcgacggcgggtagcgcgaagcagcaggcgcaggggcgctgggatggggatgtctctgcaggtctaaggttccccttgggagtctaaacaaagactacggcagcgccgtcccctcccccgggaacccgacgccgcgcggccacagggggcctggaggggcgggcagggcctcgcagcgcacccagcacagtccgcgcggcggagcgggtgagaagtcggcgggggcgcggatcgaccggggtgtcccccaggctccgcgtcgcggtccccgctcgccctcccgcccgcccaccgggcaccccagccgcgcagaaggcggaagccacgcgcgagggaccgcggtccgtccgggactagccccaggcccggcaccgccccgcgggccgagcgcccacacccgccaaacccacgcgggcacgcccccgcggcgcaccgcccccagcccggcctccgcccctgcagccgcgggcacgcggaggggctcctggctgcccgcacctgcacccgcgcgtcggcggcgccgaagccccgctccccgcctgcgcgtctgtctcgtccgcatctccgcggtgagtcggcggcgccctcgcccctgagcccagggccagcttctctcgccgccgcggctgctgcgcgcgtccccgcccagcccagcccagccccgagcacgaccccagccccacgcacgaccctagccccgcgagtcccgcaccgactcgctcccgccccatttcgcctccgcgggggcggcgccccctcctccccgcggctcccgctctccttcctcgccttcccggccgcgctggggacccccagccgccgtccgcgaccccccaccgcgacgcccggaggcggcggggtctctttgttcgggcggcgggcacgggggaccacctcccacggtgtcaccgcacccaccccgcgcccttcctccgcctcctggagttcaccgggaccaggtggcggcgggtgcctttttgggggtgcgcggccatgcaattggtggatttttttaaaccgttttggaggggggagcgcggcgttgggggcgggagagcgctcctggctgtgagctgctcctgccgcttcgctccgcgctctcctgccgctccgctccgggtctcccgcgctcctctccccggctcggccgagcgcgctgccccgacgccgccacccagagccgggccgcgccgggcgccgagatgaaggtgctgggacaccggctggagctgctcacaggtaccgcccgcctgccccgcagccggccgccactttccgagttggagcggactccgggcgcggcggccggggactggggcggctcgggtctgagcaggaaggggtgcggaccccaactaagtcctagttttgtgctacctgtttgtgtgcggagcccagccccgggagaggacttgaggttgtggcgagtccctggcgctggcgtccgggctgcgggagcaccg

SEQ ID NO: 5518 - DNA, 512 bp, Homo sapiens
ccggcccaagtcagcgcaccccgccgactccctgcccagtccaaactccgaggctgggcaaggcactggatccacggctggaccgacccggggcagcctctgggtgaacagcagcgtgtccgtcggcagagaaccgagaccagcgagccgaccatgcggctgcacagacttcacgcgcggccgagcgcggtggcctgtgggctcctgctgcttctcctccagggtcactatgaggctcccgcggaggggtgacagggaccgggctcagatctgccaaatgctgcggaggcagaacctgacagtgcgggagggcaggcgcctgggaggtaggagctggtggagatgacagcgtggaactcgtgagccccacgcaacgcctccctgccgcccagggtgggctcctagaagcacagaaatggtcgggctgcgggacaccacagcgaggaaccagcggagtacaggggccccaggagcgccgggacatgccaggccgggtagacagcctcgggtcg

SEQ ID NO: 5519 - DNA, 1070 bp, Homo sapiens
tcgcgagaagcacaaaaggggaggggcgggccgtgtagccaagaggacggccaaacggggaggcctcctctttgtcctcgcagatgctggagcagcgactggcccgggagatccgtgccctggagagaagcaaggagcagctgctctcggagagtgagcctcccgcgccaggtgggcggggggagggggatgtgcccgggcctcggccctgcccctgacgcccgcccaccgacagggaggctggtgcgcgccaagctgcgggaggtggagcggcggctgcactcgccgcctgaggtcgagggcgccatggcggtgaatgacgggtgagaggggaagggaggagtgggcgaggagggcaggggcagggcggaggggaacccgcccaggtcccccgctccgcccccgactgccgcttccccggcctgtgcctccctcggcgtcgtcgggtctccgcgtctcggtggcttcctcctcgtcccctggactctcgctctcttcctcctgtctcctcggccccttctccgcaggctgaaggcggagctggagatattcggggagcaggtccggagcgcccccgaggtcggggccggcgagggagaggtagggagcccgaggaagggaggcggggcgggcagggaccgagtcaggagagagcgggcgggggtcctgggagcggcccccgagagtggggtctgtggggagcagggcggccccggggacagaggaagccgcggtggaggcctagggcagacgcgggcggacgcgaggagcgtaggaacctggtccgcagcctcacccagcccccggcaggccggacctgagctcccccgcgctcgcgacgaggaggatcccgagccgccggtggctgcccctgacgccctctaggccagcaggacccgcccgttcccgaccttccctcgagacccgccaagaaataaaggcgatgatttccgaccatgctcgcgttctccgcggagtctgtgctacaccgtggagcggggcggggcgtgctgggatctcgaggcggggcctctgccggacccctcccaccagtcgagccccgggcgccg

SEQ ID NO: 5520 - DNA, 766 bp, Homo sapiens
acgaaccatcatttaatccgctggcgccgctgctgctgtcactggctaaggccgcggcgaccgacgcacagcagaggcagcacagctggagcgcctgcaagagaaaaggtgacatcgcgcgtgaggggcgcggcggggctggcgtcgggcgccccctgccacccgctctcggagctccgctcggcggcacctgccttggccacgcgccccagtcccgccaggcccctcggcgggcccgaacccgcagccgggaaggcacacgcgagcaggagggcgcactccatggtcaggtgcggacgcggcggctgcgggtggccagacgcggcaggcggagcgcacgggcggcgcgcattctttccgcggccccggagctcggcgccccaggtgcggctccaggtgagagccgccgccgttcacatcgcagcgggggcgcgctgggacctcccctcctccggccgcctgcgcgccctcccttctcccggcgcgggcctgccgagctgcagtttgcggcaccccagagggtacggggggctccctgggccgggactggagcgcaaacggttgggagactgtcggtgtctgcccgcccgtctgtgcgtctgtctgtgtcggtgtgagcgtctgaggcgatggggaagacagcgccagctggctcccccagcgcgccggagccgagcgcccgcctctccaccgcgcggtgattggcgaccagcggctcccgggctcgtccgagcccccgggctggtgcaagggcgtgggattcccg

SEQ ID NO: 5521 - DNA, 363 bp, Homo sapiens; identical to SEQ ID NO: 5294

SEQ ID NO: 5522 - DNA, 2919 bp, Homo sapiens
ccgagccggacccccgcggagcacttatcagggtggctagctggaatcgcgtgtcagactcacatgaaaaactcgggagaggacgggttgtcgctgctcgagccgttttctcggaagccgctgctcaccaacttctcgtatttctccttgtacgcgtccctctcgcgcaccagcctggagatctcctgcttgaggtggtcgacttgctgcagcagctggttcttctccgactccaggacgtgtctctgctgcaccctcttgaagcggcaggactgggcatagccgcggtttttcagggtccgcctcttctgcttcagccggatcacctcctccttgctgaccccgcgcagctgccggttcagctcgcgcacagacatggtcaccagctgctcgtcggagaagcggtcgtcgaagtgcaggccgccggcggcgtggtgcgggtgcagggcgccccccgcccccgccgcgcccccgccgcctccgccgccgccgccgccgccgccgcccccagcgctggccgggccaccgccgcccgcgcccccagcgccaccggccgaggcggccgcgctgcccgcggcgccgggcgcgccggccgtcgggtggtggtggtggccggcggcgtggtggtggtggtggtggtagtgcgggcccgcgccgctctgcgcggcggccgcggcgatcacggcggacaccacggcggcggcggggcccatctcctcgccgctgccgcccaaggaggcgccggcaccggccccggccgccgcggccagctgctgcgccccgcgcgcgtagccatcgaagccgccctggagctggtggctgttgctgatgagcgcctcgaccgcgtcctcggggctgaagcccagcgcctcggggttcagctgctgcgggtagccggtcatccagtagtagtcttccaggtgcgccttctgctcgctgcccgagcccgggctgggcgccgagaagctgggggaagggggcaccgagctgcacggcgtgctcatgggggtggaggacagcgagcccccggcgatgagacggccgcactggctgatgatgcggtcggtctccaccggttcctttttcacttcaaacttcatcagatcgaagtcattaacatattccatggccaggggactggtgggcaggtcggagttgctcattgccagttctgatgccattctcctgccgccgccgccgccgccgccgccgctccgccagatgggctgcaggagaggggccagcgggctgtgctgggtggccagcgggtgagccagcttgccgggctggggcgcttctagcttgcgcggcggtggctggcccgaaacctccgagcgcgctcacacacacacccccccgccctgcccgcgccccccgcgcccgccctccctcccccctgctcacgccaatgtgctccctcgctcgccccggcccctccttgctcgctcgcctccttgcgcgccgagccggcggcttcaggctcgggaagatcctccgcgagctgcggtggcggcggtggtggctgcggcggcgaagctggaggagcccggcccggtgcgcggcgtcccccgctcgccgctccgctgcgcgctttgcataaggaagggctcgcctcgccggcccgggctgcaggcagggcgcgcgcggcgtccgctcggggctggaggcgcggcgggcgtctgtccgggcggcgcgggccttggcacgggggagttaacacttcatgcttctcgcctcctcttctgcttggctctctttattattttttttctttcctctctctccctcgcgcgctctctacctctgtgcaaagtgcaaggcagaggtgcagcccgactggaggagagggaggggggagtttagttctttcttgcctttttttaaaaaagcaaaatagcgaagtcctggggaaagacgaggcagagagcaaaggggggagggggaggccaagccgacaagcagcccgagctacagctagaagatgaaaaaagattttaaagcctctgatccagcaagaagagtttaaagcaattgctgagttttatagcactcgtgacgtcaggtccaaatgagaaattgactggcactccgggccaatgggaggcggcgagagcggccgcgattagcataatagtatagaaacaaggaaacttttcggagctgtcaatcagggcccaatcagctgactgtcagctgggacgggctggcttaacccttcctgcgccgctgcctacccgggagggaacgaggcccggcgcaaagtttggtgtaagaggggaaggagtttttccagaggggcttcggcaatccgggcggacctgggagggcggtttgcttttctttggagcgcgagacaggcctcccatccggagccccagctcgctgggggctcactcggctgggattggcctgattcccctcccctgcctgccctccacccccaggattgtgaattcgcctcccagcttttcctcctcgcaccaactctggtacccaggtgtctgccggggaccttccttccctgagcctggccgtgcccggcgctcaaacttggccccaactctttgtccgtctctcgggcgcccgtgcggggaagggaccgggaagggagggatgcagtggggtgtccggatcggggctgcgggctgggcgccgcccggccatgcgcctgcccagaaggctgggcatccgtggagagggaaagcccattttatccctctctttacaacgaggtaaaataagttgtttagaggccattcttcacggagaccggctgcccgctggcgtcgcgtgcccttggacagagcgagcgcctatgcgagataactccggggaagctcaaagtcaggtcagccgggctcagccttccggctcctgactggccggagtttggcctttgagactcatattgcgcgctcg

SEQ ID NO: 5523 - DNA, 2267 bp, Homo sapiens
ccgaaaaaccggcccccgccccttatccccggccgacccgtccgccgaggtggctgccctgggaacctcctgttcctcgtccaggagaggaaacgcacacccgggccggacgcacagaagccgcaccctggctggggccacaagcctgacagctaccgacaagcccccacccacaggagcacgcgacgtgctctcttttcaagggaaaggtttttcttcctgggccctggaatgggcctgaagtcagccggcctcagcccacagggtgaatgaggggtgggcacagcccggccgcggccccagcacacacgggcggacgcaggggcgggggagcgccagccccgcagtgtgttcggagcccagcggctctgagtcgccgccaccagcctggccgccttctgctccacgtaagtgaagtcagccgtctagggctgcgtttccagccatctgtccctccacagaggctcacacctccctccccgctgttcccacagcctggctcggggcctgcccaacacagatggacgcttcccaaaggctgtgcgcgccatcgctgccacccggctgtgccgaggcccgcggccgtcaggaccccagggaccgcatgccaggcagggtccaggacccccagcgcggaccacctttagcctgcggggcagcgccggggacccgggcaggagggagaggagcaggagggagctctggacccccctccccagaccggccgccgccacctctgcctctcccagggccgccctcggcctccccactcccgggtctccgtcacgcgggccgcggggcctttgttaggaaaaccgggcggccccaggggagcccgcgagactcccagcgcccgggcgcgtcgttcccctcgaagtttcgccgcagcccccgcaggtcaggctctgctcacggggggctgcgctcagcccggatgggtgggcgctgggcgggttggctccaccctgccgtgggcaccaactttgaaaacggcccgtgcgctcggcgcggctgcggcgcagatccgggaacggcagccgcgggcggagtcggggtagagcggcggcggcgcgcggggcggacacggcacttacggtcggggggtccgggggatccggcgggcggcggacggcgcacactcgcgactcggtccgggagtcgctgctccttccagcttggtccccgcctccacgactcaggggcggctgcgcgctgtcttctggcgccgcaccgggctcaggcgcgcggcggggctggggcgcgcggggcggccgcctgggccatgccggggactcggctccggccaccccgcgcgggaacaaagcgcgcaccccgcccggggcggtctccggcctccgcggcccgcgccgggtccagccgccgcgcctgtggctccaacgccgcgcgctcgcccgagagtctcacggggccccgcggcccccgccccgcgcgctccgcctccgcctcctgccccccgccgccgccgctgcgccacctgcctcccgcccggcgcccatggcgctcagctccgccccggggcgccggcctggagaggggctccccgccgccgagagccgcccccaacgcctccgccaccggggcggcgccctaagaactggccgtgggggccggggctgtgcggagcgccgggagcagggagaggggagaggggcgcggggagggggcgacgggcgcgccgcctcctgcggggggcggcgcggggaggcgcaggcgggggcgagcgaagaggttgaggggtgcgggcgccgtggagggggcgcggctctggggggcggcccccgcctgcgcccaccctctccccctccgcaggccgcgcacacccacctcgcagcagtcggcggccgcgggcctcgcagctttagaaccgcggcttctggcggccgcgcgggaggctgaacgggagttggggggtgtggggggggtggggaggtggggagttgggggggaggtcgctccttcggccgccgcccccgccccctgccccgcgctcgcccccagcgcggcgcctggcccggcccggggccacctccgtgcgtggccggcaggggtcgcgctccccccgctcagcctcccgggcgggtccgatgcgaagccctcgcttcccgcgggtcccggggccaggtcatttgcatacactttgcattcatttgcatatcgtgcgtttcatgtccacctgcagaaacgccccgagccgctgctctgccctctccgcactttctctgccggcaggccccctcccccgcccg

SEQ ID NO: 5524 - DNA, 265 bp, Homo sapiens
tcgcggctcgcgtgggccccaggcgcgggatggcggcgtccagcagcgcgggtccgcgcagggcgcgcagcgctgggggcaacagcgtggggtccggtcggcagtggggcgcgggctgcgcggtaagcagctcctcggagctcagcaccagccccagcactatgcagggtacccacgaggcggaggccagcaggcgccgggcccggccaaagccgcccgcagctctcagcacccgcgcctcctgctccatcggtcgcaggctgcg

SEQ ID NO: 5525 - DNA, 374 bp, Homo sapiens
tcggggagggcagccgcccgccctcctcggcgctgggagctttcggctggtactgcgggaggagctcccgggtgacccgcgggttctgaaaccgccgctcgggagctcggggcctgcgctgcgtctacggggcgagcgagggagaactgacgcctttcgcccggatccttctccccttccgagaaccaggtaggtcgcgtttattttcaagtccgactgttttcgcggtaacatttgtgggaaacatcacggtggatcctgtgggtcgctgagttttctgactcccggtttgtcttattttgctttgtcagtgggctctgcgctcgcgttaacaattcgaatgggcacgtttctgcgtttcagaacgctgttcg

SEQ ID NO: 5526 - DNA, 1133 bp, Homo sapiens
ccggcgcgggccgccctcgccttcagctccaatgctgctgcgccccaggccgccccgctcctggcaggccccagcctctgactcagccccccgcctagcccctgagagcagcctctccgcgggactggcctgtgcgcgcgcgtctgcggcaccgtcggaccaggggccgcccccgagcggggagcccaggaggacggccaggtggcctgaggcagaggcgccagggaggatggagaagggacacccagggcctaggcggggtgggggcagggagggcggcgggacagcaaggaagtgggtgcacctgggtgacccagctgcgcatgagcgggcaggggctcggggcgcgcggactccaggcgctggactgcggcgtggagcagcgctggggaaaccgcgccgggttcagcgaggattgctgggcggggcgcgcgaggagcgaagctggccgggggcggggcctgagtcgtgtcggggcggggcctagacccgggctggccgtggtgggcggggcctgagtcgtgaaggggcgggccttgcaggggcggggcctcgaggggcggagcttgcggtgaccagcgagggggcggggcttagagccactaagaagcgggacccagtgagggctaaacgtggggcgccgggggcgtggcgcggggcgcaggtgcacgcaggttggccgcgggcgcgcggggtccggcgggagtcccggggtggtccccgcgtggggccgggggcgtccgcgcgggcggggcgaggtcggggagggcagctgcccgccctcctcggcactgggagctttcggctggtactgcgggaggagctcccgggtgacccgcgggttctgaaaccgccgctcgggagctcggggcctgcgcggcgtctacggggcgagcgagggagaactgacgcctttcgctcggatccttctccccttccgagaaccaggtaggtcgcgtttattttcaagtccgactgttttcgcggtaacatttgtgagaaacatcacggtggatcctgtgggtcgctgagttttctgactcccggtttgtcttattttgctttgtcagtgggctctgcgctcgcgttaacaattcgaatgggcacgtttctgagtttaagaacgctgttcg

SEQ ID NO: 5527 - DNA, 2358 bp, Homo sapiens
acgacacctcggtctgttgccatggaaacaggggcggattaaggctggagcgtggagcgcagggatcaggcccctcggctacctgagctcccgcctcagccgctcccgcagggccggggcagccagccgcaggcgccgcggcttctcagcctcctggccgggccaggcgcgggggggatcccggcggggcgccacagcctgctcgggcctgggaggggagaggcagacgcagaggctggaacagctggtggcggggcccgtgggctcccggcgtgatcacctgccctcccagggcccgggggacggcgccccgcgtggcaaccacgtgggggcgcggcgggacttccccggtgcccgcaccaactttgccgcgctccgtaccgggccgggctgctggggcgtctagctacggtggtcgcgaagccagctgtcctcaagttgagctgtgcaccggtcgcgcacactggcggcacggctttcgcgtccctccgctcccagcataatgaaagtttgaggaactggacatcaggcgctggccgctccccaccctcagccgctgggtgcccagagcccatccctagcgatcagagcagaactgcagagaagacgtccgcgtccgggccccgtctggggagctagggcgcgcggggagcgcccgggccgcgcggtcactgaccgctggctgcacgggggcgccgtgcggactcggcctccacaaagcggcagaagcaagggcgtgtgcccgcgcagggaatggaggctgcaagtgcaaaactttatcccagcaaagcaaaggtcccaggaggccggctccccttccaccaccggccgctcactctggtctccgactgacccctccgggccggatctctaggcctggccactcgatccatggagaaaaccccgtgtctcacaactggccgctgacgggagctgagccccagcagcagcccctcggcgggtgcgcccggcaaaacccaccagcccgccgggggctacttcccagaccgggagccccggcgccgggcggcgcccgggctcgcggctctttccggagcgcattcaacttcaacttgcccctgcggctccaactcacctttgcgaagcatgttggccacggggccgccgctccgaggtcggcctaggcgcactccctcccggggtccagattcaaatccctgggcgccagctgcagctaatccgagcgcgtcgaggcgggggcaagccggggatccgctcgtgcccggtggcccggccccgcaggggcatggtgagctccagccccgcgccgagggcaccggcgcccgcaagcaaccgtggtgctgcccggcagccccgcgcgcttgctcagccccggggcgagcggcttgctccgcggagccggcggcctgcttctgccacccggagcacttcgcaggcggttttgaggggggacgccgccccctggccggccggccgcagccccctcctctccgccccctcggaccaccgccgccgcggctgcagcaaaagggcgctcgcacgcaccgccgagctccggggaaagcgcccggcgcgcgtttgcaggaccgagcgatcggcggagcggggcgcctcccttcctccccccggcttccccctcctctcctcctccctccctcccttgctctctagctccctccctctcgctccgctccccgcccccgctcacggagcgcctcccatacaaaatttatgaaagtgctctcagctcgcagtgccgagcgccgtcctattcccaaggcagcagcgctcagccgcgcggcgccgcctcccaaggtgttttcactgcgcccgcccccggggaagatgctcggcccgcgtccgtccaggcacctgcccccagtccccaagccggtcctcggaccactccacgcccctccccggccccgcaggcctcctggagcccgaacccgcagcccagcccccgcccgctcgcccttcgcggctggaggtcatcgggagacgcggctgggacgcgaggaccgccgcccagagtacggatcgcgagtccgctccctgccccgtctcctccctggccagcgccccttctcccagtctcgacggctcttccccgcactgaacagctccagcgaacccggctgccccgcaccccgagtcccaggacactgttctttcgtggggagaggaggggagcaagcattcggaaagggccagctgcaaattccagggagaaggaaggacccgtgcgggttcgggtgggccgtctccgcctgggtggggtggcggcggggggtctctgatctcccttggtccacacagaccccgccggggggttcgcggaaaatggaggaggcgccgcttggaaagcgggtcccg

SEQ ID NO: 5528 - DNA, 1050 bp, Homo sapiens
gcgcgcgccccgggagagctgtgctccccgcgaaatccgtgcgctccagctcagggctcccgggatcggtgcccgttagtgggcacaggacgccgggtgtccgaagggctgcctggagatgcaactgaccttggcgggcatcagaatgacgagtggcagcagcaggagcggggtgacgaacaagatcacgaaggacttgaacttggagacatagctcagcgccgaggccatcgcgcgggagggagactggcgggcgagacgagtgaggggcagctagaggcgccgcgggcttaagaaggggccacagtccccggggattggggagggggcggtgacaactccgccccgcacgggggcgcctccccgcggccctggggcggggccacccctcggggtctgtgggacgcgcctgcccccaattctgccacccggcggcggtgggaggcgtctttggactccaacgcttcgggccagccctctaggggcagcctgggccctagcatctcgcgctgtccaagcctctcctgcgctgccgaggcagaggtgcgtcccggggctgccaagcggggcgtgttttggtcactggtgctgcccgctttggcgtaaggcgccctcccgcgtccgcatctgctctttcctgggctctgaagggtcccggatgaaactctctgcaggcctctgggtctctcaggtctatctccccgatctccctctcctttccatctccttacttccgcccctccggtgtctctccgagaggtgtccccccacgccccgcgccctccgcaccgcgggcctcgcttcccggtcccccctggcttcctcgccacgtccgccccactctaggtgcaggaccccttttccccgctcgcactctccggcccggagctcctgggcgatcgcacagggaagcgaggccactgtcctcctctgtcccaggggctgtcgcgctccagtggacgctgcaccccgcagacgcccggcgggcagatgcggacacgcgtcttggaggggccccaccgagcctcagcagccgcagctgcccgcccg

SEQ ID NO: 5529 - DNA, 1731 bp, Homo sapiens
ccgggcccgccccgctcaccggtaccaggcgaggcccttgtcgtagctgcggtcgaagaagtggggctcggcgcccacggcgcgcacgtcggggtgcacgcgcaggaactccagcagcgcccgcgtgccgcccttcttcactccgatgatgatggcctgcggcagctgcttgctgccttcgtccaggagcagcgccagggtccccggcggggcctcggccacggtgcttccggccccggagccgcccggaccccctgacaggccaggggactcttcttcccaggccgcctcctcgccgtcgtcgcggggcgcgggcggccggcgcctccgccactgcggcagttgcaggaggcgctttctctgtgccgccgccggccacaccgccagctccctcgggcctccggccaggacgccgccaccaggggcccccgcctcctcgccgccgccggacagccccacgacggggccggacagggtctggcagcgctcggccaggcagtagaagacgtaaagggacgtgagcagggagcagagcatcagcaagaacttccggaagatgctgcgggacagcggctcggccgaggtggagagggcactggccgggcccggaggggccatcctagccggaggcgacgtcgggcaacgcgccggccatgctaggcctggaccccgacaggtgccagagcatccccccggcgggccagcgcgctggacggaggccacatcgccgtgcgcccctgtggccgtgcgaactgtcccgggaggcagcggccggggctccgcggggaaacggaatcccgggggccccgcgcaggatccctgcctccagtcgagggagcgggaaggggaacgcgggtccgtgcttaagaaaccatcgtcttagactcgcccaagtcctgagcttggggcagccttggcccctcggttccccgcaagagtcgccggaatcggggtcttggcagcggtgtcgaaggcgtgcgtctcagccccggccccgagagacttctcggcgcggatctccgctcagcgatcctgcatcactggctcggtccccgtgagggcacgcgcggctgccgggcctctgcgctccgtgcgctccagacagtggcgagcgacagtgacttccagccccggctttctctggtccccttgcccgcctgggcgcgttctctccgcccgagttcaggttctctcagccaaggagcgaggtccccccgagtccctctgcccgagcgggagacaggaggcccgtgcagagccgtccacccctctccgtagcgccgggttgctccaaactgctcttggaccccacctgtgagccgcgtggctgggctgggctgggctgcgcgggacctgtcagcggcccccgccactctgctcgcaggcgctcaccggctgcctcctgggccgccgctggccgccgccacacgtgggacgccgagggcagcaaacttgctggtgacgtcaaaggcccgggccggaccagcccccggacgagcgcagcggggcgcggaccagcggccaggcggggccagacgggcggggtgggatggagaaaaggtggcgcgggctccgcagcagccgcccaatggcactggagagggcgggggcggcaggggcgacgccccttccccagtgtcccccattcctccccgcggcttcgcccccttccagtggatccggtgtctgcggcggctccggggttgcctgagtgacagctaaggccggccg

SEQ ID NO: 5530 - DNA, 3535 bp, Homo sapiens
ccgcccctttgggcccgccccttgttccgaagccaatagcaacccctgaccgccctacaccgcccagaagcctttccacaccccctcgtcctgggagcgggttggctgctgagctctcggagaagcgcctgtatttgcatggcgttcggggtttttggtaggtagagcagcccgtcactctggaaggccgggaccgcccactccacctcggtccacagctctcttcctgcgcagttcgcctctgcagcctctgcggggaagtgccggggctgctcgaggctcagttcttaggactgcaaggaggcagccccggcgtgcggcggtgcgcacagtctagagtggccagggcgcgagagtgcaacgtcctcctggccccgagcgcgtcgtcgcgccccgggagcagaccctcgcccagcagttaccgccgtcccgactttccgttccagttgcagctcctgccgggcaacatgtcaagagccgccgccgctacagctgccgccgccacctggggaagagcagcagcagcagcggcggccgcgggcacacgggggcaataaaccgagccacccgggcgtccagcgtgccggggaaccctctctgcgctcactgcccggcgggacccacgccatgtgctgagccatgtccctggccgcgcccgcgggcagcgcatggggcagcgcctgagtggcggcagatcttgcctcgatgtccccggccggctcctaccgcagccgccgccgcccccgccgccggtgaggaggaagctcgcgctgctcttcgccatgctctgcgtctggctctatatgttcctgtactcgtgcgccggctcctgcgccgccgcgccggggctgctgctcctgggctctgggtcccgcgccgcacacgacccgccagccctggccacagctccggacgggacgccccccaggctgccgttccgggcgccgccagccaccccactggcttcaggcaaggagatggccgagggcgctgcgagcccggaggagcagagtcccgaggtgccggactccccaagccccatctccagctttttcagtgggtctgggagcaagcagctgccgcaggccatcatcatcggcgtgaagaagggcggcacgcgggcgctgctggagtttctgcgcgtgcaccccgacgtgcgcgccgtgggcgccgagccccatttcttcgatcgcagctacgacaagggcctcgcttggtaccggtgagtttccctgccaggggcagggtctccatcgtcgattcagaccctgagctaagggagacatggcgtatgatagggaattggcagggttacagcttcggaccacccggggtagggcagggaaactacggcagattgcgcagcgcatcctgtccgggtgcggtgagggttgcgctccgcttggttctcgtcacaacccacagaaagttctcgcggagcactggtgcccttgaattcatcaggcgacctcgccgcaaagaagaagggcagcgactgagaccgccctcagcaaagcgagccaccctctaaccatgggggtatccgactcgaatcgtattttatgactcgttttaaattttttcctcccggagcccgagacgctgggaatgttctgagcccctttggtcggtctccgccctcaaggaacttctagagcagcttctgcttcccagatggggagagggggtgggggccgcggcgtcccggcgaggccgcagagtctgttaactttttgttacagtccgcctggttaccggaaccccaagggtgtcagacccgcctcgctcgcgagccgcctgggctcgggagggtgagccgggcgggtggcccggcgcctccgcctggcgggcgggcggcgcgcggagcgtggagctgtgctggtccctgtcgggcaaaggcgcgcactgcaaccggctggagcggcgcgaggctttgaaggcgtccgggcctccgggcaccgccgcccgtttccgcctccctgccctcggtgctgggatagggaaagcaaggacgcgtgtctccgcggggcttttacacgtccggagcaaagaatattcggggcccattgattgagaaatgagggttgcttcgaggtcgcggcttccggaaattctgttctcgagtcgggttgcgggtcaggttccaaagggacagtggccccggggtcacaatcactacctctgcccactgctttccgcagctgctggtctttggggtgagctgttgggttgcccgagcttcgggtaaggcgcgagtgggcaggaggtctagatttcggcctccgataactgtcttcgactaggggcccaggtaacgacccccacattttcgttggggtctccacccgtaaccccagccagcacgacattcagacacccctccaggcccaattagcttcacagacgctcaagacttgggaaaacaaaagaggagaagataactgaacccctctccctgtgcccaccccactgtcgggacctgggtgggttggagaataaaagagggctgaccccgcggattaaaacggctcccttcccagcctcgtcctaccccttcccctttgtccttaatggttttttattattgtcaggagttgcccaagtctcgaggtttagccaaccgtgacagtcatctttcccaccgttcccgggctgtgacccattctcgggacactggtggataagaatggggtctctggagtccgacgcctggattcacgtcctggctagtcgcgtgaaccttggtgctctcatctgtgcagtgggaataatgcaggttctgggcagggatgggaagagtgaatgcgctggtacggtaaggtgcctcgcaggcacgtgagggcctctctaatcgttagctattgtcaccgattgtattgttatgacttctaccaccaccactccccctcctcctgggatggtgattccagggccaggcggcaggctataactagcgcccttccaggtggaacccgccagagccccgaggcagcctaggattttctgagatcagacacacttgggccgggttgggaggaactggcaggaaaaggactgaacccttaatgtcaggcggttttgaagcacctggggcaagctatggaaatccccacaggaaggctcacgcagtctcttaggcggctgccctccacctgccacgttctttttgattgactaaaaaacgctgaatgaagaacgaagtcgcgtggaaaccctcgccgcgcgcctgcagcggacagcgcagcccgggaggttcggctgccgacttgcgcccgggggctgcgctgcgagcggccacgcatggcggctggacccgggcggccgcaagggcttggctgggccgcgggaggcgggaggttcttcgtcctcccgagccatctccctgaactgacaagcaggactcccgggtccagggggcacagggcccggggcggtgacccggcggatcgggctgccggaggagcccactgtaaatgccgcaactggccccaaacactgcgttcctggactgcaccagcagctcctggcgcggccg

SEQ ID NO: 5531 - DNA, 2896 bp, Homo sapiens
gcgtgggcggtgagcggccgggagaggggcgggccagctgagcgctcaatcacagccccggggctcggcgcccgccagctgcactcagaacccccctcaccgtggccctgccctgtggcgcctaattacgtgcccccagggctctggagcggctgctgggactgcagcgaagaggggcccgcgccacctccgccaggctccacgcgccggccttgagtgcgctcccctcggccgccgggaaacctagaggcgcggtttggccccaaggtccccggtcccgctcttctttgtctcggcctagttctcggctgtctccgggccgcgacccacctctcctggcggtccttgccgcatgcttctgtgctgcgccagaatcatcgagtctcagttctcgctgccttcccggccagtaggcgtctcccccagctggggagggtcccccaaaccctgtgcttctaggaccgcggggccggcaagcggcaggatctccaagctgcgtctctgatgcggctaggggaggcgcgcgatgaaggcccccctcttctccgccttctctctacgccccaccgctactacacgtcgcgctgcgccgcgaccccggcgctgcctgttggcgccttaagcggctcttctgccgcggtgcgatccccgacgccaggaggactaacccccacccgccaggcctcagaccccacgcagatccagccacacacgcaaccgcctgcagatacccaccacagccctttaagttaacccaaagccccgtacaggcgcactgcccctacatgcgcagccccacggccccacacacccaccagcccactcgcaaacaggcccacatggccacacaactgccctctggacactcagccccacgcaggcacaatcccatatacacacaaccgcacacaggcgcaatcccacccacgcagtacctcacggagtcacacaacccccctataaacaatcgcacagacacagccccacgcagcgccacatcattcagtcaaactgagacccagaaacacattcactagcttgtatccagacccccccccccaagccccgtgacattcactcgtaggacagaccagaaatatacagccacattgatacacacacggacctaaacgcacagccaagacctcacccgcaggctcgtaagtcactggaaaaatattaaagcgttccctccctcccctcctctatctttgacatacacacgcctgcgcgcgcgcgcactcttacactcacaccccccgtccctaagcgcgtcggagcctcgcagcgggtgaccccgaggccccgcggtgagagccaagggagcgtctccccggcgccccctcctcccgctcccttcccgagctcatctctcgcccccccgcccgcctcctccttccctgccccctcctcctcctcccttcccccgagtctggggcgcgggctgcgcgcagccaagccccctcatcgcgcgcccctccccgcgcgcgccccgcgccagcatcgcgcttaccgagtggatgcggccacggggccgtctctaattacctcctgacccccggcggcctgtgaataatggctactgagggcgctcgcaggggctgctaagaaggaaacgcggggcgcgagaggcgcggcgcgcgcgggagcgcgagggaaaggagcgagcctggggccgttgcaagcggctggcgagagaaaggattcgtgcgagcgctcacatttgtttctcccaaggatctcatctggccaccgcgttctggaagaggcgagagggagagcgtgcgcgagaggagagagacggcgggggaaagggagacggcgagacgcgcagcgccggcgcccgggagacccaggaggagcccgcaggtattgttggcggcggagctttgtgttttcggcgggctgctgtgggcgccagggctccccgagcccccggcccgccgccgcgcgcagacctgcccggagtccggggctgcaggctggggtcgccgcccgccgcggacacccctcccgcggcgccaggatcttggctggagttgcggatttgcatgtttgggggttttccacgctggttgagggaatcggtctcagaagaaggaatttctttctttcctttttttttttttttttttggccgcttttggccacagtttggttgtgctggggattcccccctcccctttcctccacaaagcattggtgagcggtcttgacgaatgtggtattggcggaaggcatggggctgagatggcggggctggtggccacggatggggaggcgagagatgccagagaaggaaggagttctgttcaagttcgcaatctgcgccccgaagctggtcggaccggggagggcgatccgcgcgtccgatcctgctccgggcaaccgatgggaaacttcccgagagcgcggcctccctggggactcggcgcccctgacgcctccaggcgcttcctcgggccgctgcggcccctcctcgccgcccgccagcgcttaaggtcgcgctctccccacccccgccttcctcccttcctcggcggcttccggatctggacagagctgcaggagtggcttcaaacacttcccctggagacccctccccactccccgcacgagagcctgcccagtggcccccctgccctgcgccccagtctcacgcgcggtcgagtggccaggctgacaatgaaatctcgcacctctgccggggggagtggggtggggaggaggtccctcctggggctgctgaccctgggcctcgggcagggggagggggctcctgggggaggggcttgttttggttagagacgtcgacctgggatggcgccggggcagggagggggctggggggtgggcgcggcgaaggcggcaggcttgggttcgcggccgggggtcg

SEQ ID NO: 5532 - DNA, 2567 bp, Homo sapiens
cgtccccaacgcgggagcgcagtgcatcccagtggacaaactcgagaaccgcacgctgctctccgcctccacctctgtcctccccgctcgcggttccaacccgggacccaaatgcacgagctcggtgaatgccccggcaggagggcgagggctcagaggcagcctgcccagcaaaaacgacagctgtgctctggtgggccctgggccaccccaggcagaagccagagaagcccgagaaccccggcgggctggcaaagtttgccgagaagggtctttctggacacccccaccacgggctctaggctcgaaccccctcttccatctggccctggagtcccagacacagacaagccccgggcgcgccggcgggcgtatgtgcgtgtgtgtttacagcggggtggccgccggagctccccaagaaccccagctctcccgccccagctgcccgccagctgtgagcgcccgtcgggcccggaggtcacccgcaaacagctgggtcggcagctgggagcctgggaggcccctgctcagccccggggccccgagaaaggagaagggggagcggagtggctgtttggctgtggtttcctccaactccgcctgcgaagctctcgctgggagcccggagctttagctttccccggcagccccggcccccgcgcccgccgcgcccagcggccggcgcctcgccccgggccccggggaggaggcgcgccggggcagccggccaggacactgcgctgctggctcctagagctgcgggcgcgcctggccggccccacttcccgggttgctggggcgggcgccgctgccccgaccccggacgcgcggaaccctggagacccggccgctccccgccagggccgcggtgctgctccaggctccgggcgggcgcccctttccggctaccggtgcaccccgttgcccgcttgcgggaagcgaagaggggtcccttgatttgcaacatagaggaaagcgccgcttccgcccagcctggcacccacgcgcccacacgcacccggcgccggccgggtcgctcacctgagtcctaaaagctgttgaatccacatggtcacgtttcggggagcggggcctcagacctggctcgcccaggccatctgcgcggcgcccgcgcccgctcgcttccgtcccgcggcgccggtctccggctctcggtccgccgcctcccgccgcccgccggccgcggggcgcacagcgagtcagagcgcggccgcgcggggctccatgccggccggcgcgccgccgccgttggggcgcatggctcaggctgggcggcccgcgggggcgcacatcctccggccggggcgcggggctcgcggccccctccgccggcggcacagcgaaggcggcagcgaggcggggcgtgttccggcgctgtcgcggcgcagcaaagggctggggagccgcggcttcgccctccggggcggcgaggagggaggccggcggcgctgccgctcacggtgcgtgtctcccggcgcgcggctcttgcctccagccggagctccgcgccgatggggcggcgctgcttagggtttggggtgacgcgacgcggacggacgcgagtcccctccgcgctgccgggtcggggggctctgccagaggctccgccgccgatcggcgccactcaagttgcccgggggctccgtctgagcgctcgctctgcagacggccgcggcccggagactggcaggaggcgggcacgagaggcgcgcggggcgagggcgccgtggagcgcggggcgtggggacgcgcggcggcggcgccgcgcggaggaggcgcgcggggatcccggggccccgccgcccgcgcccaccgcgcccgccgcagagccgcccgcgctgctcagccgcctccctcctcgcgtctgcctctccgcgcgctcgcccccgcctcccggagccggtcccaactccgcccgcccggcccggctcacgtcacccgccttccccgcccctcgaacgggagctcgagcccctggcctggccccggctcctgctcgccgccccaccttgcgggggccggggtcgccgcgggtggtggggggcgctgtgcccagcaggggcgacagcgcaggcggggcctcctgcagcccccttccccatccccggtcgcgtcccggtccccaccttgcgaaaggctcgagagaggccgcaggctaggattggaccgccgggcgccgccggatggtgttgccagggtaaccggatggcacgcgaagccgttcgaggttccgacccggttacgggggcgcccagtggacccggagagctactttggggagggggcggccccgaagaaggactgggtgggggcgcatggagcgggggctgcgcgaaaagtttcctggggcggagctgagccacgcgggccgcgcaggagcgtctgtccgagggtcgcctacgagggactcctctgctcggctgcgcgggcttctgcgttgatgaagtcaccgcgttccgggtcggagcttcggcgcttctgccccgaacccagcgaagcccggtcctatgcccccaattacccaacggtccctcatcgcccagcgc

SEQ ID NO: 5533 - DNA, 573 bp, Homo sapiens
cgctgtccgccgggccggtggcgttcaccccgcaccgcgctgccccgcccggggcactatggcctggggctggactatgccctccccacctcagccggcgccccccacccacgcgcgctgagggtgcggtgagctgagtgcggggccaagcatgttctggcgtcgacttcgcccaggggcccaggacctggcgcccaaggggctccctggcgacggagacttccgacgcagcagcgacccgcggctgcccaagctgaccccgcccgcgctccgagcggctctgggcgcgcggggctccggggactggaggatcccggggggcggcgccgcgtggtggccggaaggggacgccaagcccggggtgggcgtcggacgcctcccgccgcgcctgcccgccttgctcaccgcgacccggcgggccgtgcggaagcgggggctgctgcggtccctgctgccgcctcccctgctgtcggccggcgcgtcccgggaatcggcgcccaggcagccagggcctggagagcgcgagcgcccccggaggcgcgtggccagggaggaccccgacttcttgggcgc

SEQ ID NO: 5534 - DNA, 383 bp, Homo sapiens
cgcccgtcggctcctacaggggcgaaatcaggcacccaccgtgacggcgagcgtgacagcgtccggctcgaccttgcccagatgtccacagaagatggagctgacgaggctgattataaagatcatcaactgcgcaagaaactgcggaggcgcggaaagcaaggcgcgttcacagccgccctccctcctggaagcccgcgcccacccctgcgcggcggccgctccggaggcgtcgggctgggcgtgaggacgccgcactcaccactgggcccgcgagcgccgccagctcagccgcctccccccgcaggtccgggggcagcgcaccccgcaggccccacaagccgtcacgccatccgagggcccggagccgctatgggggccgg

SEQ ID NO: 5535 - DNA, 853 bp, Homo sapiens
cggcgcggggtgaggtccgggggccgccttattgctgaggtccggccggttggggccgccgctaggcgcgctggctgggcagctcctgggagatgaagcgacgcaggcgctccaggtactggctgtagagctcgatgtcgttgtgcccggcgccctccacccacagcggctccaccgccttggggcagcgctcgtagagcgccagcccgtgcgagaagtcgatcacctcgtcctccgtgccgtggatgatgagcacgggcgacgtgatctaggacaccttctcgatgctgcgggaggggcgtggagcgggtgagacttagcgcccggcccgggccccgccccgcctccgtccccgccccgcctccgtccccgcccgggccgctcacttagggaaggcgtcgaagcagtaggtcgtcttggtgtcagggaaggcgacgcgcatgcccgaggtgagcggcgagtgcagcaccaccgcggcacactcgtagcgcgaggccaggtccacggtgggcaccgtgccgatgctctgccggtacaggatgatgctgtccgggctgatgccgtacctggcagcgccggagcagggtcagccgcggcctccgacgcgcgcacacccttcccaccagcgggcgtccccgggcccagctccggatgcgaccctccagtctccccactcagccaagtcagtgggtcaggcccaggctccacaccagtcccgagggccacccccagcccccaacaccgcggcggtgggcgaagccagcggccccgccccgttccctgcgctgccgttcactggcgtttcctagctaggatctgcagggatctcgcctacggagtgcccctggggcgg

SEQ ID NO: 5536 - DNA, 1062 bp, Homo sapiens
cgaggaaggaaggtgggcgcagaagccaccctaggcgtgacgcgtgacgctcggggcacgggcgccggggggcggaaagcgagggcccggctgggccagggatacccggggggggccgaggtcctgggctccggcggagggaggggattgggagggaggccaccgcctcgggccacgcgggtgacccggcgggggagctgggggaggggcggcggggctgggctggggtccccgggccgggactggggtcgggccagcttacctcctcgccctggccgaagcgcagtccgagcgccgcgacgcgctccacgcgcaggaagccgtcggggtcgcggccgcacacctcgaacacctcgcgcaggcggcgcacggagcgcagcagagccgcgggggcgcccgaccagcccgcgccgcccgccatccgggccggcccgcagctcagcccggacccctcgcccgccgcgcccgccgcctgcccgccgccgccatcgccgcgcgccctccggggccgcccgtctgggtctgcgccgcgcagcctccgcccggtggcggccgcggccgatccgtgtcagcagcggcgccgcagccccagccgctccggaggggaagggaggggaggggagggaaggagaagagtggggaggggaaggaggaggggcaatagggggcggggaggggaggggcgggggccgcggcgaaaatgggagggagagggggaggcggcgggggcggcggcggcggggacgctgcagacaaaaggagcccgcgtcctcccgagtggggcggcccacgcggggccggcaggcgcagcgagctgccaacggccgcgtcctccgcgacctcagtttccctccgcgtccccagtttccctccgcgtccccgagcccaccccttcctctggacacccggagccacccaaaggccctgccctgccggaggattccgcggggtcgcgcccctttccgctatccgtgcccgctgccgcgcctggcgtctcccgagcgctcaggatgtcctgggggcctcctgcattggcgcgttccgtgactgcattcatcccgg

SEQ ID NO: 5537 - DNA, 918 bp, Homo sapiens
cgcgaagtttccgcggcggagagcgctgcgcggggagacaaagggaagggacagggatcgcagggacagggacaggagcggctgccgggctctgggtccccgatcgccaccagacatgtctccgagcagccgaggcaaagggaacggatgggaaaggaaaacagaggagcggcccagaagggcggctcgctgcggtggtggggcgcggactcgggaactcggggcgggcagggcacgggcgcaccccctcctctcccctccctcgctcgaggccggcagcgccccccgccccgcgccatgcacacccattgtggtgatgagagctcgcgccccgtgcccgtcacggtcactgtgcgtccaataaaaacaaacactgccgaggagccgccgcgatgcggggcggacgcgcggcccggaaaggggagggggccctaggaagagctacacccgcgagccgggcctgggccaggggcgaggggagagcgccaagactgccccgccgccgagggcgccgatggaggcacaggggttcccgtggggcgccccgagagacaccgtgcctggccggcgggacgtgggctggcttctcacccgacggagagaagcggcactctcatcttcgggcaccgggtctgggctccgagcgggggctcctggaacacaaggcagtgggggcagacgggcctgggcccaccccaggctgggaaggggtctgagcggggcgtcctgactggacccggccctggcggaccgaaggctccaaaagatcttgcattctcaaagacttctgcagatcgtcaccgcctaaggcgccccaggcccggctccactcatgggaagggtaggaaagaaagctgggagcgctctggggcgcggggcagagacagcggtgttggaggcgcgctgtggaggcggcgg

SEQ ID NO: 5538 - DNA, 865 bp, Homo sapiens
cgagttgtgccggcctccgcgttctcctcacctcccctctcctccggacctccgccccctcgcggagaggccttgccgctttaagagccgggctagcgattgacaagcaataaacgctgagcgcccggctgcgctggagccgcccggagctaggggcttcccggggcgcaggtaggcgtcccccggcccccgggccagctcctatcccaagacctccgccttcttttcgtcctgacacggcacttaggaccctattcactgggtttaaactccacaggcccctttcacccaggcccgttccctccctgtccacccgcccccgcccctgggccctctttctggggtgctggttgggagaaccaagccccgctgcccattgacactggtccccgcccctgcggtaggggctccaaagtggcttcaggcaccaaggtggtgagctgtgaggggccccggtatctgcgcggcctccccgggggctgtgcgggttgggggtacttagaagcccggcattacgtaagaaccgtgctgttagcgcttccgggggttggggagcgagacagaggttgcgctgggtcccggtggccccctggtccccctaggcagctaacaccacaatcttccctgggagggggtccgcagaagggcgcgcgctgcttctcccgcttcccaagctgtagcggggcgggtcgggagccagggttagggtctggagacttgggaggggaccggtgccagaagcgaagagctagggttagaaagttaggtcaattaaggggggggcggtgcggataaagacggggtgggggttggccggggcagtcatttagtgacctcatccctggtctccggcgggcgcgcacgt

SEQ ID NO: 5539 - DNA, 408 bp, Homo sapiens
cgaagcggggagaatccggctgggctgacggagacgccacaccgcgccaggggagcaggagctttttcggagcgggaggcggggcgccgtgtggctgcgagcgcgcctcttggatgccccggccggcgcgggggtgggtgggcgctcccgccccatccttggccccgggcggccagccgcggtgtgcccggagggctctgcgagggctgtgggtggcgggcgagccccagcggcgtagcagaggaggggcccccgagcgagcgtactagggagaagggggtccgtgcaaatcccaggctgacgaccgcgcacgcgcccctcgggtcaccagccctgtcgctcttggtggggcacaccgaggagaccgccgtggggaaccggggaccggattgcctgacagccgagcgc

SEQ ID NO: 5540 - DNA, 2245 bp, Homo sapiens
cggaccctgcggagtcccgagccccgggtgaggcgatgcccagactggcgcgaagcggggtgtcccggcagcagcgcagaggcccacccgcctctccggccggctgcagcgggcgcgcctataccctgcaaaaccaaaacgctctggaaagcgcttggggctgcaagtgacgcctgacacgagcggcgggccggactgccggcctcccggcccttccctggctcacacaacccgcgggccgcccccaccgcccacgaacttcagcgggcagacgctggacgtgcggtctggctactttcctaaactccagcgcccgatccgcgtcgcagggtcggccgcgcagcgcggggatcgcgggtgcccaggctcggagaacgagcgtcgcgctcccagccgcggtcggggaacaggaactgccgccagaggcaccgtctcctcccccgagactgcgatattgatcaagggctcgcaggcgcgggcggcattcatctctccggactcgcagctcgccgcggaggggaaggggcaggacgcgctcccaagactagggcgggggcgtgcggagtcggggagctgtttgggggcgctggggcgaggtgggaaccccgcttcagagtctccagtcccggggccgaggtctgcaggaagggcgtgggaggtggaacctcccctcccctaggcgtctgcccgagagcctagagcgattcttggcgcggagccggctacccgggtgggcggaccccctcctccgccaacatcccggcggcttcgccacgatttcttttctcacctgagtctccccctgcctacccaaccctggctccaaaggtccagagagttaggctgccccggagcccagccttccccgacctaagcacggctctcccagcgcccccgcccccatcacacccacagcccagccccgtcccgcgtccgccaggggccgggggcgccagcgctcgagggatggccggcgggctgttaccttgacgagacggagctgcgggtgccctcccatcctcgggctcgctcggctaccgtcctgaatgcccgggtcctacggacatcccagagggaccggcgggcggctgcgggctcgggcggcacggggtgggcggccgggctcctcggtcgctgcctggtgaggagatgcccggctcggcgcttcccggccccgcggcccggcccggcccggcccggctctcgctcgccccttcccggggaagtctggccgccgtttcccgacgcagcccggcccgcggccgcctcttgccggcctcgcccccgccacctcccccacggtccgcgccgctcctcgcctcggctccccgccccctcgcccagctcgtcccctccccttcctccccctccctctcccctccgctccccttcggtccctcctccgcgcctcgcccctcggctccctcccagctcctcctcgcctcctccgttccctccccttcccccggcccgctctctgtgtcccgccgccaggatcccctttccctgcgcccggggtttgcggcagtcctcggggcgcgctggcagcagtggcggccgccgcagcccggggagaagccgggaatgggggaagggggccgcggtaaaggatcagcctcccgcccggccgaggtcggggcctgggaagtcccagggatctggggtgacttgggccagggtgctcaggtgaatttatgagggcgaggctattgggggctagggaacagggcggtccctactgagcggagccgccgcggaacccagtgaggctgcgacctgcgtttgggcagttcccgccctgcggctggctaggaggagctcctcgccgcccccattccagccgcgccgggcgctgggcccgacccccagcacctttggcactgatgtgcctggtgcgcgctgagacgcgaacgctctgcaagatgagcccttattcattcgttccttctttccttcatttgttcatcttacaaactgagtgcctggccactttggttcaggcaagaggctggatctgggaaccctttggacctgggagccccaggatgaaagggagacggcggtgccctgcaggacaagcgggcactgaacgctgcccaggggaaagccgggcgcgcattgcgttgcagcgcggcgaacgctgctaggagcccgcgggcagggcgtggggaggacacagcgccccctcccggccggccgagccctctgggcagcggtgggcctccccgccagaccccggggccgt

SEQ ID NO: 5541 - DNA, 2972 bp, Homo sapiens
cgattattcccgcctccccacgcggtcccccagggaagaagcgaggcgcttgagccagactgggctggaacagtgcggtaggggcccgtcccccgcggagctgcctccccatccaccatccacccagctcagcccggccgctcacgcacgcccatttgctgccctcgttccatccctattaggcgcattagccagcccggcggctctggttacagacgtctgaatgacaaagtgcctccattaccggcgcggcccgccagccgacccgccgggacgcgctctggtttcagccctctctctctcaccgcggcccaggaagaaactcggaccgcgcacagccatcccagaccgagcagccgcgcgccgaggcggaggcgggagccgcaggggctgcagacggcaggttcctgtcggggtacaccttcccaagcgcccaggtcctccacgcccagctcccctccttccttgggtcttcgcgcggggaccctcgctcttgcccagacccggagcccaagtcgttgcccctctgggatccggtccctcctccccgctctcctggtctacgctcgcccacccgcgtctgagcagcgtctctaaccagcggcgttagtcagcagacgtgcccgcggtcgctcccaaatccccggacgcagccacaggtcctgacagctccagggaactggggctgagctttcgggctggggcccgcacccggacagaatctctgcccacctcacccgcaggctctaccgccgacggactctggggacagtgtcaaccccccccgccctgctgggaaacgcagccgtgaccccgagctgggacagcggctgccccctgaaaaggtgggggagtaccgagctgggaatcaggtcggggagtctagccacgactctggcccaacttgctgtgagatcttggccaagtcgtttaaactctcagagcctcagtctccgtatctgtaaagccggaatttggggcgcagtgctctgatgaaagatgctggcggggagagtgaagacgcctcctccgttgccagaccttccagggcattcggttcatggccataaagcaggccacatctgacaatctcgtcggaccacccggaggacccgccgacctttgccgagtcggtggcccgggataccgcgctacagaatccgaggcgtccgggcgcccccgtctcgttaggtgcccagcggcttgcaccgagagccaggagaggctcagaccggatcccgacccttcgaggcgcgggagcccacggagcgcggtgggcgcggcgctcgggtcgcgcagctaggtggggagcggcgcgcagccccagactcgcaggcaggcagcggcggactgcacttgcctcgccccgcagcgccccctgcctgccgcctcccgcctgcgtagccagagctgcgcgcggccaggaagggtccccgcctagtgcgccccggcgctctgcaccccgagacgtagccaccgccagcccgggtaggggcacacccgctccgtccctcgcgatccgctgcgctgcttcaagccgtgagaacacgcgcgtcggaggagcccgccggccgtgggggaaccccgggagcgggttcgccccggcgaagtgggcactcccctcccagccttagatccgcagccccaattccgggactgggagaggccgcgagcaggagcgcggggacaggcgctggaaatgtccaagcctctgctctctcttctcgtctcactgtccctcagcgggcaggcgggaccccgaccacttcagggtccgcgccccgctctgtctcctttccttctgcttccatctctctgccgccctcgccgtcgcccctcttctgccctccctaacccacttctcaacctctctcccgctccccaacctctccctccgacgcccctcccccccattgtctggccggtccccattgtccttgccgggtcccctctgcctccagtccctccgacctcctccattgttccatcccgtcgtcccgggctccccgccccagcccagctcgcccctctcatctctagtccccgtccagttccccctccttctctcgccttggttctgtcccacgactctccagagaccgagatgctgaggggaaagtcccttcgggatcccggcattcgagtgtcctcttccgaagaacctgggcatcggagagccccatgccccctcttgaaagacccctcccagctcccccaccgccccctgcggtacctgaggaccggcatccgtgctccggtcttgccctcatctccaccctggagagtcgcctctgcgctccgggaaccctagaccctccttcgtggtcccggcatcagaggtcctttcccaccacccaccctcagtatctgggaccccaatgctctgttctgtttccttggtggcggcgcccggctcttctcggagttctgatcccgggaaagggagcgggccccctccggctaacactcacccccagaagcagcaacagcagcaggcgcggcccgtccatggcgcggccggtggcacctgcccccatcgcccgcctcccgcggcagcgctcgacttccagctcggtccgctttgcggactgatggggctgcgctgcgctgcgctccagcgccccccctgcccgccggagctggccgcggctcggctcgctctggctgcgggcgggagaggctgggtgaagccagtgctgcggccccgcctccgccccgcccagcccgcccacccccggaaccgcgcccgcccgccctgccgcctcggggtgggaagcagaggcaaagggagggcgtgcggttccccgcaccccgctgcgcttctccctgccttgtcccttagagcctctcacccatcccgccctggtacccagttcccggcccgcgctactgcgcgtccgtcccggatgctgtgggcccggggaccagggcgtccccactgcggttcctgttcctctccggctgcggcccgc

SEQ ID NO: 5542 - DNA, 1026 bp, Homo sapiens
cgaccgcccgggtccgagcagcgggggcgctttcagcggcggcaggcgcgggtgcgggggagaggagcagaaaagagagcagtttgaggggccgagggagccgcgtccgaggccggcgcggtggggaccgcgggcccaccaccagccaagcccagctacttaactatttgtagagctgctgcaggcacaggtccaggctttcgccctccacctcctcgcgggtgatgcgctctgacagcggtcgcgggagcgggggcaaaggcggcagctggggcggcggcggcggcacggccgagtgccccggggctgccgccgccgtcgccgcgccctcctcctcctcctcaccctcaaccgccgcctcctcctcgggctccgggtcttgctcctggtccccctcctccgtcgcggctaccgtggccgcctcctccccgggttcctctaccgaagcctcggccgcctcagcttctaccagttcaggttcgggctcgggctcggactcgggttcgggttcgggttcgggttcgggttccggctccggctcgccgccgccgcacggtccgcgaaactcgcccaggaatagctccaggaagcgccggtaagttttctcctcagggatgcagccggccatcgctgctcatgccccagggcagaccgggaaaggggttgggggaagcccaggaagggtaaggggctgcttttgagcctagggctccggcaagggcggttaacggccgcaccggcacgagcgatcagcactaggttgcctggagagggctcccgcaggcgtgcgcgccgccgagcaccgacgtgcgcggcccgggggcggagcgcgccgcccctctcggatctggagggaaagttggtggcgggcgcgcgcagggtccagcggcggcccaccctttattcctacggagagctcagcccacgctgcctagagactgtcgccatggcaaccggttctaattaagcattgcagggtccctcccgtcgagtccgcggagtctaaaggacactccactcgcccgc

SEQ ID NO: 5543 - DNA, 10207 bp, Homo sapiens
cgctggcctcgccgccagctccctgggccttctccctcgctggcgctgccgcggggtcacaggccttacctgagatgccagcatgtgctgggagaggtggaacgggaagggcgcggcggtgcttgctgcgctggccgcgggacccagcccgcctgcgtccagccccgcggcggtcccaggcccgccacctccgccgttgccgccgcctgccaccgaggccagtaggtgacccatgcccatggcggagaaggcgccagggcccatggtgaactgtccagggtgcaggaagagcggctggccggctcccagcggcccaaagaactgctgcccgtgcaagtggctggaaaaggccaggccgggcaggtgtccggcgcccaggggggacgcactgtctgtctgcaccaccagcggcgccaggccctgctccttgccctcggccgcctccttgcgcccctcgtccttcctccgagcttcggcgcgctccttctccaggctcctcaggccgaacgggccgtccccgccgctctcggccggctccttgcccctctcgggactacgccgctcccgggcgcgctcgggttcggtcaagcgagtggggctggcgctgtctggagccgggctgcggcctagcggcgcccccgcacgctcctcgctcaaccgctcaggctccgggtcgctgtccgcggcgcacgacttctcctcagctgcggggagagggcgcgcggattacaggggcctgggcggaggccgacgagcaggatcagggacactcgggaagggctgctctcggggaggccgagtcggaggagctgctggagtcgggcaaagggcagctgcaggtcacctaatccaagaccccagatttacagtggaaggaacccagccctggagaggaaaccctacagctatagaattacacggcgcccaaggggccaggctcggagtccggccggatcttctggctaccggggaccgccctcgtaggggagtcccgggacggaaaccccatcccagacactcgccgacgtttccttcctggcctttcaggttagcgggtggctcagcaaaagaccagcccagcgacctgaggaccccccgccgccacctccctgtccctcctccggtccgaccctcacctcgggcccggtgcaggcgcagcggactgggcgctgcgcccggggaggtgggtggttcccgcgcggggggagggtcgcacgacgaggcgtctgactccgcgccatcgcgctcgggtttgcagtgctcctcgtacaagcgtagagacggcagcgtcagctgcttcctggggatgagcggatgaaccaggtcagcggggagcccatccctccatccctcctgctcgctgctcccgcgggcacccgccacagggctgctgtcctcggcctctcaccttttctcccgccggccgttcccggtgtcccggaagcccttggcaaacgggttgttgtcgatcttcagctgtgtgatctgcggggaccaagggggcggcgctaagtcaggccgtggctcttccagcgtggtcggtggcaccccgaggtcagcgggtgctggccgcagagggaagacccggggagcgtccacttggtacccacccgcctgggatgggacgccccgagctgaggccggtgggagggcctcgcggaaagcgacggggtctgtcctccaaaagcttcattcgaggaattatccctagacaggcctagacagccccacacaggcctaaagcagtgccacagtgtcggaaccagcccaagcatgcacacccgcccgcgggcttgcgcaagttaaacgactccgcacccgagcaggcgcgaacagagactgcagttcacacgcaaggctgcaggtacacacaaagccaaatcacactcacgggctcgcacacacgcaagtgtgcacagacataacaaacgcctacggaaccaaacgaattcacatgcctccacaggtatccaacacaccccaaacggggcacgcacagcccagcgtacaccttggttcacaaagccacaacgaccggcacggacactcgtaccctctctttcactcgacagtggcgcacaagggcacaggcctagaggggtgatgctctgccccactagaacaagggtggagaagccgcaagcagaaaaagccctttgattggaaggtaattctctaagcgcctcccaaggggtctggggcctagactgacccagagcagtagccaggagtgctttggggggctgtgtcacctgtcccaccctctggctccccccgagagagtgaaaactgggccccgggttctgagcatcggtagagcctgggcagattgcctcgggcgccctctcttcacttacattctcattcctgagccaagaaataaacgaataaaatgtaaaaatgtcagcgcgggcccggagtctcagctaattgttaagtaaacatctccatcagaacgacggcccagctgttcgctcgccccaggggagcctgtgtgtgcgcgcggtgggattgagagggcgccttgaggacttccgtgagtgctgcgcgtatggatgcgaggctcggtgctcgggggcgggccgcaagagcgcggatcccgtgcagggggcttcgaggggcgatgaacggacggttgggcctgcacgtgttgaggggcgtcagtgcaggggcttagcccaccgcccgccgcgcgcaccttgtcattctggtaggcagtgacggcgatgaagtcggtctccgggaacacgtaggtgcggaaggtgctgtaaggcagcttcaggatgtcgttggctcgcactatgtggaagcgcggctggtacttgtgcatggagtttaggatggtctgcggggagggtgggggtcagccggcagccaccagccccggcccgagcttttctattctttgggtacctgacctcttcctctccactttctctctctctctctctctctctctctctctctctctctctatcggttcttcctcttccccattttctcctgtctctgctcttttctcacccttatttctttttcttctacttttcctctcgcttttctcttttcacagcttctttttctcttgccattaaaaaaaatttcccagttggaaacagaaatgagacagagcaaaaacaaaacaaaacaaaaaacaaaacaaaaaaaccaaccaaaaaacaacccctccccacaaaagaaacccaaacaaaataaaacaaaacagagccctacaattccactcttaacactctcttcctttctggcactggtaaaccccctaaccccacaaagaggagattccaaccttcgggggctcaccaactgccctacctcagaatgggcagttccttttaccctatgaaacaccacccccgttcgctggggccttgctcaggcataaatggagagaacccccaaaccctctcctcctagttgggcatctgcctgtgggaggagggaaaggtcttagggaggctgggggggtgggtggggagggtggtttaacttttaaatcccctagtcttgggggagggccagggacgcgggtcttggcagaagggtgatggacaagttgaggtcatgggcaggtcttccaagctcggcacctacaggccaagagcagggtgacctccgtggtccagcactgcagacccagtcctggcagcacctgcctccctattgacggtacaagggaccctccacggcctgaggaactgagattgtgagctgccagccactgaccccaccatttcccaggcttgcaaaggagagcgctggggcccaggcccaggcccagcccacgtagaccacagggcagtgacccgggcaggggcactctgggggtttgcccagcgcttccccctgggagatcctgccgccctgctctcctgctcagctgcagtgctgggtcaacaagctcctgcaccgtccccaccctgccccaacactcacgaagccgtgcttgtcagagatgttgttggtcagcttcagcttgtggaaggccacaggcttagccatccactgctcccccgtggctgggctgtctgggtggatgtacatgcgtttgggcatctcagggtcggccttgcccgccaccatccagcgcgagttgtggaacttatagcggcaatcgtcagcggctacaatgtccatcagcaggatatacttggccttcttgtccaggccgctgactcgcaccttgaagggggggaacatccgcctgggagggagggaagggaggagatcccattggaaccggctgttctaggttccaggaccccactcctcctttatttatccctcctcgttgcgcacaccgctgccgcctggctgtttcccctgtggtcggctgctctgccctctcatcactgcccggacgaccccacctgtggttgttgctcccaggagatcccatttctgcctgtcagaccctctcctaaacagcctcctttaggccttgtgctcagatctggggaccctctttctccctgatctgagatgaaagctgatgcccaggagagaagtctaggccctctagaaatattctcgcttctccttaatctccccgaaattcgttcaggggaaatacccacttgggacggaagctcccagaaataaatctggagggtgtttgtattgggaactgggctacagagcctgataagacatcctggccgtgcagttcgggggaagagggtgaacccgaggcctggattctcggtggctgagtcgaagggtggaggggccggggctgtggctttcttcaggctttaaggcctggggcggcggatgcgtccagggctcggatgcccgcggtggagaaagggctcccagcccggtgaggcggagggctcggctgacccggggctcgctgccaggaaccgagcaaccagcgtggggttagctgggcccaggtcccactaggggcttcggggtcggagcagagtctgagagaggctgaatttcccccgagctcggagacggacccggacgcagaagagcgagagcgcggggcggaggagaccgccagggccaagccgcggggcctcctctgcgctgggactcagaacggttggggctattctttagcagtatgttttcgttttatttcattcggaggattttagcgtttttgttttaaaaaaaaatcgctccggtgccaaacgagaaaagtcaacttggttgtccgtgggagcgaagcgtggcgtcagggccagaacctggagccgggagccgggagccgggagtccccagctctgctctgatccgtgcagtcccgtgccccagcccgcccgcccgcccgcgcgccttccagccggccggcagccctacctcccggacttggtgatgaccatctccgtgcctagcttgtggaactggtcccacagctccttggcctccagcgtcaccttggggtcgtcctccacctcgtcctcgggctccaggctcttgagggagcgcagatgcgcggcgggcgggtgcgggcccagtgccgagacgtgcagccccgcctcggccgctgctgccgccgccgccgccgcggccgccgcccccgccaggcccgggtcgggcagcggcttggccagcgcgccgggcggcagcgcgagtgccgggaagaaggagggctgcgccgccgccagaaaggcggacatggggaagtcggcgggccgtggcgcgtggaacgggtggtaagccatggcgctggccgccagcgccggctctctcatcgggacatccggcccaggcgcccgggggccggggccggggccgggggcgcgcggctcggacccccggcccgggcggcggcgcgcgcggtggacggacgacccgggtggcgggcgcagcagctgctcctcggggcttcccgtccggcgcaccgcaaggggcacccggctctgtgcgcgggggcggcgggggctctgcgcggggccgggctgggccgggctgagctggcccgctccggcgccggggaccacgcgcgactggttagatcttgtcgtgatctctggaaaactgtgactatctcacatgtcctgcccagctcggatcccctgcgctaacgagccaggccccccttgattgctgattttacgctttttggaccaattgtgggtctccgggggcggggttttgacagctcaggccaagctccggccgggagggggggcctgggagaaggtgtcggaagcctcagcagtaagaaaacatgtcaacagaataaaatattaaccaatgacgggccgccgggccccgagacccctcctcctgccccggcccccaccgcccgcccgcgcctgcggctgcctgcgccggactggagagcgcggagggccgacctgacccgccgaaagggcctgaggcgaggggagcccgggtcccggggccttggggaaggacccgcagccgcacgccggccccaagtgcaaagcattgacacgaccccgagcggagagggggcgccctccttctcccgcgcccagaggcccggccgctctggcccgagccccagcctggcctccgacccagctccgggtcgtggcgccgcctgggggtccctgcgccccggaaagagacagcaggcactggaaagcgaggccggtgggcgggcgagtcgggaggctcgggcggccgaggtccgggagcggatcccaggtggcgggagctggtgagtggagccatggccgagccctgctggggccggcgcgggcgggagcgggacgcggccttgcgctggggaaacgcggggaccccctacccgcgcccgccttcaccggaagactcggaaggaacctggagttctccgcaggcccgggccccgccctgagctttccagcggccgggaggagcggatcctcggggccaggaaggtgagcgcacctttcgctgagcacagggcggcaccgcgcgggcggaccccggattctccacccgcgacccaacgaattttcgccctatccggtaccggagacgaaagtctccttcttccgaaataccggcttcctctcttcgccctgccaaccacttttttagtttcttctcatctctcggaagcgcacgtctcctaagttaaggagtgctgagtaacgcgtgagggagttggggtgtctgcgagcacctgtgattgaagccccctcttctgtgatcagtcttcgttttctgtcttccggcagcctcagtttcccccccatgaagtgatggtgtgtgtgtgtgtgtgtgtgtgtgtgtgtgtgtgtgtgtgtgtgtcgggccccgtgtggtgccctctgtgcgcagcgagagctataactcaaggtgtgcacggggagagtgaagcgaccacgcacctgcttccaatcgggctcgggcgcgaacactcaggctgattcctgaaggtcgttttctgaaggaaaagacagagcatgcactagccacgggtgacattcccacccgtacaaccgcgtggtgggcgcgtacatccaacattgacccatgcaggcgcccgcccactgcgcacaccggtcgcagggcacttcgttgttgaacgttgggagcagcgtttgaaggccggatctctcctggcagtgcggattcgggaccggcggaagcagtatggcctctgcgaccgttatccctacttttcggggccgaccccagggccctcacaactcctcatcaccgcatatgtgagcgccgcccccacagggttttctccacgacctcgttcttggctaggtcgcacctctcttagtacctcctctctggccagaacgaatctttgactccgagctgcgcagtctacgcagacggggcaggatccactgcagttttccacaggcaaatacctgctggctccaccttaggcgagatgtggcctctcggggagggacccgttgtggacacgtttgcgcagccggtgaggtgaccagataataaccagggcagctttccttagccgggaacccaggtaccggcctaggaatccgtgaatacattcgcaaagtcgcgcgcgcgcgcgcgcgcgtgtgtgtgtgtgtgtgtgtgtgtgtgtgtgtagacacatacttttgtccttgtaagagtatgtgtacatctaaatgtgtgcgttttagacattagtccatttcattagtccatccatagctggtccaggggtccgaggcctgaagagtttgaaacactcaggcctgggttatttgaccgagaaacctggcggcgacagtgcagcggctgcatctggggacggcgaccccacctacagtggcaccgaccttccctctggctttccggggctctgtccgggccaggatcccaccactcgccccgccccgcggtcccgcgatcaccctgaggtcctgctgcagccgctctgaagagtctgtagcgacccccagccaaactctccagctaggaatgcccgaggctcaccgaaagctggcgctggggaggcctgggaggccctggagcggcgccgtgaggcctccgctgggcccctcccccacctaggccggccccctcccccttcccaggaaccccctcccctggcggagccccgggggccgagtgtgcgtgttcctttaagaggccccggggggcgcctcgcgggccgcccggggctggagggggagggcgcgggcgggggcggctggcgccaggcggccgaggctccacaacaaagctccggcccctgtcacttcgcatcggccaggtcccgcagacaggcgggggacgcgcgctcggccgcccctccctctcgcaggcggtctccggccagggcgtcgggcgggcttgggctggtggcgcgcggtctgtgcgccccgcgcttcccgcaacagtgaaatggggcgggagcggggacggcctgggccgggtggggccgcggtcctgagcctggcgtggctgcccttccgtcctccggccccgtcacctctcgcagggttaaggggcactgctgggaccttccccgggttgagcctccaggtggcagggggtccccgccgcttcctcctctgtgtgcagggccggggttgcgtgaccccgcgggcagtgggcagcaggaagctcgggctgtgcggccgcgtggcagagcggacgacggacttgcgtccgagtgacggggcgcgggctgcagactggcttaagccctcggtggcagacgaatgtgcccaggctaagctcaggggacgtgtgtggccccgtgctatgggcccgctgtgagggtgccgccaggccgtcgatcactgcctggacgtgaggagtgtggtggtgaaggacactccctggacagagtcgcttcccatcacggcttccccgccggaccgcacctcccggagccctggcgccagccagcccggtttagcggccggaccgggctcccccgcggtcccaggtctggttggggtgggggccgcggcctcggtgaccccagcccgcagcggcccggcccgtcccgtccacttaaacaaattgccgctgacaggcgcgcagtctctctggagccgccgccctcccgtcgcctccctcccgtcccaattatcccgcgcagggtggggccaactggctgggatggggcgggggacgcggggagagcgggcggctcgactccctcctggtcgcggggtggcccggggaagcgtctccgcagccacggcctgtgtggccccgtccctggtcttcccgggggatgcgagggcaaggcccagcctggcagctgtgggccctggaagggcgtcgttctgcacctaagggcgagatcacgcggccgagaaccaaggccgcatcccggatggacttcgggtgactttcccggagttctggggaatcccctaacccggggagctgcagacgactcactggccccgggccgcggttccgcgggtggccgctgtacgcttgagacacctggtccgcagaagtcaggtgcacgtctgtgcaccgtcgtgcgttggatgtgcatggaggcgagatcgtggttatggatgtctgggatcacgggagcgtgaacggggcgatcgactgagtgacttgagagacggggtagagcgcaggaaggacccctaggacgggcccacctgcgacgggcggcggtgggggagtggggggcttgccggcgcgttcacaggctctgggttcgcgttcggaaacgctttcgcagggagcgggtcgggattccccggagcagcacggtgacggcgtgccacaatccgggctccagctgtgccgcctccgc

SEQ ID NO: 5544 - DNA, 2392 bp, Homo sapiens
cgaggcgcacttgccccgagtgtcaggtctggggacgcggttccggagaggggagaggggcccgggaatgcggcgggaggggcctcgaggggcagcgggccgggccgggccggggcggaggtggcgggccccggcggggcgggccctcgcgggcggcggtgagagctcccgcacagtcggctgcgagctctgggagcaggaggcgcggtgcgcagcccagcccgggacggagccgggcgccgtgcgagcctcgggagggtcgcggggcgcaggggcgggtcggggccagcggaccaggccgcgccacccgcccccgcccccgccccgccgcgcccgggctccggcgcccgcggagctgagactgagcgcgccagccctccggggccgaggctctgggacagacaccgcgagggaggcggccggcgcgggctctcgtcgcgggcgcagcgccccttcccctcggtaagtggcgagcggcgggcgaggggcaccaacttcgccgccaacttggggctgggttcccgcggcgcgcgagcaaggacggcggagacagaggcgggacacccggggggttggacccacgcaggactctcggggctcaaggagggggcggctggaggacccggaccctcaagaacctggccttgggttttgacccgggcggccggagagaaggcgaagaagaggccgagcagacaggcgcgcggcggacgcgagagaaggacgcgggcgaagcgtccaagacgttcgtccccagggtcgccgagccctcctcctccttcgcttggcgcggcagcaccgcgggaccaggggagtctgggctgccgcggacccaaactgttgctgctggaagccgccggggcggagagcggggaacagggccgggagtgggggccggggctgggatccaccagagcgaggggttggaaaggagtcgagaaggtgaaagggggctgtgcggctccccagcccagtgccccagtttccctaggtctgctgggcacctgctgcgcactcgcctcggcgcccagaccccttcccccgccgcgagtcccgcttcttccccttccagctctgccccatctcctttgccccagcctagctctctccttcctgcgacctgggagaatcggagtgggcttccagagtagtggcatcttgcagatgctggcccgtgcccggctcccgggcttccagagcgcaaagggaagggtaggcagagagggcactgggcgagcaagacctggcgctgggccctggctgcgcaccagccgcctgcgccggtctctgggggcttcgcccaggatccccgacggcggggaggggaagccccgagtctcctgtttcctgcctacgcgggcagggcggggacacgcggagcaaaggcacccggcaacctgaacccccaggtgcgtcccgcgaccctgcaaggagctgctgggtgagcaagacgggaattcccgccaggccctgatgcccaccccattcgtccactcggtttcccagccctggtcgtccaaggggacttctggctcggtcccccagccctcggatggtggcgttatcttagttcagtccctgaccccgggccacaggaaaatcgaggaaagacacttatttggggagggtaccattccgctggctgtatttcagagcccgtccaggtcttggcggtgctagtgactttgagcctgtttctaaactcccgaagaataagagcgtgccaggggcaggtaggcaggtccgggacacctgggttcgcccagggcccccgggcgggcctgggatggtactggggccgcctgccaggctggcttggtccccccactgcgggactcggggtcacgacccagcttgggggagtgggggtgggggccccggagccgcggacgccggcggggggcagcgtggggcggggggcgccgggtgcgtggtgctcagcttggccgccaggaggcgtggcgcgggtccccgcccggagccgccgccgccgccgccgccgccgcatcgcgagtgtccttgagccgcgggtgacggtggctctcgctgctcgcgccccctcctcccgcggggggagcctgatgccacgttccctatgaattatttatcgccggcctaaaaataccccgaacttcacagcccgagtgtaagagattgctgcggaggggagggggcggggcgtcccggtggccagggggagtccgggcggggtccgcggagacgggggccgtagccttggaggagcaagaactccgtgcccccagcagtggggcaagctagaacggcggtcctctcccctggcgcctgggttcgggttttggctgggcaaaagggagggagggaaacccgacggcaaaggaggggcggctcaccggaagggcagggggtccgg

SEQ ID NO: 5545 - DNA, 564 bp, Homo sapiens
cgcctccaaaccgcccatctgcgacggccccgcgagcgtgcgcagcccagcccctcccggacgtcctcgcccccgcccgggcacatcgtgctccgcaccgaggcagagaggggcacgcggatcccagcccctgcgagcccctctgcccgccgccacttcacaccccgcattgcctcagctgccgttccagaagatgcatcgtctggcgcgcaaagcggtgcacggtccccagcccgcgcgcagcagcctggaggggcgccagagtccccgtcccacttcctggcggcactgcccccgggcagctccctcctcccctctctccctccatgcccccaccccatcttgggacgcttccaggaccgaagaggcaggagggggatcgcgaggggaaggcgcggagctggggaaggaggagcagcgccgggcgcagcagctcagggcggtccgggaggctgcgcggcgctcgcggacccacgccccaggacagaggacgcagctccgagcatcgcacgtggcttccagattcctcccacccctaccctggcgaccacgagagggggtcgg

SEQ ID NO: 5546 - DNA, 3277 bp, Homo sapiens
cgcggcatggtggccctcgcgtgtgtgtgcagcgcctgcaggtgtcccgcccagcgcctcctgcacaacagttgcaggctggacccgagggtctcctctcctggggccccacagtgcccagaggtcccgctagccccagacaccgccccaggctcccctccctttctgacgccgtccactcccttcctctgcggaagggggacacgctcctctgtgccgaggtgccaggccgctgagatctgctgccctggaggaaaagccaggcagggtccctggccttgggcggctaggaaggctccacggctgctggggatagagacgcggggccaggctaagggttcccgccccgtctaaacagcctgccctgggcagggcagggctcctctcccgcgcccgcgcgctctcggctgggcacggtccggctccaggcctgacgggcgcggcctccccactggacgcgtgcgggagggcggcgaggccaaagcgctggggccaggagggcacccgcctagcggctccctacgggagttggggcagaagacgccgcgaccccgcgcgggtaatttctcccgaggcgcgttccagcccgtggcgctgccggcgcagaccccgcgtggggaccggcgaggctaacccctcctgcggcccggggtcggcagagcacgcaaggggccgcgggccgcgtgggtttgggcgcgccgtggtgggcaagcggggccagcggagcgggaacccgcacaccctccgagcggagccgaggacaggcccgtgcgggccgcggggtccctctggcgccaggaagcggcggccgaaggagacaacgagaacgcagccccggctcagggaggcttaaaagctgagatgctgaacgcagacggcgggcgctcgggggctggggggcgggtagaggccgccatttctcaaaaaggtctccatcgagccggcctctgctcccgcccgaggggcggacgcccgatcccggcacccgggactgcccgtgggtccctgctggctggggacccccagcccccggctgcgcgcagggaaaggctgcagaacgcagagaccagagaagccgggggcggcggggaggggtcggggggccacggctgtagcccggccccgcagtctcggagcctcagtttccttctctgtaccacgggagcgtggacggagggatttccgaggctttgaccgctctgatagccccggggcggggcggggcggggcggctgcgccagccctggtcctgagcccccagcccggcgccggaacccggaccgcgatctcgggagccgagccccgcggtccagatgaaggcgcgagtgcgcgggtgccgggtggggtgtctgagcgagagcggagcttctcaggtggacgcccccagccacctccgggacccttcctgctggcctttgggcctgagaagtgggcgcggctggacagacgggaaacagccccccacgcacaggtggacacccggggataccgggcgcgcgcggcgcctggcaaggggaagctgctggagacgcgggcggctgctcccgcggggcccccttccgaagcgccgctgcgaacgtccagccccggcgacgccgcctgcccgcgatcgggccggcgccgcggacaggaaaggctcgatcagctaggtctgcctccgagaagtccccagcgccccgcccgcacggggtggggactgacagtcccccggggacggggccgggtccacagagcccgggagctgggggaggggaggcgccgggggccccgacccgtgggaagtccctgtacccaggctgcccggcggcttctcaatagcacacggacatctaagaaacgcggggcggcccggtgacccccgctctggacttagtggcgccgcgaggccccactccgagccgttgaccaccgggcactcgggtgttgacgacctgggtccttgggcacccagcccggctccaaacgaccccggcccaagggtgttcagtgcagccaggagggccgaaccgaattctatctcccggacgcggtggtttcccgcccgcctggagccccgtcggaggttcggggacaccacgcaggtggtccatcctcgagtccggggccggagcccgacttccttccccctgagctctcggagccttcggggcagcagcgccggcccaggcgggggcgggggaggagggggccgcggcagctcccagaagggcgggggggacgcgagcggaggcagccccggtggcgcgctcgtgagacccccgccgcgccgcgggcccgggccgcggacaattaaagcgggattcctcccccgctgacgtcggcggctcgaggcccctcccgcggcggcataaaaggcgcgggctccgcagcgcaggcggcagtgggggcctgatagcgcggcggtgtggaccgcgcggccgaagagcgcggcgcccagagcgcgggccgctcgcggagccacagcccgagccgggtcccagccggagccgagccccagccgagccgagccgggcccggagcgcccggtgcccgcagccatgccggccggccgcgccgcgcgcacctgtgcgctgctcgccctctgcctcctgggcgccggggcccaggatttcgggccgacgcgcttcatctgcacctcggtgcccgtggacgccgacatgtgcgccgcgtccgtggccgccggcggcgccgaggagctccggagcagcgtgctgcagctccgcgagacggtgctgcagcagaaggagaccatcctgagccagaaggagaccatccgcgagctgaccgccaagctgggccgctgcgagagccagagcacgctggaccccggagccggcgaggcccgggcgggcggcggccgcaagcagcccggctcgggcaagaacaccatgggcgacctgtcccggacaccggccgccgagacgctcagccaactcgggcaaactttgcaatcgctcaaaacccgcctggagaacctcgaggtccgcgcgcgccctcggctccggttccccctccggctcgctcgcccctctgccctcccccaccccgttccctacccggccaggcatcccccgccctcgcctcagccgcgcgggtgcccggccggtgcctccccgcgcctgcgaggccccgcggcggccactcgccccagctccctgccaggccgcccccgcagtcgcccagaggggaccgcgccgcgggccttccagcacggtccccgcgcctcgcctaacggtgtggtttcccccgcccttgcaccccgcagcagtacagccgc

SEQ ID NO: 5547 - DNA, 5692 bp, Homo sapiens
cggacgccaatcccacgaaccctgcccgggctgggggcctgggacgctttccctggactccaggatccgtttgtacggagtcacagaacacagcgttatcgctcgtccgagcccaggtaccctccttccttcccggggcctgcgtcgcctgcacgtctctccgcagatcctcgcggaaacgtgcacagtagggctctgaacagaacccaggctgctctgagccgaaccctctccggcccggggctgaccgtgtccatccaagccgccgtcccgctccccgcacccccgacgcggggccacctcctcccacctccctccccactcaggcgcttctcccgacagcggagggagagtcaaaaacccacaacccggcggcgggatcctgccggctctagctgggcgacctgggcgcacccgccggcgacgcagtctcgggtctcagcgcatagaacccggccgcccgcagcccctcccgccagccacgccccctgggccttccattggccaagccgcccgcgcctccgcgtgattccattggcctgcgccgggggctcagacaaagggagcagccgcggagggcggtgattgggcggggttgggggcgggtcgggcgggcgcgcgggtcgggcgggagccgcgcgctggagaggcggggagcacggcgctgggggaggggcgcggtgtttcgggcccgggaccgggaggcgcgggtgtgcggcgaggctcgggtgccttccctcgtgggggcggggcggcgggggcggggcggttccacgtgggtggggctgggcgccccggagggcggcggccgcggggcgcggggcgctgggatcccgcccgctcctccgccctgcacccctcccgccccggggctcctgcccggacggcggccgccgccgcctcgtcttccccgagggctccgcgtccgtctccgcagctcggccgggaacctgggaactcggacgcagaaggacgcgcccgagccaggacccgccgcggggtccctctggtgggccgtggccggggagaggacgcgggccctggcggtcgaagacggacgcagcgcccggaaaggcgagccaggtctccggctcctggcgcttcctgtgagctggctcggcggggtgcgtcgccggggagggagggactggccgtggggcgagcagccgggcggggagtggcttctgggggccttcgccagcggagggcccgcgaggccgccctcggagcgccgccaggtacgtgcgttttccttgtttcccgcgctcccagagcgcactctcggtagggaacgaataaaatcccggctggtgtgtaagagcctttcgctgcaaacgtgtctttctgcgggattcggggagccgccgaacgcggggtagaccccggcccaaagtgttcctgcagcttccaccagggacccttctccaccctcaccttgggctcggagcgggtgccagtttggaaatgcttgtctcttctgcagctccgattgaattcgcccaggaggaggtgcgccctgcctcggcctcagagctgggaggaccgggctttgttccccgaagctctcccaccccgtcctcctggaaaatgcggattttttctagtagggatgctcagttttgagggggttgttttcggaggaagcttgggttgggaaagcccgatattggccccaatctggcgggcagcttcccttgtcttggagcagcccctcctagcccccggagccccggacttacacggttaggagacgcccatgggctttgggggtattctgcggggtccgaggaggccgggtggcctgggcggggtccgaggaggccgggtggcctgagcggggtccgaggaggccgggtggcctgagcggggtccgaggaggccgggtggcctgagcgggctccttcccctcccccatgtgcacgtcaaacaaaagaatcttcgaacagttttggggacagaactcttcggaatgtgagcctgtcctccccgccccccttcctaggaaggacaggggtctttcaacaaaggcaaggctgcggttggagcgggctgaagggaaggagcgctgttattttggggtacttgatgaaagagaaactcactttctctttctcctcccaaaattagaggcagctgagtcagagctctccctactttcttacctgattaatggggtttcacacgatgtttgcatttggggtgactgggtttgaagactttcagaagtgggaaaggatcctgcttgtgtgggagattggaaagctggcctccacccggtgggggatagaacccctatggagtgaaatggattccaggccattttgcggaagattggaaatttaaggatttgacgggggggcggtgattttgtgtccttttctctcccccctcccccctccccagtttagaacaaagggcggaggcgaaggaggcaagatgggtggtgggctcggaagccggagtcgaaagaagaatgttataaaagtccctcacttcccagtccccgcgcactcccaaatagctcatcagagtttgggtggggacaaagtgaatgaccgcctagagtcgggtttggtacccatggcccggttttcggcgcgggcgtccggagcccgggggaagctcctccagctcgtcccaagtcgcggttggccagggcgagagaggtcggggcacagcgcgcggtttctcctgccgccttcgaggaccgagactcggggttcgcggctccctgactgcgcaagtctcctcgcccctcctgctcccccctcccccccgccgaaagacgctcggagcgcacacccgcctgcaccaaagccagggatctcatttctctcaaaataaaacaacaagccataaaggctcctgattccagtggaaaaggcgccgcagatttatggtccctccaaatccccacactctaattatccctgtttttagtttacttatgggtggtgaccaataaaatgattttccattttgaatttttttttcaacataaaaaatgcaagcttcgcttccctcttacccgcttggatggatcttttccgtgcgggaagcaaagaaatcccgtttccctcggccttatcggcccagggctgagctgctgcctccggttgagcgaacccggcctgccgcagcaccccccaagcacccccgccccgcacacccttaattgcaatttaagggagaatattctttccgtcctctcttcgcccaagggcatttgcagggacccctccctagaagtcctgtcgtgggcctagcggctagaagggccaccccgcagagcgggtctccgacagccccagcccggtcacctttcaaactgcgccctcctgggccccgcattgggcgcgagcctggggcgcccaagggcccccactgaggaggaaggttgccggaccgagccctcgccaccgcttggcgcccccatcccccatcctcctccctttgttcgcctttccggacgccgacttggagatggcaggaaaaaaaaaataatcagatggaaatcaaagattagcctgggtgcgcgggcggcctccgccgggccgggccatgctcggcccgcgcctcataaatcttcctcgcgacgtgacaacagccgcggcctcgtttccctgggaactcaggaacgcatcgatcctcctcgccgtccgcgcaagtcccctcttcgggagcgagaacggagagtccctggtgaccctgacttctggccagcgcaggacgccccaggccccagccagggtatcatgcacaggagtggaggaaggtggaagggaaggggcccaaccctcacccaagaaagcgcagcaaatacccacaccccgcaggttaaaccaaacacattattaggggccgcatcttctctcctccgcgccgcctgagaagggggcggaaggaaggacggagaagggtgaggggcggattaacccctccctggcgactcctttgtctggcccggacattgctgagccgagtggggcgcccaggagccagcgaggggctcccgaggcggccccggctcggcccaggtgtgcgggccgcggtggggcgcaggttcgcagcggagccacgagatccccgcgcctccggctgacgtccgggcgcccagggtctgcggccccacgtgcgatccatccgggagctgcgcctcagacgcctcgtggagcgggggagaacctgaaggaagtcgtggcgcgtttagatattttaaaaactcgaattaattgggaaaataggaagggcgcttccaaacgcggagaagacatcccggggtggggaaggatgtcttttaaaaattatatccccttgttgtggcggttgtttttgacctttcctactattaaaagaaatgttgccacgtttaatttttgttgccatgagatatggagggggtagcccagcattttgaagtaatttgataagccttcaagtagtaaatccgaaagggaggccggcggcccaggtatagtttctttgtaacctgaatttacaatgaaagcattctcctttatggatataatagattagatttcacaacttaattcaccggaatggctccgtttaagggagctccggctgattttattacgccaagccaaattggatgtttgtggtcttaacgaaaagcgatcgtgacataaaatatataatttttaaagtaaaaaaccagcgggttggatcctgtcccctcccctatccttgctccttactcccaatcccccagtgtgggaaatacggataattatttgtgtgtgttggtttctaccggggagacaggcgctctgggctccttccccggcgggccagaggcctcgccggccagtgcgcacgcggcgccggttcccgaccaaggctccggcccgctctgctggctcgtttgaaacgtcgacattctcagcgcacgatccggggtctcgggggcacccatggggcccgaagcctctgcctgccggcggcgaccggacagctcccccgggcgcgcagggtagaggaagcgccctcgaaagcccccgcacgcattcacgagccggccctgcgcgggcacagcggcagccgcggcgggacacccggcagggtcttcggcgctactttgtgccaaaaactgcgctcccggagacccgggcaccgccggcgtcggcagctagagcgggacccagctcccaccgcgtcctccactggagcccctttcggcccctcggcgagtgcggcccgtggggagtgggcgtcggcgcgaggaagttccccggcccgggcgaccccggcttctgagcggcccctccccacgtcgccgcccgccaggccgacggaggaccggggcggggacgggggtctcagcggcccattctgctgtcacttctgacctattctccagcaacggcgcgtccccccctcggctttttcgcgaggtttgttgaagacggatttagcccccgcagagctggggaaggacggatggacggaaggcccagcgcggcccaccccttcccctcgtcgtctcccggctggcaggagccgcagcgacagcttcggggagcggggcctgccccaagacccccttcgcggcatcgggagccaggcgtggccggaggcaccgcggctgctccacgtggctcccgccggccgccaccccgcgcggggaggacgcgtgcgtgcggtgcgtggccggcgggctgcggggacgcgc

SEQ ID NO: 5548 - DNA, 7937 bp, Homo sapiens
cggcgggtccctagcgcagccctgcgcgcttcccccgaatctacccgcgccgcctggtgacctctagggcttcaggcgtggtagctgcccctaccctgacctccctcgacactcatatcaaagccaccgggaagagggctgccctggaggcctgggcccgctctgccaaggactgatcctctcgggcagggagtcagaggggaccgcccgagaggatccgtccctgcgaggcccagcacggcgccccacgctctcctcttggagcaaatccgcctcgctctcctcttggagcaaatccgccgcactctcgcctgcaccgaaatcctgagcgccgccccgcgccacccccagcccgcgcccgcgctgccctcctccccgggccgcaggctgagaggctgggccgcactctggccacgctttgtccggctttagcgggataccagaggcactcgttaaggcaaatgcatccctgcaaacccattctcgccctgacactttaaggctttatatagaaacaggatttgctcgtcttacaccagcagtccctattaacgctcgcccggcgcacacaccactctaatccgcgaggccgcggcgtaccctggtcccctccccccgccacaacagccgttttgtttccgcagaaagcgcctcgttgtcccagccccggaacgtcttagggaggtgaatgcagaatgcagaaaagaggtttccgtggaatttagatctgcaggagggggcgggggagggtggcgaggcgcggaaaggctttaatttcagccggctccggggctgcccctccgagacccccgggggagggtggccagggaagggcctctctaagccgcggcgacgcagcttggggggctggcgggacgcgcggccccgctcagcgcccaggcagccaccgcggccggggccgggaaatgaaaccaaagcttctctgctcccgggagcggaggggtgggcgccctgttccgctctcgaacgctcccgtcccgcgcccgccccggccgagcactgacctgtgtgcgaagccatgggcaacggcgacgggaagtactttcccggctggaagtgtgcggggggctgcgcggcgggcccagccggggcgagacgcgcggcggcagcggcgctgcggtggcccaggctcccgcgctccgacagcagatgcggcggcggcgcaaagtcgcggccatccatgccgggccccggccccggtccgccgccgcttcctcggagcagcgcggccggggcccgggggcggctcggcgcgcgggcggcgcagaggcggcggcgtccggggtcacaggcggtggtggcggcggggccggtcagcacgcgggaggactgggcttctcggcgggcggccgcgcaccgagccagcggccgctgtgcgggtccatggtctgtggaggcaaaagcagaggagacacgggtgactggggggctcggctcgcccgggggtccccgccccgcccgctcacccactccccccaccccccacccccgccggcccgagcgagcggcggccaggccgggtggcggggccggggcgctcggtgtctccccgccgcacgcgcgcgcagcccagcacccggggccccgcgcgcgcacgcaccgtcccggccacgcttggcccggggcagccgggggaacccagccgcactgctcgccgcctcccgttctcgtccccgcgggtccctgcagctagggcgccgcggcgaagaggctgctggctctgctgggtgataaaaacccaaatctgcgaagccatcacgcacactcgcacacacacacacacacacacacactcacacgcacaccctctcccctcccccgctgcccaaaggtgtctcggaggaaaaggcctggggtccacactagctctccccctctccccacctcatgccgaggtccagcttttactgcattccgcttaaccgaataaccatgctaattaagcgagtaattttattgattgtaactcaagagttttttttttttttaataaccttccttttctccccactcccatccccctcatgcatctttcggcccattcttctgaatccaccgtggtcccccctccccagccccagcgggaccagctcctgtccccagcatcgcgctaggaccccaggccggctcctcagagccccggaggcccgcaaccgccaccggcatcacctgggccgccacgccgcagtgcccggcctgctgtcccggagccgggagcttcctgttgaggctgtaacaatcaccccgccccccaatcaaattcgcccaggatcttcctctgcggattgggggcttgggggtgtgtgtggggggggtgctttcagagtcagaatgctctctctcaacggcccaaatcggccctgggatttcttccttcagcgcctgccggggaccgcgagcagaggccggtctccgctccgggcagtaccgggcggcctgggtacgcggggtctgcggcgcccagctcggccctctagccggggaaggtgggcccggcccagcacaaccttctgccagcagaccctgcccggacctcggccacctaaaataaccctcacctccattttcttccacccccacccaacgcggagcatccactcaggcgaaattggggacaattttagactctgggtgcggagggtcggagccagtgatagaagctgcgtgcaccaccgtgctcccaggcgtccctccgaaggcgctccctggacgcacttcacatattactcctcatcttctaaatacgtattgttttaatgtttatcacctccaacaaaagggagatggataggcttgatattcctaattaggaactttgcggaaaaccttgtgtttttgtagccattccaccatgacaacaaagcgattaagatgttttccatctactgaatacctttttaaattgcgatattttatggtccgggttctaaaacgtcttatttgcagactattttgtgtttgatttaatctataaccgaaaacataatgtattaagtgaatacatatttgctcagctgataagcttttttaatatttattcggagagcttttgcattgtaaataaatgggtctacacaaagagttctctttgtctggcaactacatacaaaggcgtttggggctcccttccctctggggatcgccagctctctccccgggtctaacaaatagctcggctcccaagccccgatcccggcctgcaaagcgagcgcccggccgccagggcccggagagtgctctggcgagggggctgcgagcgcaggggtcaggggaggggctgcccgggctggactagggacgtgggggcccccagccccggccggcgcctcccgagccccggagggcgccgggcgggacaaagggaaagaaggaaagggagggaggtcagaaacctgcagcttcaaaggcgccgaaggccggagaggggccgggggctgcgcacgcgggggtgccaggcttcctggcggcctccagggagtcgtgtgtgctgtgcttttgttttgtggttgtttttttttttttttttctctccaataagaaatttcaaagttgagaaagcgcgagctgccggcgattctcgggacgcgggctcggctacgaagcaacaattttaatctcccaccccctgcgggcggatcgcaggcccgattgttcctttctcaccagcctgctcgactttttaagcaaacaggaggtggattactgtcgcctgcctgcgccgccacggctctgaccggattggagagagcttttctttgtgttctctcctcccggggagaggccgcgccgcgcctccgcgtctgcccgcgccgggcttcgggggcctggggagcctgaggcggccaggaagtggggcgaggaagggcggccacacggcccgagctgggagtcccacagtcccgcagcggcgacgccgccacccgccgagtgccgaggcccggggcccactcccagcccagctccaggagaggccgcgccggaggaccgcgaggacggcgccgcagcgccaggtcgggctgaggtaagggaggaaatggagcgaaaagtggcggcgggcagagggccccgggcgggcggagaatcgctgacgagggcatttcggaaggaactgaacctaggagcacagggctccctcccgggaaggcagggcgtgaccctggagccgccggtccctcttgccgcggccccaggcgtggctggcgcgctccaggatctggagcttctacaagtttgctttgtttcctgcttttgcatctaaaaacccgctctctcctcgcccgcctgccggagaccaggactctggcccgtctgcctccctccggcgtcgtctccgggagcgcgggcgcggtggggcctgcaggccgggctgggaccaggcgcgccttggggcgcgagtggctcggccgtcgccgcagaacccgctccctgcgaaacagccgcacccgctccctgggagagtcatgagaactggggtcgcgcctgacccccgcgcccgaagaaaaccagcccgcggaccccgccacacgggccgtgacccgagccccgcgcgccgtcccgaacgcgcgcggtgaaaacgccccgctgcgccggccttgctcggtccccctcctccacccccacttctccggaaaaaaaaaattctgaattgggaacgaagacccgaaaaactcgccatgaccattcccctccccggcccctagcttcggcccggaaggcccctcagggcagcggccgtgggtaccacgacccggccagttcccctcgccgcggaccgaccgggcagggccaacccaggactgttccggggaggggagcagggtaggggagcgaatgttggggttcgttcgtgggtcacccagaactgggcgcacgctggcggcgcccggacttcgcctactgtccgcccggtgccacccgcgcggctcgcgccagacgcagcctggcggtccctgtcctgtcttcgagtatttgtttttaatgctgggtgtcgatcgagacaacaagcgctcagagcaaagcaaggatgcattacgggggtaattttaaaccgatcgataagatttttcagagaaaaaaaaatcgctcatagtccatattttttaagaaaaaaaaaagcctcaacattttaacggattttgttaaaagggaagatatatacttcttaacatcacaatcctgaatttcttttgctaaaaaaaatgtaaaaccccaaagccagaataaaaaataaaataataataaaaatacaaaaacaaaaaaaaaatgaaagcaatttcagttacttactggaggctgtttcctggatacaactgaatgcaatacaattaaatcagtaaatgtgactttgttttgtattcctattggtattttcaatgtgctgactgttgcactgtaaatgcaccgcttccacaacaacgactctagcgagcccatccagagcggctctcaaacctgcagcctggcgcggcgagccacgggccctgcatactaataagctcgtgccactcagcccggaacagccagcgcgctgattggccgcgcagccctccacggccgggagctcgtgccactcattcggcgtaaacaggcctcccaataggctggcgccgggccagggaactgccaatcaggaagcagcggggctactaccaagcccgatggcgcctaattcaagcccggcgactgcgcagctcctctgcgcagatcattgctgctgaatgggaatgtggtggcgcagggcgggagagggagctggagcgagcgagtgcgcgtgtcccggcggagggggaggcgtagacacagacacagacacacacacacacatatatgtttaatccagcaggtctaacgtttggcttctgccgcacagaaggccaagggaagaaacaccaccaccccttaaaagtagctgctttttctccctggaatctgtctggcaggtggcaggtaggccagacctccaagcccagaggcctccccaggttgcctggcccatctaccgctctgaagctgctgcctgcccggacccgagctcgcggatgcacgcacgcacgcccgctgcttgggcagcaaaagctttgaatagcccgtccggctctctcctccccatgacctggggatcagaccctgggaagtgagttctgagtctccagccgtctacattactggctctcaattttatctccctctgccacactttgcaacagagcagctactaaaatgaaaatcagggatttattgagaagacaaggattgccctttcttcatctacacctagatttagaaaatattttcagtttggtaatgggggaagcgggtatggtgtggtaaaccatgtatagtatttctcaatgctgctccctgtctgcctatctgctaaatcctcactccaactaaagcaagccactgaacaatttttatcgtaatcagatgcaaaccacttctaaaatattccgcaaacaaatatttctgttagaatttggtttcccacccaaatgctatttattctcagggagtcgaggtgatgtcttagtggcgatggatacatttatttttgctcctctttctccatgtgaatctctgcctccccctctgggggaaaaaaggatatttaaactaggagccaactgacagattcacacgcattcgaaattctccaccgtctcattccggcagggacacgaaagagttaaactcaaagcctgttgtctctctgtttccccgcccccactcccgctcccgcgggaccgctgggattggttggcactccgccagtggactgtccatcaccgagtgtaaacaaggcgctgattggctgttgtccagtccgcactgggcctcctgaaaaaagcaattactggctccgcggtttcaaggcggcccaaggccgcttgatgaaaggagataagctggggaccgtttccaggatccccgcgggccgaccggggcagcccgggagccgaggtgcggcggagagcccgcggatcaaaggaatctggagagaaaggggaagcgggcggccggccccggccggccttcccccccgcaggccacgccgacctggggtggggggctgcgggccgcgggcggggactccgggatttcccgcctgcctgagtcggggcctacgccggcgcccgcttcgggcggctcggcccggaggggagctccggagagcccggggctcgcaggtaagcaccggcgctccgcgggccgggccggggacgcaggacaaggcgcggggcccaccccggctggctcgggagtggcggtcgcgcgggcccggctcccgtctccggcgtctcccggctccggcggccgggaccccccgcggccgagcccctggccaggccccaggccggcgccttcggaagcgacgtctggcgggccgcggggcacgagggggagagccgggaagcgtaaatccccgaagcgcgcggagatccgattagcgcgcggctattcattaggctgggggcgattgaattaggtccctgggcgcggtcgccggctgggggtgtgtggcgccgacccccgggctcttgccgtggcctcgggaggctggagcagcgagcagcggccccagcgagtgtgtcggggaagcgggtgcctccgggtcccggccccgcgggtgcaggcggaggctgcccgcttcccgcgtacaccgaggacggccggcccggctccggagaaatggcgcttgagaaaggaggggaggggaaggttcccggaccctgggcagggacccgtcgccggggacccgcggagccctccggggatggaggaggcgcgagctggaagcggcgcgcgagcccgagcgcggggctaacaccgtggggcccagtctctcctggctcgggtaagtggacgcgccccgaggccccgggtccacgcagggcgcccctcgcagacggcgc

SEQ ID NO: 5549 - DNA, 1408 bp, Homo sapiens
cgcgcgcggcagccccgaggcagcagagcgcggagccgggagcgcggggagcgcgggccggcggcggcgagggaggacgggggcgcagacggccggcgcgcggcgcggctaccatgggcgtgcggtgagcagccgctcgggacgacttcctcggctgcgcggcgctcgcgcggagctccccggccggcggtgcgtccccacggtcaccatgaaaggtagggcggcggcagctccgcggggctctgggcggggggaacgggcttcggggcgcgcgggaggccacggaggtgcctcccgcgcgaaccttcccttgggctgcgggcccggggagtcggggctgccagggcgccgggttcgtgcgcggacactgggggcgcacccggctcccgggtcaggcgcggctggagacctcgaggttggggttttgaagcgcgcaagtattcccctccccatcgcgtctttgcaagtagtttgaagccctaagtcgttgtttacggattcccgtttccaactttttaattgaaaaaacctgccgaggagagtggaggcatcgccatccctcccggtcgcttttccacgccgcagcgctccccacgctcgcccagtcctctctcctcccgcctctagccgtttcccggcccgagcggtccccgcgctggcggccgggtgttttctccgggactggggatgttctccgtgcgccctcgccacatctggcaatgattaggtgcccgaggagttcagctggctcgggaagtgcatttggcatctttctccatcagattcaccgactggaaaatagttgccctcggttccgcgtcccttccacgtgcccgccttggggtgtgcccactggtgttttggggtgacacacctcagctggttagtcgccccctgcgcggtgtcctctgcaggccggtttatggaagtgtcagatgttatcgtactttagaaagaagcacgagaaggactgcagggcagccttctgtttagtggaaacacggagatttgtcagcggaatcctgatttatgtatgagataagtaaccgcagcggaggcatcaaagagtcgttcaggaatgggcccgcgtggtgtttacacaaggcttcgtgtgagagttgctggttctgtgctaggataacacagccctgcgtgggtgcgaaatgccatctgaccgcggtcaccccgcttccagccgccacagacctggcgatgcaatcgctttgacttctagggttgccgtccgagggaggcgcccgggaagccccaaggcgcttggaaagtaacttttggctctggaaagttttttttctgaagggcagctcccgcggaactaaccggagcgatgatatcctaccaattcactccctttccaagggcgttaggtgtccacgtcgggagacctcgg

SEQ ID NO: 5550 - DNA, 208 bp, Homo sapiens
cgccctcggggccgcgattctcctcgggaggtgtctgcgaaggcggctctgccgcggtgggggtggggaggctagggcttcggaccgctggagttggggtcgcagccagttcctggcgagtgtttcctggctgctgccgcaggggcttgctttttcggatttcccctctaatctcgccggacttcttccccttcccccccacgcccgc

SEQ ID NO: 5551 - DNA, 805 bp, Homo sapiens
cgtcgtccgcggagcctgaccctgcgccaggacggaggaggctgtgcccatgtaactgtcctgaagtactgcggtggccccctcccccgcggctgggagggcaggcaggacgaggttggctttcctcgcacggtctctgggcgtgggcccccgccgcagctccgcggagcctcggtgtctcctgcaacagggggcggggggaacagcggcgagcagccctgggctgcggcttcctccccacgcccgagtctcctgcgcaccgccgccgaggacgcgcgcccgagcctagtccccacgccgcggcgcgcccgggctccctgctgatcccaggtaacttttccgcctctcggagtgggggactgcgagggggtctcggctttacgaggtgcggaggaagagcccgaggcctggggcgaggcgcgcgggacagtggggctgacgcgtggcttcggcgccgcgcggtctcccgaatcccgagccccgcgcccggcgcggccggggtccccaaccgccctcccgctcgccgggacccccaccgggccgagcctgcgcgccgcgccccccgcccgctccgcccgccgcggcgcagtagtggctgggccggcgcgcagagcctgagccccggcctccggcctgggggcctccctgggatccctggccgaaggggcgactcggtccccgcgtcccttctccgccaatttgcacaaatcccccgcccggggcgccatgttttaagttgcccctcgggctgggggcgagcgcgggccggcccctcccccggggaggtgcgggggacagggggcga

SEQ ID NO: 5552 - DNA, 2462 bp, Homo sapiens
cgagcgcgcggctgggaggcgggctcagggcggggcagagcgcggggaccgcccgggcaccgggcgcagccaacgagcggacggggagggcgggcccgcgagggctgagcggcgcgggctgtcacaggcgcccgaagcgcgctgcaggtggcaacttggaggtgccgccaccgcagctgcgggaggagcccgggtctggcggccccttccagcctccaggagctctttcccgccgccgagcccgagactggaccccggagaattcgaaggaaagagcccctgcggagggacctgtgagcagccctacctctctctgcccttgcgctactttttttctccaaggaaggttgtgcctgcgggctgcgaacaagctccgggaggggccccaaaggaaggcttcggtgactcaggtgagcgcctttctcttcttggcagccgggcgtaggccgggagcgccgcctagccccgtgggcaggggcgcgggtgcgggccgcctgcccttggctcgaggtcgatgggggagaaagcgaggaaggggcgaggctggcccgaccgggggctgcctggccgggtccgcccggaggcgacagggactctcagacgggcacctggagactagggacgagcagagaggtgctttgagggggacagagggcttgcgcccggtttaagctgaccgggatcgaccgcctgcgcgctgtgttggagctgccgcggaagccgggcgcggcgcctctgcgaaccccagagctagtgcgcggggcccggcgagcgcaccagtcttcggttcctcggagcccaaggccctggaggacgtcatccctctccgctcgggcaactcctcctccgccccctcttgcctccacccctccgcgccggccgtttagcctattccgagactctgtgcttttgccagcgcgcgctagttgctgctgtcactcccctccccgccctcgccggagttggagcgacctggggtctggctccccggtcccggcagcctagttgtgggctggacgcgagtggggctggccagttctttgcgaggagggcaggagtgagcgcgggctctctctctagtgctccctccgaatccgtccccgcccccctgcagctcgaaccgctagcccagagagcggagtctcagaagctagaccttgctcgccctggggaaacgcgggggaggggggggccttccgggaaggtgcgaacctcgcagatgaggccagagcctccgcctccatctcagcgtttcagcccctgctttcctgctttcaagtggacagtggctctgacctccgcattccggcttgtggcgtggggggcgctagcggcagtgtgtgtgtgtgtgtgtgtgtgtgtgtgtgtgtggtgtgtaaggatgagcgagtgcgatcctccgggaggcagaggcgcaggagccagttcccccagcccggcggagccgcagggaccgcctcccctcgccgccagctgcgcgcagctgcaccccggcaactccgcgctgccggctcctctcctccagctccagctcccggtacccccacgaccaacgcggaatcccaggattaaaatcatctggccaaagggtgcgggtgggggatcgaggcgttcccgaggcgaatgaggctgtttttcaaaatccgggaggcgcccctcgcccggcgttgcatcttcccgtggctcggctgtaaggacctgcggtggaggcttggcggaggcgggcccgcgctccagagagagcgtcacgtcacccgagaaggcgacgctgggggctgctgagcctcccaactccctttggcgcgtcctgctcagaagccggggagctcctggccggcggctggcggggaagcgcggcgcgggaggtggggtggcctggctggtgctgcgggagggcgccccgggcgcgtcaggggctgcgtgccgcggctggagggcgcgccgggagctgcggcgggctcggggcacccgagtggcgctggaagttgagccggggtccgcagggctcggtgaccgccctggcgccgccgctgcggattcgggagcagcaaccacgcggcgcgttcggccgccccctcggcccgccggccgcgtctttcgctttccctctgcagaagtgaagccgccgcctgggctcgctcgggctggcgacctttgcgccagaaaagcctgaggtgctggaggcgaaatcctcccgggagcgaagggcggcgtccacaagacaaggaaagggaagacgccgggctctggcgggtagcgcagtagcgggagggcggcgctgagcgccaaggatcccggaggcgaggcgaggccaggcggacccaacccagccaggaggtgctgcccccgcccttggggctctctcacaggcacctggtgttagttacagacccccgcccccgccagtccgcaactccctcgtaattccctctgaagtgcgatggattaagactgggccgcga

SEQ ID NO: 5553 - DNA, 990 bp, Homo sapiens
cgcatactctgtgcggcccgagtggtccggatggcacagcccaggtgtccgggctaaagttggcatctccaaagtccagaacgcaacttgggcgcgccagtacaaactcggccttcggcttttctgaagccagtcaagttcgcacagggcccccagcgcctggaaatctgagaggcgtggaagggtggggagtcccgcgaagtctccagtccctgggtgtcctccggctccgcgggggagcgggcctggagctaaaccggccggccgtaggctggagtagcgggcgccggagcgcgcggtggggatgtccgaaaaggagttagaggctcagtcggagagtccgagaacacgagggatgcctaccttgtaacatggcctcaagtttcttcctgtccacgcggaagcgctcctcgctccactccgggctgtgcagggtcgccccggcgaccaagtcgtcctcggagccgggcactggggagtcggtgctgcgctcgctgttggagccggggtccgactgcgccgccaggtagccgggctctccctgggcggccatggtgggcgcgcagcgctcgggctcccgctgccgccgccgctctgcctgcgctgccgcctccgctcgccggccgggctcaactggctcccagcgccgcggcgctagctcgtccccctgcagccgccgacgccaccgccaacgccgccgccgccactgagcccccggcgcatcccagccccgggcgccgcccacgccacccgccaccccgggtcgcggccccggtccgggtccagtggctgcgccgccccccgccagcaacgcccgcgcggaatgagcgcgccgcgctgcccgcgcctccatccgcagggctcggcgccccctccccgcccgccgcccctacagccgcgcgctcattggcccggccagcccacggggagccgcggcgggcgggcggcccctggcgctcacacactcgcgcgcgcacacacacaccacgt

SEQ ID NO: 5554 - DNA, 2274 bp, Homo sapiens
cgtgccgggttcgcccccacgccggacccccgactccgatccacagatcctctccgtgaggggttcctctgggcttagaacgcccccgcgcgcgcgtgcaggcacacacgcgcacacactcacacgcttgctcgcacaccgccagtgcctctccttcccacctgggacccccgggcagccgggctggatgaacaagttgcagctggccgcggcgctccgctagggggacgagggtggggagggggagcccagcggggcgcagggccgtggccagggcctggggacctgcccgcttccctccgcggccgccaagccctaccgctgggaccggcgaggaactccccccagcctctccgcagacgctgcacgaccgcggggacctcccggggtcgccagccgcgccgggcagggggcgacagggagggcagggcaccgggagatcgccgccgccggagcggccgccagttcccggcgatcgctgcgggcgcagccgaacaccagcggcctgggcccggccgctgctcggggtcggcggggaccgcgcagcgcctacgccaggcggcccggcggctgcaactgggaacttcaagcaaagttttctgctgttccttttgcagccggccagggactcaagagtgcaagccgcccaaccttgagcactagcccaggccgcggaaggacggcggccgagctggcagtcccggctggggagctcgccctcggggtccgtccgctccgcccgcccgaggactgggtgcctgccagccccacggcccctcgcccagcgcccggctcacaggcagaagcggtgtccggcccgccgcgccccccgcccggccccgacgccagccttagggctctaccaccagggagctgtcggcgtcccgggcgtcccgcgccggcccgcgcgcctcgggggcggcagaggcggtcccgcttacctgagaacgtctcgcccgccgcagttagcaaaagtccggccaaagtcgccaggcaagtcccaagtcccctcatggtgctgagtgcgggccgggccgctccccggcggcggtgggtgggcgcgcgagggcggagggggccgggagctttggttccgaggcagcgaggagagacgggtaaacagcagagcgctaagccaagcccccaaagtgccaacagttgcagaagtccgaactccagcggctccaggggcgcgggcacagggtcctgggtcctcctcccctgtccctggccccactcggcgtctggcgccgctggcagagggagcggagggcgagcccgcggagccaaaatcttccctcggttccggttgctgagctcgccgcctctccccttcccctgcccgggacccgggacccgagctgccggccgtggccgtggcggtggccgtggccgtggccgcgcgcgttccgcccgccgcctctccacaggcagccccaagcccagccccgggcggcggcgcgccgatgaccgagcccgcgccggctgcgcgcggggctcttgctccccgactgactggcggtgccccgcaggccggctgaagggagcgctcacgtcacggccgcccggcgccgccgcggcccgctagagggcgtgagcgcccgtgccccgccggcccgcgcccgagcgcctccgggagctcggctgggggcggccccgcggccacagccactaccgccgccgaagcgggcgtcagccgcgcggggaggagcggccaccgggctccccccgcccacctcctcgccccggccgcgtcttctattttggtagctggctctggggagggtgactgtggaagaggctgcgccgccgccagaagtttgtcccgggtcacgagccgcgagtagtttgtgagcgcggccgggcgggaccagcggcctgcgaccccgcgggcgcggccaggcggcttcgagcctggcgccggacggcgatgtcaccgcacagggccagctgcacccggagtcgccgggcctgcgctgctcggcggctgcgggaaaagcgagccaggagatcgctgaggctccggagggctgcgagcttctctacgccgcgggcggagcgaagttggcgggcgccgggagatggcgcgggagccgggagcgccgagccccgcgatcgccagcccgctcccggccgggcccgccgggtacacgccgctggccccgagcactggcgcccgggaagcagggcgcgcttctgctgttctgcgtcctcatcatgcctcggtgtcccgtgtgggcccgaagcgagccgcaggcagtacacggaaggcgg

SEQ ID NO: 5555 - DNA, 882 bp, Homo sapiens
cgaaggctgtggccgcgctcccgccggccagttcccagcagcagctcatcgcccctgctccgcgccttcgctccaggcccgcacggtctcagccccgcggggatcagcactgagccggtcccgccgccgccccagtgacgggctgctgctgcgggaagccaatcgcccagcgcttggaggagggcgacgaggccttccgcgcgagcgagtaccagaaagcagtcgggctcttccgctccatgctggcccggctggcgcagcccgaccgcggccggtgcctgaggctgggggacgctctgacccgcgccggccgcctcccggtggccctgggcgcgttccgtgtagccgggaggctggaggcgctgcggccggaggagctgggggagctggcgggcggcctggtgtgtcccggcctgcgcgaacggccactgttggcgaggaagccgggcggcgagctcaaggctagggagggccggccctggcgcccggcgcgccccgcgacctgcttggctgcccggggctgctgcacaagccggtgacactgccctgcgggctcacggtctgtgagcgctgcgtggagctggggcccgcgcggccacgggcgcgggcgcgggcgcgggcgcgtgaacgtagtgctgagccgcctgctggagaggttcttcccggccgagtgcccgctgcgcaggctggagggtcaggcgcggagcctgcagcgccagcagcagcccgaggccgcgctgctcaggtgcgaccaggccctggagctgtgacttggctgtggggccggcccgcctccctgacccctgtcaagcccagcggctggagctaacccgcgggcctgggctttcgagcgctttgtccaggcgtagggggtcacttcgc

SEQ ID NO: 5556 - DNA, 4359 bp, Homo sapiens
cggagcgtccaacccagcacaccgcctccggcaaactgcgagcaattcaaagcagctcgcccagtagggaggggagctggtgggaggggggtggaccccgccgcccgcagaggtggggagacctggggggcggctccgctcccaggctgcagcgtgggcctggtcccctgccaagccaggagcgcagcccggagccagcgcggcccccgggtccctgcgcttatggcgagggtcgcgggggaacagcccctggtaggtaacttgccgggcacccacctgagttctccgcaccgcggcccgaaaacctgggagcgtcccaggacaaagggccagccctctggaattagccgtgtgtgactagtgtgtgccagctcgtatgtgggggtcccagtgtgcaactaacttagctgctcaccgcagcctcggagaaacgagcacgcctttctgcacgtgtccagggcgggtgcggcgggcagtgcattgtgaacaaagccggccacctcccgcgccgcacctcggggacgattcccggacggttctccgcggagagccgggcggatgagagcgtggtgtgtgtgtgtgtgtgtgtgtgtgtgtgtgtgtgtgtgtctgtgtgtcttgtgtttccctaaggagccggaggcggcccgcgaggcagggacttgctctaacttgtttcacacctggcgcggtttccccgaagctcgggtggcgtccagggccgggcaggcacgcggaggaccagcagcgttcgctgcagaaaaagacatcgtcaactcccactcagaagcccacactgccctgagacctggtctttcattctttcttaaaaaaaaaaaatgcaaattgatggatgggtttcaattgatgcgtaaaatgcttcccttgagagcaagacaggagggccagggaagggggaaacaggcagttgacataactctcacagcctaactgccgagaattcggacttggaggtaaattcgaggacgcacccgaggagcaggcgaggctgcctcccagcaggacggcctggcaccggggcgcactgctggggacctgactccctcgtgtcccctcaccccagggactcgcagctggcccgcgcgccagggtacacacgggctgcgggagaaggtgaaagttaggatgcagcacgagctccgagagtggcctgggctgtgcctcctaagagaacagccgaggtccccggcggctctgggaagctgcccctgggccgggagagcgggaggcggcgacgcaaggacgcgcccggagcctgggcgcgccgggggcgggcgtttggctggaagtggggcagtgtctcctatgggaaagcgagacccggcgagctctttggctgcttttccagtttccgaggtgcccgcccccgcgcgcctgaggcagcgcagcccggagggcgaacgaatggcggttggcaaactttgagtgagagtgcgctccggatccgaattgccgaattgtggctgcggcagggtcggccgagacacaagttcgctttttccgcctgcccgatgggccttagggagacttcagctccagcttggtggagcgcctcgcccgagggagttgtgtcactttgctcaggggcagggagggcggcgccctgggcgggtggggaagggtccctgtggcccctggggtcccaagcgcctcttccctcgtctcccctcccaccggcccctcccagtcttctctgcctcgctccttcccggggctggctggaccggcgcggacttgccccagacctacggggagcgccccaggtctttaatgacagcttaaatgtggctgttggaaaagtcgaaagggatgtggctgacgtggggcgtgtttcgctcctttgcaagagtcggaaagggagttgggagccgcgcggctggccccaggcccccgcgcctcgccgccagcaagtaggtgggggagccgccgccgccgccagccccatcccgctcccaagcctcgcccgctgcgccctggccgcgggcgccgagagggtgcggggcctcgccgtgcctcctccaccctgctcattaacctgcctgctccgctccgctccgggcggccccagacacgggtttcccgcggcagcacccgcggcccgcccggcgcagccgccgccccgaccccccggctccggggggcaatgagggggcagtggaaggggcactgctcctcgggcattacttagagaaacgagaccgtcccgccctctcgccggccctccctctctcccgcccgggcccgcgcaattctccgccagagggtaagttgggagtgtttcgcccccaccgacagctctccctccctttccttttttttttccttcaaagttttcttagaagtgggagccgggtgggggaggaagaaggtctggtcagcctccgtcctttaccctatctctccggtctaacttgtccccccctcccccctcccctccatcccctgcgcgccgctgcccctccggagctgcgctcgggaatgacaattggagcgcggctcctttaagagcccggctttgcctcccggtagctgaaggtcattaaacacaaaagctctcagcgctgcggtccaatatagcgcatgcgccctgcccgaggactggcagagagacggcaatatggcgagaatgcctggcagcggggactgtaacaccagcgcgggcggcagcgccagcgctgccgccgccgccgccgagaacaatggggagcggggcgagggcgagcgcggcgcggggggccgcggccgccgccacagccgtccgcactactgcagcgcgggcgaggaggaggaggaagaggaggaggaggacgagatccaggaggtgcagataacgggggacgaggaggaggaggaggacggaggtggggggctggaggaggacgaggaggaggaggaagaggaggagatggggctggactgggacgagcccctggagcccgaggactcggccggggaggagctggagcccgagccggtccatatgatcaatatggaccagagcgccgcgctggagcccgaggcgccgccgcgactgctggcgccccgggcccgcggtgggccgcccggggacggctccgagctggaccccgacgtgctgcagcgccccgagcgggcccggctgagcgagaacacccggctggccacccgctacgccgtgcgcatcttccgggagtacctgagcgagaaggcgcagagcccggacttcgagaccatggacaagggggcgctgtgccgcgtgctgcgctccttctatgccgaggcccgctccaaaagcggccagctctacagcaagtcgtcgctcatcagcatccgcagctccctcaaccgctacctcaatgagcccccgtactgccgcacgctcgacctcaccaaggaccccgagctgcgcagcgccaacctgacgctggccgcggtcatccgcaagctcgaggagcagggcgccgggccggtggtgcagaagcaagccatcacgcgcgccgacctgcgcaagctgtacacctccagcgtcttcagcaccaacacgcccttcgggctgctcaacaaggtctggttcgagacgtgcatgtacttctgtacccgcggccgcgagaaccagcgtgagttggaggaggactcttttgggctggccatggacgaggacggtcgcaagttcgtctacttcaagtccctcgggccctaccacaagtcgcgctcgtcgtcgtggagcaagaagcgcgccgagagcagcgacgaggagaacttgccccgcatgtatgagacgggcaccgagttctgcccctacgccagcttcgtcaagtacctgtcgaaacgcaaccctctctgcaaggcgttcttccagcggccccgggaccactgcagcgagggcgatgtgacctggtacgagaacaaagccatcggcaagaacttgctaggcactcggatgcagatgctctccaaggcggccaagctctccaagacctacaccaaccactgcatcggcgccgtctccatcgccacgctcaacagcatcgcgggcattggcaccaagctgggctcgcccgccccgcagggctgctacgccgaggctctgaacggggcggcacggcaccactcccaccacccccccacccatccctcccaccaccaccgcccccagccgccctcgctggggaacacttacatcctccccaaagacagccaggtcgggcccgacgtgaaatccgaggctgcgcccaagcgcgccctgtacgagtctgtgttcgggtcgggggaaatctgcggccccacttcccccaaaagactttgtatccgcccctcggagcctgtggatgcggtggtggtggtttccgtgaaacacga

SEQ ID NO: 5557 - DNA, 2762 bp, Homo sapiens
cggggcggtgctcggcgcactctaggcttccctccggcgaccccccgcgggctgcagcaaaatacggggcgcttcggcggggcgggggcgggcggctgccgcggatccggccggctacagccgcagcttggtggcctccgattggccacgacgcgggcggggaggctcggcggaggagggaggcgggggcgagggcggcggcggcggcgggaggaataggagaggggagcgggccgcgcagccaggcagcgcgtggggcgagcgcggggagagcggcggcggctcgcccaggtcgcgcagcggaggccgagcggggtgcgcggtcggcgacggagggcggcgcgcgcgagtgagcggcgcagggcgaggaccggcgggcgggtgccggtgcgcgggcagcaggggcggctgcggcagcagctgcgcgggacggagccgcggcgggagagaccgcgccggcccctcgcctcacccccttgcggccgaggccggagaacagtctccaactcgccgggggaccggaaagaggagccgagaagcgcccctcggcccccacgcagcggaggcgcggagtggcgggactgctgctctttgtgggtgcagcacgcacgacccggagcgccctccccgcggcgctgtccccggcgtcttcgtcgcgccgagcggccctggagcggggacccggaggaagcaaaaccacgagcccgaaacctcgcgtggcggagctcttggggagcgccatccgctccacttccacctccacatcctccaccggccaaggtccccgccgctgcatccctcgcggcttccgctgcgctccgggccggagccgagccgcctgcgctgccacagcagccgcctccacacactcgcagacgctcacacgctctccctccctgttcccccgccccctccccagctccttgatctctgggtctgttttattactcctggtgcgagtcccgcggactccgcggcccgctatttgtcatcagctcgctctccattggcggggagcggagagcagcgaagaagggggtggggaggggaggggaagggaagggggtggaaactgcctggagccgtttctccgcgccgctgttggtgctgccgctgcctcctcctcctccgccgccgccgccgccgccgccgcctcctccggctcttcgctcggcccctctccgcctccatgtgccggatagcgggagcgctgcggaccctgctgccgctgctggcggccctgcttcaggtacgcggcggtccccgcgggccgggccacgggcggggtggggcgggcggcgccgggtccctttgttccccgcgccgctgcggggccgggctgcgcacccgggaagggaggtgccacgccgcgccgcgccgcgccgcgcggccggtagctgcgcaggcatcgggctccgtccgggcgccggggcagggttgccggggccagtaggtctctcgcgcctttcctggcggggctctaggggctggattgcgggtcccctctgctccttcttcggggccgagcaagctcgcggggggtgtccccaggcagcaggagggtgaggcaggataactcccaggttttgcagttttctgtgcctttcgcccctcgcatagtactttgctccaatttttttgtttatttctgcagggatgggtcgcgagtttacagtaggaattctcactctggtgtcttagttacgggacttgcctccaccttaccccaccctgcacccgtgcgcctcccggtgctcaagggctctactgtcctattgtctttatcccagtctggagttgcctccttttcttcttctcttgccctcacaatattctgtgttcgtcccacctggaaagaaaatctggccctcttgcccggaggagtctctgccggtcagcgcctgcctgtagaacgagtctggcctctcacgcctagtatctcccccgggcgagaagttccgttacgcggctgctcctttctctgtccggctgcctgtgccctatatgcgccccgggggcgcctttgcctggagccttccgtacttttcataccctcgggagagagccagcgagccttttcatttaatctctactaagaggctcctccgcggcaggaagcacctgctccagtccgggcgcaggttccctcgccactgcacgctgcgggttcccagcccgggggcagcccaactttccgccgcctccaacccgaggatgcccccaggctcctcccgaccagccagcccaggcctggaggccacttcacacagcctcggccgggaccctctagctgggcgggtgcagtgccctggtcccaagtcggtctccgcctgccgtggggtccctcgaaggttgcgggaaaggggcgtgcccaccctcgccgcggggcaggaaaatccacggagggtccccctgcctgtcgccctcggggcaaggggagaggtgctctactgccagctggcagccccgaaaagtgcggacgcagctcggaagtgcctgctccgggggtggagacaggtggtgtggattaccccgctccgtggtcttcacgggtcagggcctggcgcgctccggcccgccggggggtgagtgctgctggggcgggggcaggggctggacggggctggcctccgcagtctctcgcgctttctcccgcaacccctagacggtcgtgggccgccgccgcgcggagccctgtccatggtgcgccatggtgcggcacgcctgtccctgcccggctccacgctctcctcccgggtcgt

SEQ ID NO: 5558 - DNA, 338 bp, Homo sapiens
cggagcgggggcggcctggagcgctgatcgggcgccgaaacgccgggagtcgggggctaagggctcgagccaggaggccccggagcagcagccgcccgctcctcacgccgccgccgccgcccccgcggttgcctggacacgggataaccgacttggggcctcgaccgcagcagagccggaggggtgggcaggcgcgggtccgggagacgcgcggggaaacgcgcggagccggtgagtcgggggcgcttgtgcctcggcgcgggcgcttgtgcctcggcgcggggcgctgccgggcggcgcccactccccctggccgcccgcctgcgcgactcccgcgg

SEQ ID NO: 5559 - DNA, 1435 bp, Homo sapiens
cgggacccgtgtgcccttcggggctcaaaggcgctgggcgggcggctgctttcgggagaggcgcagccctcactcctggaccacggggccagtggctggggaagcttctggggcgcgcgcggggaggcggcgctgcgctccacctgcccagccccggacgcagcccgggggcgaggcgtctagggaccaccccaattcaatattgggatttttaataaaccaaggaatgggattttaattattgaaaacccagctcctctgggccagaatggtgttgggatggtcctggtcacaaaatattaaagagaccgaccgctaagggaacaggaaaaacgtccgagacagccgttgcaattacgaatggaccagacttggtagcacggggcattgattgctggtgcccaaccggaccctcctcccctcttcccatcccttcccccacccaaagcaggctcccgctgcggccgggacctcgcatccctgcaacgtggccggggctgcatttttcatgagcctagggtgaacaggtgcgaagtgcgctgggagcatccggccagcggccgagcgcggggaacatggagagcgagcgcgacatgtaccgccagttccaggactggtgcctcaggacttacggggactcaggcaagaccaagacggtgacccgtaaaaaatacgaacggatcgtccagctcctcaatggctccgagtcgagctccacggacaacgccaaatttaaattctgggtcaaatcgaagggcttccagctgggccagccggacgaggtccgcgggggaggcggcggcgccaagcaagtgctctacgtgcctgtcaagaccacggtgagtgactcgccttcctctgttatttgtctgccggagcagcccggcggggagggaggaaggagagaggcgggagagagggggagccgtgagccgccgttggctcgtgtgccccctaccttcctcaaccccctccccaagtcgtccccactcgcattagccaggcgcgttttccccactgtacagtctttgtggtcctttattttaaagcggcagcgcacctccagagctggcctccctccccgcctcgggttcccggaccggctgcaggagcttccttccccgggtcgggcggcggcgtctggcgtcctcgggctgggccattgtcccatgtccttctctgggcgcctggcgcgtgtcccaccgccgccaccgcgcctaaaggccaggctggaagcccggccgcacgctctgagagcagacgagtctgatcgatagtctacagtgtctccttattggcataaagcccgaatgtagcgctagcggtggatgtggggttttccccaggacactgtcaggttttatcgttagatcgctgcccgggaggcacggggcagcccgaatgcctcgatcactcccagagatcgttgccgcga

SEQ ID NO: 5560 - DNA, 510 bp, Homo sapiens
cgagcgtgagtcagcgctgaaggcccagagcgcgctgcacgagcagaagactctgcccggggtaagtggcgcccgccgtggcgcaagcggccgacgcgccgacagggggcgacttcgggaggccgggcggcggcgcggcgcgcggggagaggacggcagggcgcccgccgccccgcctgagctcgggagcccgcgcgcccccccaaatccctgggctctcggccgtccgggcccaacgggatccgggacaggggccccacttggccgtggccgtgaagttcctgcgcgggcagcctggggcgggggagcggcgcgtcccgggtccccggagcgggagctgcctccgccgggcccgcgggccgcgtgcgcgatcgagtccgcccatcgagtcgacgcgggccgctctagtgggggaggagggggccggcgtgggagggggcgccgcaagtgagatcaccgcggtttatttaaggagccagccctcgtctttgataaactatcgcgcctcgg

SEQ ID NO: 5561 - DNA, 2722 bp, Homo sapiens
cgaaagtggctagccgagggccggcgggggttaggccagccgctcagccccgccgccccagctccccagccccgcagcccgcgggggagcgggcgcgttatttcaatttgccaggcttctgaagcgaagaggctgccctgaaaaagcaaacatgagagaggacggggtgcaggtaaatatcattaacgtgaaaatctgctaccccagccaagttcaccaccagtattcacccctacaggcggggccgctcggaccctgctcccggctccgcgcctgccactccctttcccgcgcagccgagatgccagccccagtgggcctggcggggagtccggcggggtccggaccgggcggctcgacccccggtccccacggcaggaacgactcagcctcgcacctcgggagctgtaggtgccgaaaacgaaacccgcgggggcagcgcacgccgcgcgagtctcggtccggcggcaacccagatagcgattcaggggctttattcttttgatggtgattaaaaaaatatattctatttgaacccgtaaagcagacgagggcaaatcaagccatcccccgcgctggctcaccggccaccgcgcccagcgccttcctccccctccggcgggcgagcgggcaggggcgcccgactcctaccttcctcccgccagccaccgggggaccagccgcgctctccggggcgggggaggccgcccgggacggggacccccaccttccgccttcggaagcgggttggggcgggggtcggaccccgagtctctactccccgtccctctgccccccggcgcggcccgacagctcccagccccatcctggcaggtggcttgggtggcggtagatgccgggcgggaggaagatgtggggctgctctggcaggttgggggtgcgaggaggaaaaaaaaacagagaaagacacacacagagagacagggagagagcgcgcgcgagagagctcttgtctatagatttatccacataatatatatttatgtagctttttttctctcgacactgatgaatgcgcgctcggatccccgggcggactccctccaagccggctcgcttttctagtctaaataaataaataaagccagatggaagaaaaaagcgcccattccacctccgccgccgccccgcccgccatccctgcctttgcttcgcccgcctggcgccctaatagagcatagcttggtggataaagcccccctacatacccacacgaaaataaaaatcactatttttaaaatacaaaaagttgcacctgctgctattacaaaaagaacccccaaaaggcaaagagaggaggccggctgcccggctcctcacggacacccgctccccgcggccgccgggcccggaatctcagcgcctcccgaagagccatgcgcctggcgctatttatagccgggggccgtctcggactgtaccatcgccacggcgcggggccgccgacgggggaggcgcggtggccgccgccccacgccgccctgcccccggccgccgcccgccgtggcgcgggcccccacagcgcgcccattcccggccccccgcgccctcctccgcgcgcgcacactcgccacccccacccctggtctggctgggaacttgaaccggtccagcctgtttaaacggaaaggacagagatcctgtctgttcaatgtaaaaaaaaaaaaaaaaaaaaaaaaaagaaaaaaagaaaaaaaaaatcagatcagaccgagagagagaggagagagggagagagagagggagagagagagggagagagagaggagagggagggagggagagagagaggggggagagcagagagagagcgcgagcgcgagcgagcgagagaagaggagaaagagagagagcagagagcgagcggagagcgaggtgtagagaaaccgagggggagagaacccgagtgtgtgtatgcgtgtgcgtgtgtgagcgcgagcgagcgagagagaggagcgagagagtgtgagcgagaaagaataaaaggaaagaagattttctctatgtatataaagatggccacgttagcaaacggacaggctgacaacgcaagcctcagtaccaacgggctcggcagcagcccgggcagtgccgggcacatgaacggattaagccacagcccggggaacccgtcgaccattcccatgaaggaccacgatgccatcaagctgttcattgggcagatcccccgcaacctggatgagaaggacctcaagcccctcttcgaggagtttggcaaaatctacgagcttacggttctgaaggacaggttcacaggcatgcacaaaggtgagtacacctttccctcccaactttgccggggagcaggagcgggctggcgggccgaccggccggccggcgactgacgagcggcggactaagcgagaggaagcctcgggcgggcgcggtggagggaggcgctcgggcagcggagaccagagctggggtgcgtggggagctgttcgctggggcaagactgggttttgggcgaggtgctgataggaacgatgccatggagagagcagcgggcgccgatgaagagaaagagagaggggatcgaggagacggggcttggatttttgggtacagcgacctgaaagatggggatggggaaggctgcaccggtcgagcccaggacgctgagcggacggactcgcgggctcctggccggccgaggaccgagggtgctgtccatcgccgt

SEQ ID NO: 5562 - DNA, 1133 bp, Homo sapiens
cgagggcggccgcccccaccctcgggggtccccctaaaatggggtggggggaagccaccgctcgccctgcgtcctcgcgggtgtgccctgagcccccggccgcccgcggcgcccgcccccgccccggtgcctgcggcgatccacgctccgaagcagaccccgaaaggaaaaagcgatacctctgtttcgcacagagccaaacactggaagcacgagatagccgacgtggaccaggaccatcctggctcctcgcgcggcggcggcggcggcggctgcgcgcgggccctttgtggcgcggctccggggcgcgggcgcgggcggcggcggggctgcgggagccgccggggcgggaggcggagcgcggggcgcgggcggcggtggggcggcggctggcggggagacagatggcccatggaaaggctcccttcccggcccctctcgacattcaaaggcgctggggccgcagctgccgccacacaaaggcgcgcgcagccaatgggagcggagcgcagcgcggcgcggcctcgccggaaccgcgggggacagcggggaccgcgggcgcgcgggtggcggagggagggaggggtgacggctggaagggggccggcggccaatcgctgcggcccgctgcggggcgcgagggaggggtcagccccacgggaagcgtggagcccagcgcgggtccctggccgcccgcgggccggagagggcgcgcgtgaagcgcccctgcacagacatgggcggcgtgaacacggaacgtgcacacatggagagggacgtgcactcagacatgtggaggtgcgttccttagtgcagagagacgggcacgagcgcccttagtgcacacgaccctgaggtccctgcacaccgcgcacgggtcactcggggacgtgcgctcggaggctggcgcacgtgtagagcctgactgcgggcacaagggaagctggaatgcgaacaagcagccgcaaacaggacccaggcactgtcacacagacatgcacacaccaaacgccttgttaacgcaggacgcgtgccaagaacgcattctcagagacacacagagggaacacacgatgcagacacaggtaagacacgcacactccccaggctctctgcctggcgcaccgcgtcgt

SEQ ID NO: 5563 - DNA, 2401 bp, Homo sapiens
cggcctgaccggggcgccccgccgtcctcccagtgtaccccaccgctctcggctgggggcgcagcaccttggagagaggcgcctggccccgcgcctgggctgggggcgctctaccttgcgccctgggggtcaggggcgcttgccgggccgctgccgaggggccctgcccacccctgcccagcccggagcccaggcgagccagcgcggcgagcctcctcccctcccgcctgggtcgtcctgagtccgcgcccgctccagttgctgcagctgctgctgctggcggctgcggggagcgcggggcgcgcgccgaagaggcttgggcggcgaggacggggacgaggaggagtcggaggcggcaaggaggaagagcgagcggaggccgaggggctcagcggcgtggcgacaggactagggggtcccgagaacatgggctagcaggcggccacgggccggcggccggacgcggtgaacctgccgcggccgggcgcgcactggcgcggcgagccggagccgagcgcagccgggggaggagggctggcgcaggggcgcccgggcggagggggccgattatccattattaacgagttaccacctaataagcggagagcggctcgttagccgcgcgggaggcgctcggggaagggggtcaccggccgagcgcagcgcacacccgtggcgcacggcgggcggcgcggcgccgaggacacccgggaccgcgcgcggagccggggcgggcccgggggcggcgcagaccccgggcgcgggcggcccgcggcgccccctggctctcggcgctcggggccagcgcagcccggggcgagcggggcgcgggccggggagggggagctgcccgcgcactccatccccctcccccccgggcgggcggcggcggctcgctgtatatatctcggcgcaccccgccaggtcgcgcacagcgccccgagcccaggcgcctccccgcccccctcccgcgctccgcggcggcggcggcggcggcagcagtagcagcaatatggctgttgatgggtgtttggggtggcgctggcggcgggaggagctcccccgagcccctgcgccggctgcccgttgctagctatggcaaatggtggcggcggcggcggcggcagcagcggcggcggcggcggcggcggaggcagcagtcttagaatgagtagcaatatccacgcgaaccatctcagcctagacgcgtcctcctcctcctcctcctcctcttcctcttcttcttcttcctcctcctcttcctcctcgtcctcggtccacgagcccaagatggatgcgctcatcatcccggtgaccatggaggtgccgtgcgacagccggggccaacgcatgtggtgggctttcctggcctcctccatggtgactttcttcgggggcctcttcatcatcttgctctggcggacgctcaagtacctgtggaccgtgtgctgccactgcgggggcaagacgaaggtaacgcgcgccccgggcgcccgccctctgcgccagccccaccgcttctcggcgtcccctgcagcccacctcctcgctccgcgccgcgccgtgcctccctccatccccgcctgccttcccctcgccgccttcccttccctcggctctcccggtgctctcggatcggggcagcgggcggcgcgccgggggtgaggagttgcccccagccagtgcgctccgggacgcggacgctcaatcctgtcctcttgtttattgtagggttgttggcggctgcggctggggccggggtcggggactcacaggctcgggtgccgtggtgcggggtggggacagccaactcagcggggacggaggaagctgggggcagctgggtgcgtgttttgcaccgctcacctgccggggctcggctcctggcggtgggcgagagggagcacatccgcccatactttaggaacctgttggggagatgagttcgtggggtcagaaagaagggaaaaatcctttgggcaagggagagaataattttgcacaagggaatcccgggggaggagcatggcccgagataacagggggacttcgaggggcgagagaagttggggagatccatcccactattgggggtagcccacggggctgccacttttggaatgtgtcgaggtcgcatatctgatgtaacctcccactccgtcccttaggtgctctagtggaacataccccaagttcttcggcctctgttcctttgcccccaggccacccactttgggtccccggaaatgccaccagcagcgcggagctggagcgggagtccgcctgaggccgcggttttacgcggagcgtcttccctggcgctcgaggtggctagatgtcgtcggctttagctattcctggtgcagacgcccaccggcactgaggctggcgacaccttcga

SEQ ID NO: 5564 - DNA, 769 bp, Homo sapiens
cgctgagccgcagggaagctgcggggccagctgagtagccggcggcctgttgggtccccagtgtcgcgcgacagcacgacccgagacaaggcacctggggctggtgccaggcagaggccccgcgttgcgtggccggcggcaacagcgcctggcggtcggttccgggcggggctgcaggcgccgggttcccgcggccgcgaggcggggctggagggcgctgcgggctgcgcggaggctgcgggaagcgcggggagcacgcggagcccgactagcagggagatcgcgtcgcgccgggcacaggcacgggacccgcgctctaggagggcgcagcgagaggcgcactgcgcacccaggggctgcggtcccggccgccgtgcggtgacaagctgactccccgccgccgcccagccaagtccgcgcggggtgctggcggagatgtcgcatgggaggcttcttcaacgaggtgcaaatccaagccacctcgcctgagtgaatgaagggacggcgcggggcgcgggtggggttcaccgtgacaaaagcccagtacctggttcaaactttttttttttttttgcccgcaggattagaacatccgacattaaaatgtctcagtgcagcagaatttcccagcgacttcggtggcgggagagcagcacctctcaggcacagctgtgcgcatccctcgggccccaccgaccgcaccatctgaccgcgggaaacgaaatctgagctcaggaatttgaactgccccacgcacgttcgttcccgg

SEQ ID NO: 5565 - DNA, 1169 bp, Homo sapiens
cgggagccaggcgcgcgggcgggggctccaccggtcactccgaaatcgcagaatgccccagggtctccgggacttgtgggtttaggggaacgttcgggacgcggagcgggcccagttcacctgccggacgccccctccgtccatccgaacccgggagccccgcaggagggacccttctcgtccccagtgaccacagtccggacccgggctgcgctcggcgggcaaggctgggagctccccgggccggaggacggggcgcatgggctccgggtttgcagaattcgcggctgcgggagctgggtcttctctcccccaattcgggccgcgccccggctggtcggaggaggcagagtaggggtgcggccgtgtgtccgagcgggagtggggcgttcatctccggggagaagggggaccgggaaaggcgcagcgcgccgagcattcgcccacaccccgcccgctctccgcgcgagccgggtgcgcccccaaccgaaccggggcgggcgccgggagagtcgggttttcccgagacccgcgccccttcctcgccttcggctcacccgggctcccgcaggaccagcgcgaatagacggggcgatccgcggccgagacctccatccacgcgcgcggcgcggccagaccggcgagcgcctccggcccgacgcccccctcgactcccggactctgggcgctgagcgggagggggaggcaccagccccgcccggccccgagccgcccccgcccccttggcccgaacagggggattccaaggtccccttcgaccctcccgcgcccgcgcgcaccgcgcacccggagaagaagctgcgcgcggaaccatcagacaggagcccgcgccccccgccccaccgcccactgcggccccggctccttcgccgcggaccccccacccccggccccacggcgcgctcaactttacctgcggtccagactccgcgagctccgggctccgcttacccggccggcggcctcctcggggcggagcgcggcgtctctggagccggcatcccggactccggcgccgccccgcgcaccgcccccgtcccagccttcagtggcgcggcgccccctcgcgacatccgcgggtccccaggagcgagccgaccctcggctgggtttggagccggggccaagtccactcggagggagcacgg

SEQ ID NO: 5566 - DNA, 6036 bp, Homo sapiens
cggtgcggtcctgggcactgaccacgcccacatgtgatggtctccgtaacgtgcaggctccgctggggagaggccagcgcgggctccaggtcccagggcctcgggctcactgccgggactcccctcagtctcctttccattggcctcgcccgccgcggctgcgccgggccgatactgactccagcgacccttggggtcgccccagctggtagccagcatctcctctgggatggggtccaaatgtcagccggcccggcgtctgcaccagggtcccatcgtacgcagcccgctgccttcccgtctcccgccaaggggtgcgacaggcagggggatccgttggcctctgcccctcccacccccacccttttgggctccgccggagcgcttgggctccgggttccctgaacaccgtctgggcggggcttcctgccggggctcggccacacccccacccgcactcccacagctggggctgagaatgaaaacaatccctgcaaagccctcattagcgaattaccggcggctgcagtgattacaggcttcgcccctgcgcgccgcaaaggcccccagctggcaggcccgccgcggcgccgccctcccccagcctcgccccacctgcggcgggcgccgtcacctccccagcgctgtccctgcgaagcagcggacccagacccagacccggacccggaggctaccgcctccctcgcccggggtcaagcaacggcttccgacaggggaagggccgcgcgctcagggctgggccaggacgcccttgccagcgctccacggtcgggacttgaggcctagcggccgccccgtttcctcctggacctccgcggcacagaggcaaggtcttccggtgaggcgcgaggtcgccgtgcgctgggcgggggttctgagagtggtggggctcgggtgggcagaggccctggggcgacctatgggggacgtctacagcgcaggcccatggggcagccagaccgcgccgcagggccgggagagaacgttccagaaggccggcctaggccactattccaggagggtggcggaggcagtggccggggctttctccgcggccgagtcggtggtggctgcgaccaccatggggctgggcacatagttgaaggggggtactcgggccgagcggctgggggagccgtgccggctggcggggaagccccccacggcgacccccaggccctcgtgcacgaagggtgcggagatgggagccttggcgaggctgggaccgtccacgtcgctgccgaggagggagagctggccgccggcgggggccccggggggctccctggtctccaggctcggggacgtgctggagttggtcttgggggcggcgacctcctcggtctggaccacggcgtcgctggtcttgcgcggcgggggcccggccggggcgtcctcgggcgtggagccccgcagtggcagggccgtggcgggaagcgtgctgcgcaggatgtggggcacgtcctcatctcggatgcgccgccaggtcgtgcccggcgcggccaccctggggagcggccggggctccccgtcgctgctgcggcgcgcggcgtcggctgaggcaggggccgcggggacggcgccgtcgggcctgcgggccacgctgatgtgcggcagcgacgcgtagcgcttgacagtctccggccgggcggcgggcgcgcgcacaggcaggcgggacgggctctcggaggtggtgcgccgggcagggcgctcgccagggctgggtcgggccgcggggggccgctgccgggccggggccgggccctgccggggtgccgctcggagctcttcgcagcgcgaggagcagaggaagacggcgggcagcgcgggccggccgcggcggggcgaggcgccctggggggcagaggccgcggactcggccgaggacagctcggagcggcggcgccgcaagcccggcgactccttgatgaaggttagctgtcgccggaagcccgagcggtcggaggactcgctgccgctggagagggctgaggccacacgcaccaggcccaggcggcccccgcgcgcccccgggcccgcctcggtccccgcccggcccctggggcccggctccgggactgcccgagccagcggtggcggcccacgccgggccggcctctgcatgaacgggatccgcacgggcgatctctgcgtcttgtgctgcttcgccagaagggtgcgcgccggcgttttgggcaccggggaggctccggggccgggcagggccccagcagcctgggtgaccggggggcgctttctgggcaggggctgggaggcgggcgaggtctgggaggagctggaggagggggtcttggcgaggcgggcgggcggtgtggcgcttctggggggctggctcagcgtcgccagctccgaggtcttggcaggccggtgtaggctccgcgaccgctgctgcccggggctcgggactttggctggagccgcgggctgtgccaggcaagggggcgccaccttccgcggtgtggcgcgggggccgggggtccctttgggctgggcacggggtgccgggctggggacgtagatcactgttcgtccccggagcacagctggcaccccgggcgtggtcttctgtgtgccacgtggcttctcggggcctgcaggggaacgggggctcccgctggtcttgactgaggctgcgccccttttctctggccgccgggcactgcccatttctccctccgcctgtcgtcccttcctgtgcttggggggctgtagggtggatcccactgacagcccggatacgaaggacaggatggagtcggactcggacgaggcctcccgcgtggcagctgctgcctggtgcagccacgtgacaattgaattggcgccctcctggatggcgcgccactccacgctatccaggtcggaggcccggtccgagcccgctgcctcctcgccgcgttcccgggacccctctgcgggccgctcatccagccgggtggctcggggcttgcggcgccgcaggccagacacggggggccggcgcctgggcagggccgagctgatgcaccgctgcagaagctcctccgcggcccgcgggctgggcgagctgtcgcgtccgcctcctgggcccgggtccttggtgaccgcgggctcccggcctcgtggatggacggccggcggctccgagggctcgggctcgctgagggagctggcggaggagctcagggagtagcagggcggggtctcgtcagcaatgaggctgggctgggtccgggcgggcggcggggcagctggtgcagccttggacggggcaggggcctccttccggccctgcggacgctcccgcgtaaaagcgcgagggatggccgatgtgcgccggtgggttggcgtgggcgcggccgccgggggctcctcgtccgagtcgttgccgtagaagcagtacacggcctcctcagtgggcgtcgtgaggcacagcgactggagcgccccgtccccgcgggtccggccgggctttgagccgtccttgtctgcgggggcgctcgggggccggcccaggggcagctccagccctgctctgttcttgcccgcgccccgagactgctccgcgctgcggccggcgcctcccgccttgtgccggtgccccatggcctgtctggcagaggtggggcggccggtgggtctttgcctgcccgctggtcccccgggctggtccctggggggtccctgcagcgtctcgtcgctgagcgaggcggcgctagagaagttgaccggcgtgccctccgcggagtcagtgcaggagtcgtcctcctgggccggggccggggcgggcaccaacatgtagacgggcacggggagtgcgcggcgacctggcaccagcgcggaggccaccttgcgcagccgggcaggcacggcggctcccaggcactcccgcagcagttccagctcctggtccgcggcgccgcgagggcgagaacccgtgggcgccggcccctcctcccgccgccggtgccctgcaaagtggaggccggcgcccccggcgcccccgccgcgctcggggcaggccgagggcagcagccgcagctccacgtcctgctgcacgtagtgctcgtgcaaggccagcgcgctgaggctggaggcgcacgagaagttctcgtctggcttctccacggtaaagcgcacgctgcctgcgtccagctcagatggcagccggcagcgctcccggcagtcggcgatgtccaggaagcgcttcacgtagctctcccactgcaggctgaactgggtggcctcggggggaccctgtggcgcgggcgccagcggtggcgtcttgctccggctgggaggcatggtctgtccggggctgtcgggcagctcgctagggctgatggtgccgctgccctgcccgctgcaaggttcactggggatggagctggcgatggacgggctctcgaagctgcccagcgagctcacagagctgcagcggctcagcacaagcggtgtctcctgcacgtagttctccgacgagctggacggcgtggcgtcttccacccccaggccccggcctcggttacgccggggagccggaatggctacgggcagcgaggtggccccgggcgcccgccacgtgctgtccagctcagcctcgctggggccggcctcctccagcccctccagggaggagtcactgtcatccaggtcaccaccctcgctggggcctgggcggccggccgaggacagcgaggaaagggagctgcatcgggacagcgagagtggcccctcttgcgccgccagtttctgcagtgccttgctggccacagacagcggggcagccgccagcttctcgggaaccttgctcaggtggtctgccggcagccaggcctgcttccgggcccctggagagattccaggccccgcgaggggctctgcacccgcccttgaggcaccctcaagcagtggcacgtgctgataggtaggcgacagcttgatggtgcgcacgcgggcgtcggcggaggtggcctcgcgggccgggggctcggcctggcagccgggcaggtcaaggtcaagccggctgggccgaggctgcccacacctggggtcctcgcggcgcgaagccagtgcggccagcgggcagggcagcatatgttcgcgtgggcagtacccgtcgctggcactgccgctgttgaggctgtcgttggagaggctggcgtgggccgccttgagccgcagcagcgggtgcgcccggcttcctgcctctcgccgcccgccctccgggccgcggcatggcgagcaggactgggcgcggccctcccgtggcgcctcctgtcccgggtctccagagctgaggctgaagctatcgtcggacgaggtgtgcagggcggagatgtcctccaccagctggtcgatgcgcgccactgcaagcgccagcttggccttggccttggccgccacggctgcctccccactggtgtccttctctgcctccttgccgcctcggcgggtgggcggggtgcgagccagcgcctgcccctgcaggaaggggctgcccaggaagagggacagcgcggcagggctggctggctccccggtggccgcggccgcagccagggatgacggtgcatcgtcgtcgtcaaagcagcccgaatcggaagcatagtcttgggccaggccgtccaggtgtcgcaggggcggcagcggcttcttagtggcggcctcggctgccggcgggccctgcttctccaggtgctccagcgcctgcgcgaggtgccgtgcgtccagctcggcctccagcgcccgctgcttgcgcacgtacaggctgggcacgcagctgcctggggacacggcggtggcggccgcctggtgcttggcgggccgatgggccagcaggttgcgcagggcggcggcgctgcccatggcgatcatcttgtgcttggagtgcaccagattacgcagcatgcccacggcgcccaggtcccacagcagctcctggtcacgggcgctgcgggccgacaggttccagagcgtgccgcacgcgttgctcacgatggtcaggctgtgcga

SEQ ID NO: 5567 - DNA, 3400 bp, Homo sapiens
cgtgcagctgcggggcacccggggctgggttcacctgcgcccggggccgcacaggcaggcagagagagccgggttcagggcacaggcctgtctcttgtcccctgcgcccggggaagggggcggcacagagccagtgaccacagcgcagcgcgcacttgcccccgcaggccctcggagcgtccccgcgcgcaagaaggcgcagaccgcgccgcccctgcagccgccgccgccgcccccggccctgagcgaggagctgccctggggagacctgtcgctcaacaagtgcctggtgctcgcctcgctggtggcgctgctgggctcggctttccagctgtgccgcggtgagcgcaggctccccagaggtggggcgaggctggggtccacctgtgcgcctattcctccaaggaaaggcgctgtgccgccagggtggggtctgggagcctcctctccagggctgggtcttgcacgcccccaaagttggtttgtgcatctccccttaagtgacgggccttgcgcgcccctctcacccggtgtggaccttttgcggggcccattcccctcgccgcgagtaggttctggcttccggatgaaccttgtgcaacccctcctgcctcgtagcgttctgccgcctttcccctgcgccctctctggggaccgctcagctcgtgagcgccccccgggggcactcctgcgacccctcccttgctaggggcctcctacagcccgtggtcggggggaagaatgaccaattgaaagagcgaggttcggagaaggggcgccgcggcagcggagtcccggagtcccttcccacggctcgggggcatccttagtctcagccgtaccgggggagccccactccaactgtccagggaggggggctctaggggtgagggagggatggacagtgtggaccgtgcctcggcccagctgactcgggtcccgaccctgtcgctgcagacgccgtccctggggaggcagcactccaagcacgtgtgcccgagccctgggtcccgccaagctcagccccgagggagccatcgtcgcccctggtaagagcttccttccactgaccgcgggcattgggaccttcatccccaaggaaagaaggagcccgggccggggggaaggtgggcgcttaccccaggaccccactctgtcttgcagcctaagttcgaggcccaggcgcctccatcagcgccgcctgcgccccgggccgaggcagaggtcagacccaagattcccgggagtcgggaggctgcagagaacgacgaagaggagcccggcgaggccaccggagaggccgtccgggaggaccgtgtgaccctcgcagaccggggacccaaggagaggcctcggagagaggggaagccgcggaaggagaagccgcggaaggaggagagacctaagaaagagaggccgcggaaagaggagaggccacgggccgccagggagccccgggaagccctaccccagcgctgggagtcacgcgaagggggccaccggccgtgggcacgggactccagggacgccgagcccaggaagaagcaggcctgggtgtccccgaggcgtcccgacgaggagcagcggcctgggagtcgccagaagctccgcgcaggcaaggggcgggactgagccggccccgcgccggagtccaggggccccttctggacgccccgcgactctggcgaaataaagcgagtgctgcggccgcagagtcacctgctcctttacgcctggacccggcaccaagtccggggcctgaaagacggtggtggggcgcttcaggcaggggagagacagcgagcgctacagggcggacccgggccgtgcgcgaggagagacggcaagggaggtcccacgggccccctaacacgcacggacaccccagccggttgcttgctggtctttattggggcgatgcttggggtccgaataaatatgggaaggggcgcgagctggggcgcgtccggaccctcggggcaggagtccgcgcggcgcaggggtcaccggcagccacactcggtggccaccatgttgggcacgtggtgcgcgctgatgcgctcctccgacaggctgatgagcagcttgcccgcgtaggcggtgggcacgcagcagggtgggcgcgccagggcggccccacggacctgcatcttcagcagcagcaccacgtggttgccgtagcgcgggttgcggtcggactgaggccagccgcacacgccctggcaattgttggcctggtaggtctcggggatgagtacggagcgctcggcgcggaggtctacgctgagctcgcgcagcgcgcacggcccgtcggcggcggtggcccccgcgctgcgctgtgcccgacccggcccgcgcggatcccgcccgcgccactccacgcgcaggccctgcagcgccttcaggagcagcagcgctcgcaggggatcgccgaggccgccggggccacctgggcagagcgcgagcaggcgcgccagcagcggggctgtggccggaggcagacccgggaggcttcgcagctcggcagccgccgcttgcagttcagcagccacgcggcgcgccagggccgtggcccacggcgccgacgtggggtcgtgcaggggcgcaggatccccggtggtggccgcagtgggcctcagcagcagcagcagcggctcctcgccgtcgagtaggcgctccagcgccgcggggtccgacaggttgactaggccctgcgggaagccggccagcgcgtccggatccagggccaggcgcggcgcggaggcccgggccggggggacccgcagcgcccgcaccaggcgcgtgagcgtctccaggaaggggtctgcgctgggtggcgactcctcgagttccgcggatggcctggaacccgcaattggaggagttgagagcggccacgaggccacgccgcccccgcccgctcctgccccgtgtcccggtgcctgcgcgcacctgggcggcgggaagggcacggtgtccagctggccgtgcgcaggcagcggcgcgggctcggaccgcggcagcaggagcagggccggggtcatccgtgtgaagcagcggtggtcgtcgccgaacagcagtgcctgcagccgggcggtactcagccgggagtctgcggtgggtgggcacgcggctggctcaggggctgggggcccgggggcagtcgacccggctccccgtccctctccacgcggacctaccctctccgcggggctgcagggtcaaggccagcccggagccgcgccaggcccccgcagggcggtccaccgctaacaccaggtagcgggtgtctcgggaggggcagaggctctgcggagaccagggctcagcccggctggatggaggcttacccagccccgctctaccggtccccttcctcccatcgccactggttctacgc

SEQ ID NO: 5568 - DNA, 1143 bp, Homo sapiens
cgggcttggcgccttgcttatctccccggacgggcagctcactctccctcacccccggtccccgccgcgcgcactggcggcgcccgttccacgctccaagaaccccgcttcccagggtgggtggggggtgcacgcccgacagggccaggtcagggccaggcgtggagcccgcgtgcgccccgggaccccgcccggggcgcgcgggaggcgccgggggccgcggaggcggggcggggaggggccggcggcggcggcggcgcgcggaggagaccgcagtgcggccggcgctaggacccgcgggggcctcccaggccgcggcgcctcccgctttcccccactccccgacccttcttcgcccccaaaatgaggaaacggagcaactcgctccaagttgtgcagccgggaccgcctcggggtgtgcagccggctcgcggaggccctcctgggggcgggcgcggggcgcggctcgggggcgccccctgagcaggtgagcacgtcggcggggagacgtggagagaccccgaggccggggtggggggaaaccccgagggctctaggcgggggtgggcccgggacgtgcgcaggaagggccggtgtgtgcgcgagtgtgcgcgtcccgggcgcgcagcgggtgcgcggctggggcggagggtgctcagaggcgatcggaccccgcgtggtggtggctggggtttcctgggtgcgggtgtgcgcggctacgagccccgggcgtgtgtacccgcgcgtccacgtggagggctgtgcgcgtgtggccgaaaagcgtgtgcgcggccctgcgtagcgccctgcgtgcccgagtggcccggcgctggcgcccaggtgttccagtgtggggcggctgtgtgtgtgccgggggcgggggacaggtgcgcacgttcccaggtgtggagcgcttgtgcgcgcggatgcgcggggacgtgtgcgcacacctgtttccacgtggacgtggtcctttgcttgtctgcgcgcagctgtgtccgagccctgtgtgtttctgtgcgtgtgcatgcatccgtatgcgtgtgagtacacgtgggactggaggatttcatgggaggcgcatcttggaggggccgagactcaccccccagcaccgcccacttcccagccactagcggtcgg

SEQ ID NO: 5569 - DNA, 220 bp, Homo sapiens
cgtggcaaacccgggctccgacgacagaggcagcgcagaagctcgctcctaaatgagacaattttattaaaatcataattccttgcatttctatagcgccttttcagtggcggagatctcaggtgccccacgccagggtctactagagaatcggggcgaccgcaagctcagtcgcgggacaggcgaggctcgccagctccacgaagcgtcaccggcacgt

SEQ ID NO: 5570 - DNA, 1860 bp, Homo sapiens
cgcacggaagtctctgcccagctgtcagcgcgcgtcgccaggggctgcactgaagctgtggacccgggatggggaggaggctggcggcctccgaagcagggtctacagcgggggagggctagcgccgtctggcggtggctgcgcgtggccagtgcggacccaggctcggctcggccggcgctgcctgcgtgtggtccgggcggagcgagggtccttggagcccggttcgtcctgggtcccaggaagctcggcgtgcagcgtcagaggccgcgtgtgctgggggagggaggagtacagactgtgcctgggggcatccaggacgaattcacagaggggtggtcctgccccacccagggggtgtcgtgggcaaaggccctggggccacctgcctggtgccttggagggcgtagggcaggagccgccgaggcccgcgggccactgtggggcgcggaacttcagaccaggcacccgcggctcaacttccgggccaggggacccgcgggggccttacgaacctgtttggcccatttgtgcaacagaaatccgcccgcgcctagcagcgtccggggccgcctgcgccggatccgcagcccagtaccctccgcgccctggactccgaggaggccaggtagagagcggctcgcgcggtccccgtctgcgccctcagccccgcgctgggcagcgggacatgcctggctccggcgccgccacctcggcttccgcttgcccttgagtgcggagcccggagcctccctcgcggtgcgctgggtcccagagggccagaggccaccagggggccggcatcggcgggagcccagccgggcgcgccctcggccctctcccacccacgtcctccgcggccgcccgggtccaggggcgcagcggggaggagaccccggccagggccggggagcgcgagggcggggcggggtccggcggggaggggcgcgggcgggcggggaccggggcgggggccgggtccgggggcggcggcggcgcgggcgggaggaggaggagcttcccgcgcggggcaggggcggagcgagcggccgcgccgcggagccaagtgagttcgctccggagccgcgccgccgccggcccagcatctcgggcgcccgccgcccccgccgccgccgtcagcgcggggatgtaggatgcaggcgggcgccaggttccagcggcggcggcggcagctgcagcagcagcagccccggcggcggcagcctctcctctggccgatggacgcagagccgccgccgccgccgccctgggtctggatggtgccgggctcggccgggctgctccggctcagcgcgggggtcgtggttcccccggtgctgctcgcctcggccccgccgcccgcggccccgctgctccccggtctccccggctggccggccccgagcgagccggtgctcccgctgctgccgctgccctctgcgccagactccgccgccgccgccgccgcgcaccccttccccgcgctccacgggcaggtaacgtgtccccgtcccgcctcggcccgggtcgccgtctcccctgctcctgggcgcgccctgcccggcccggctctggcctccggctcgcgcgccctcctccccggcggtcctcgccgccccaaaccctcaggacggagcccggcagccgtgcctcggcgagaaagttcgtgcttggacgcccggtcgtccacctccgcagctttggcaggtgcctccgggtgtctggacggagccgtggagggacccgccgcccaggcccgcgtggggaccgcagggaactcgcgccacgccgggggtcactgtccatcgcgaggtgctgaagtggctccgtgaccgccgcgggccgtggctgacatcgcgg

SEQ ID NO: 5571 - DNA, 441 bp, Homo sapiens
cgccggggccccggctgtcagcgcggccgccatcgtatggctgaaggggactgaggccgagctgggcaagaactctgggcgcagattgtgaagctgactgcggggaggcctgggtcccgccacagccgcttcccaccggttccaaccagccccgttccctctctcgggatgtcggaccggcactctcaccatttctaggcttccagggggccctggcgtcttagctgtggatctcccaatacccgcaggtcgcagggccacacaggctgggcttctacgtgcagaggacacaaagcagacagacgaaaattggagcttcggcggcagcgagaaacaaaggccgcgccaaatcccggaagccgccctgtctgctccagctgcgggcctgattggacggccccccgcccagtgtccccgattggataacgtttaaggccccgc

SEQ ID NO: 5572 - DNA, 5587 bp, Homo sapiens
cgcgggaagaaggccctggggggggcgctcccgacctaactaggaaggagtatgcatatgcaaatgcgcccagggggcgggtcctgggtccggagccccccggggcgtcccggcgcagccctagccctgcgccatccccgcgcgtgcgccccctctccgcgatcccttacccgagccgtgcctctggcgcagcaggaccgcctgtcccgatggcggcgacgctgacgaggcagcagcagctgccgcgactgtggtggtgggcgtgtgggccgccgaggctgccgcggcctcggggactgcgggatcgatggcggcgggagggctcccgggcggcgggctcttgtcgccgcggccgggctcggaggtggtacggctcgcggcgcccgcgttgttggcgttggcggcgctggctgggccgtggcgacgcgggccgctgctctggatgtgggacacggcctcggcggcctgcatgttgggcggcgcgaagcgcgagagcacgcgcagcatcgcctgggccttgtgctcctgcgtgtcgtcgtcgctgtagtccgacacgcggcactcgtacacgccctcgtcctgcagccgcacggcagacagccgaagccggtgtgagatgtcattgccctggacgcgtacggtctgcaagagagcagggttagaggccgggctgggcagctcccaaacctactcttctggccaccctggccgtcgcgccccctcatccgcgcaccccaacacttcccggatcctggtttgcccaccatcacgatccggcttccctttcacccgcgtctacccagtggcatagggcttccaactctgcgtggacgccaggcagccagctctttggactgtgtccccacgtccccatcacgttaaccaaacgcccaccttgcatctgccccgcccatacaaaccaacactgcttgtcttcccgtagctggcgcttcagaagggcagagtccacctctccttcctccctcctgcaccttcaggaaaccccaggctggattccttgttccttaacttccccacgtctttcccgccccgacgcgctccaaccgacagtcccgccccagccggccctcctcacctcccggagcacggagggcctgcccgaatcgcttcctaaggaaagccaccctgtcaccggaccccgccctttacagctaacactgtgctttcttaagaaggcaagcaacgctgaggctgctgcctggctccctggccacctgctaccaacccgcctttccgcgggatctccagaagccccccagcgaagtgctcctcccctgcgccccggtggggacttcgggaagtactgctctacggctctcaacaaacacccagggagccctcacctctgaaccgagcccacgaggaggcttcgtcatctccaggcctttctacgctccaggtgggaagcttgggcgcatctcctcccagagttagcaaccccatgacccgggcccctcgcagcctggcacaaccaccccctaccccgtcccctgcaagcctgcaacaccccgcacccagacccgcaatccaggcggaggataaagggttgcagcggagggcgcagagcagatgctcagggcggggcagagggggcgggaagctggcgccacggtcgcggcgagggcgagcagccgcgcgctcccggtgctaggaggaatgcccgcagagcggaggctggcaggcgcgagaggccctaagcgcgcagtccgaccaaggggagttttacaggtcagcgccgagccgaattaggggactcaagccttggacccttgatttacacaaaagagaacccgaccctgcaaccggcgacagatggcgcccggacacgccgagcagccaccgatgcaaggctgcgatcgctgccctacttgcgcggccccacatgcgcggccgccgcggcttgctaagggagggagctgcgggacccgaggcggccagaaggggtctcccgcggcccgcgctgggctccacacttacgctgattttagttgcatccttatttgttacctaaaatgcaaagagggagagagagacgtgaggctcgcggccttctggctaggggaactcggatccgcctttaggcaagggcaccctcctccggcaggctaggaccgaaaccgcccgggggatgggggttgagggcacaaaggacgtccggctttccaagagtttcccaggaggaagcgggctttggagctagcatggtgcctgaccaacgggtggctgccctggtgcacacctgccggctgaactggggagactggatggacaccagggtgggaaggaaagcccctctccttccctctgggcatccttaggccctgccgcgtggctcaaaatcctcccccagctcactgggagccgtgaagaactggagggagggccgctgtgtctggacagcacccagcgggaggctcagtgggagtaactctgggtgggaccctgggagaatgtaggtgtgtgtaggtgtaggtgtgtgtgtaggtgtgtgtgcacgcgagcacactagagtgtgtaagagagtgtgggttttgaggcagacaggcagcgtgggcctgttttcggccacagagaagtggcccctctgtgcccctgagggctggaggtcctgccggctttccggtactcggttttctggtggcctctggaacgcagccgtgggagccctggggtcctcaaagtggcagagggcggggagagcctgatgggaccaagggggcttccttcactacccagcacccatcagagggccgcagccagcgagcacgagcaagcgaccaggctgaggtgtggctctttaggggctgggcgtgaatggagttctgggaggtggtgggaacagcgatgctgtcaaaataattgacaggtttgggggtaaccactgctgactttgaagatgctttgggatgcgaaggtggaagatgggctgcgccacagggcggcgccctgcgcgagtgaagcccgctgcttccctccctgggttagccttcgccgccccgggcgcgagccgggcgcgcgccggtaccgcgtgggcggcgggttaccttgctccgggcgcccggcacgctgagcgccagctcgtgcagcagctcccggggtggctccttgaggtaccaccactgaatctccagcgaatacgaggtggctccgctggcccggaacgcgcagggcatttcgatgtcgtctccctcccgtactgtcacatctttggggacttctgtgaatgcagctgggggtggggagagagagagaggcgtgaccagctgtaggtcgggggcctggggcaacctaaagcgaggcagtcggtctctggctggctggccttgtgccccccaccccgcagctgctccctggcgcacggccggaggggctagcaaagttcggggaagcggctgcagggccgaggcagggaccggccatcggctgcctactgcttccctccggatggggcggggcggcaggggcgactcgtgcttctcccccgcccctggccgcaccgccagagcctggctggggcgcgcctactcccgctccccgcaggcatcctttccgcagccggggccccggcgggactgggaacgactcgggcgcggcgctgctgctgcggcgacccttcgccgctcgcctctccctacccctccgggcccaggctgcacagcgggattgctggagaccgcgaagcttcccggttcgttctctttcttcttcttctcggtggcggccccagcaaagacccccccgagtccacagcggcagcaaagttcccgcgctcaccgtcggccacgaagagcagcagggcatgcagcagcagaggcggcaggtatccgagggcaccgagccggttccgctgttccatctcccgcggggggcgcggtggcggcgggggcccgggagcggagaggcggcggccgcgtgggctcggatcggctccggctcgggctaggacgcctccgagcctgccatggccccgcgcggcgccccctcccctggccgccggcggccgccaatcagccccgctccctcgccggcttgcccggtgcggctccggcggggggcgctgcgcggggtgtgcaggagacgcggtcccaccgggaggctgctggcgatcggtcagtgcctctctctgtccggtcgtccacaggacggtggggatccgcggttcagtctctgcccggcgggccgggcaggggctgggccgcgccgggacccatccctggccgagggagtgcgtgccacggagccgcgagcttctgcctccctgtctccttctggttctgctcccgattgccacctccttcggctcccgcagccgcccccgccggttcctccgcggctctttccgcagggcgagtgggcgctcagccgcggcgcgcagacctggcgtccgacccagcgcagcgcggggagagcgggtccggcgtggcggacccggagccggagagaggcggggagagggggaggggaggggaagggagggggcggtcagtggctgggcgccaagccgcctccaccgctgcatcgcccccgccctcccctctcctgccacagcccgccccgcccccgccccagagcgctccccctctctcctcgggggtcgctcggagggaccaccgtctttctggttggagtacagccccgccccgcacccgcttgggttgggagtcctcccacccaaactctccctggcttcttcccagtctgcacggctcgagacggccgctcatccctgctccccgtgtgtccctcggtcctctctgcagctcccagccctcaactccttaccccagtttgggcaaccagctgccccgctgtttggcccaggcctgggccatgacggatgggtgggcgcccggggccgcgagaagggcggaacgctgtgcccagccggagactacgctgggtggcggcggcagcgccgggagtctgcagtgcgcgagggagaagtgagcgcacagcgcccagcgagcaggtgcctgcggcgcggagagcgcacacgctagccagcccgcagcggccgtgagtgacggcaggggcggcgggggtggggtggggtggggagcgccgggcacgactcagggcccgggaggtttccgggagggggcggggttcctgcccctggatcgcgggtccctgtgtctccacgcgctcttcgccggtcgtggccccttctttgcccggtgcaaagcgagatgccgaggcggcaggaagccggaacccatcccccgcctgctctggcgtactcggcatcccggtacctcccccagccttcacccggagtctgctccctccccagccatctgagggagcgcggtctggtccccgaaggcaaatgcggggtggacatgtggttcggacgcagcgcgtagtcatagtcataggggcgagtcctaaggctcgccttgggtctctcctatctccttcccccgggagtccccagctagtgcgtttcggcacctctgcccctaccccggcccctacgcctcagctctgacctcaggttggggtggggcagcccggtggattcacgtgcctgcttccccggctaccagcctcccggaggcaccgc

SEQ ID NO: 5573 - DNA, 3643 bp, Homo sapiens
cggcgcggcgcgaccagcagccggccccgctcgctcgcagctctgccctcagcggcggccactgggaccgactgcccgcccccgacccaggcaagatgcccaactgcgaccgcgcgccccccaagatcgcctcccgagtctcgccacaggtacacgcgtggcccaaacacttcacctggcccgaaaagtcagcagacgggggaaaaaaaaaaagttgtgcgagcagccagccgggcagtcccggagcccgcggaggccgtcctcccgccgcccagccgcccagccgcccacacgcgaggccggcccggggcggcgcgcagctcgcggcacctcgctcccggctttgcgcgctcaccccggggcgcgccgaggccaccgcagggcacttacttggcacttgcttttgagtgtgcagatcgtcgcggttttcacttgggttttcaaacaagtttcagggagaaagaaggaggcaaaaaaaaaaaatccaattatgcaaatggactccggactgggaggcgcgggatggatctgacgccgctactgtacgagttctcggagcagccccgggccgggcagatttatgggggcgcgtcacggctacgccaggtcccgccgccggagcatctcgaagttaattaaagcggtaatgtccactttcctggcgaccctccgtgcgtgggtttactatttcaccatcaaacccgaccccggcgggggcgggggccctgtccccacgcctctccttccctcttctggccgcccccctctttttcctctctccgtctctcacccctttttcctctctttcgtctctttaagtcgcctgccttccactcagtgaacaatgaacaaagatgtgagtgatgggaaaagatcgccccccctcccaaccccagcagagagcaaagccggtcttaaagtaaaaatccagttgctagtatcaaactgggaaagaaaacagcgcgttcccagtctcaccaccccttccacacacacacacgcacgcacatacacacgcacgcacgcacaccccaccccaagttcacctaagccctggctggagactggggcgtcaaggtcagggcgcgcggggctgcccaactcgccggggacaccagggttggggaacggcgcgtgctctggtcaggcgtgcttcccgcgcccatccccgccggtcccctccgccggccccctccgcgcctctacaccggccgaccaggcccggcggcccgctcgggctgcccggccgccggatgcgctcagcaaacgcggcccctgtcggatttctgctaaattgcacagcggcggcggcggcggcggcggctgccgggagaaggcgcaggaggaaccggagggccgtaccgcgcgctcgctcactccgcccctcccgctcgcccctcgccccggccccgccggccgccggctcccacccgcgcacacgacccagcccccaggacgcaccgggtgcccgagccccgcaggccgggacacctcgcagctgccgtattttctgctaaagtgaaaacgaaggcggctgacaaatcacgtctccggcgaggcacccgttagacataacaatatctggcaaacaaaacccggccgccgctgccacccgcacgcggggctgagaccccgccctgctctttctcggcccccagcccctggccactgcgtcctcaactccaacgctccccgccccccaacattccaatcctccacctaactcgggaacggtggacatgttctccaacaggcacacagtaggaaccactcacaatacagaagtgaaaagggggggacttaactttccacctgtccccaaagaaagccctgccggagttcactccgcagagtgaagagtgagcaacacaggtctctctctgcccagccctttttctttctttttccctaacttccccgcgtttcgaccttcctccacttcacatacatccgtctatatggagatatctatattttaaattatttgcaaaactgcaacagatgggcgcgtcgagatctggacactttcctactcatcaaaggaaagctctcccccaaccctaacttttttttttttgcctaaaatacaccccgagtctcgcctacgactgttttcctcaattcatcttcgaaaaataatgtcttgaagcaaacagaaaaaggcttatcagcaaagatcattcctaccccagtcatgcatctgcgctggggggacgggaggcgtccccccagattgcactcttcccagacgccgcgcaagccctgcctctcctctgccttccagagcccccacgcccgcacttcctcgctctgattggcctcatttctccagcctgggactggccggctcttttccctccataacctgttacttatttatttatttatttcctctttggcccccggctgggcccccaggccgaggcccggctggggcaggtgctgcgggcgccgcctgcgcttgcaggcgccacggcctttcctggggtcgcgggttcggaccctggcacctcagccctgaaaccaactctccggcctcagcctggccaggctcccggggcacaggaggccgatgcaatcacaaaatggcagatctcagcggctctcggcgcccgcaagtttgacacattgtaagcatcagctaactttaattgaaaaaaaaaaaaggttgcaaattaccctctctccacgggcggaggggccggaaccccgcagtgagcgcggaccagagaaagagcgcaaggcgaacccccgtcccaggcagaggagaaaatggggaaagtcacttgagcagaagtttccgcggccccagcctaccccctcccctttttactccccccaccccccagaccctcttgaaagtttcccggggcctgagagtggctcgcgggccgctcgcgggtggggggcgccggccgggtccccggagctggacgcggggtcccgatcgcgcgccgggcgccaggcctcgggactccttttcaaagtaacggtcccgggaccgcgggcggggaggcggcggcccaggcgcaggtcccgctcgccgccgaagttctctagcgccatacgatgcccggccgcagccgccggctcggttttcctcttctttccccccaccccccacccgctgacagcttctctcgccaacgtcacagccacggatatttaattagaccgtattttttaatcgcgatggggcgagaaggaaccgggcggcaggcctcgccgagatggggagggggaggggacgggggggccgcgccaagagtccaaactcactttgccacctcccggacgccgaagctgcccccccacccgccgccgcccccccgcgccgcgccccccgcaccgcgccgcgccccgcgatcccccccccacctttgttttccttaccttaaacattgaaacgcgggcgtcaggagcaaactcgggcacgtaaacggagcgttgtaaaagattgtgttcaatgaataatgaaacatgcccacacgattgacttgatcattttccggggctgaggggggacgggcgccctgctcgcgcgcctcactcgcccactcggcagagccctgcgaactgttcccagcccagccggggcagggcgggctcgattttcatcagcctcttttcagaatcgccccgt

SEQ ID NO: 5574 - DNA, 808 bp, Homo sapiens
cgggacctcccacaccccgggccgcagcgcactgtgcgagtggagggggtgagctccccagcagaggcgcaaggagggtgtagggtgcgcggtgtggctgtgggctgcggacaggggccgggggcgcgcccgggtcggtgccgcgtggtgggagcagcaggcgcgcaggtagcggggagcccccgcgcacccagcccgcgggtgattactatgcggcggcagctgtctccggcgcggtgacggcgcctctaattgatctcattatctcccctccgtaaggtgaagtgcggccgctcgcggggcccgggcgcgggcagggccggctggcagccgcgggccggcgggggcagcgctcggcctcggggtggcactaccgccgggcgccgcgccaacgaacgcaggcggcgggaggctcggcggcggggctcgcgttcctgcaccgcgaccgcgccagaaaacaccccggggctgggcggcgtctcggagacgcattcctttgttactcccaccgtctttggtaacgattattaatgccatcatgtcccatttcccctcaccttcccccgctcccagagccgcgcccgcgcgcccgatctccaggcgcttcgctcctcctggaaccaacaacaatgatcctcaattaaccctctgccagggctgcctgctcgtgaatggggcgctcttccggctcgcgggcggcaggcgccccagcccgggcggggggccagtctccgctcccccggccggacccgcgggggctcgcaatccgcccgggcgccggctgggggtggcctcgcagctcccccgg

SEQ ID NO: 5575 - DNA, 3415 bp, Homo sapiens
cgggggcctttttgcgtgtcccgacatggcagtatggttgctgcgtgcactccgcatagcccgtgttgtgcgtggcgggctgtcgctgcaatgtgcagcccattgacactgatggatgcgccaatggttggacggacagatgttagggcggatcgcacagcgctcggcgcctgagcgggggagggccaggcagcgacccagcggcggcggccggctacgcggagacccgagttcaggccgcggcccgcagtgggagggggccgaaggaacagaggtttgcaagaacagcgaggggatggaaaggaggagaaaagcgcgaccagggagaactacacgcttccgtgtgcggcgccccgcgctgtgcacacgccgcaccgggcgcgcctaagtgggagcttcgaaggtgagctgggagccggcgggagctgaccccgtgcggcgcaacccgcctccaggcgacaggagctcagcgcggccaccagaatggtgaggccgccggcggtgtcggccaactcaccgtttcctcgcttgcaagaagcgtttcacgctccacggccgcgtctccccggcctggaggagtagcggttctggcctctgcggccgcgggcacccaacgcgcacggcgcctcagcccccgagtccgccagcccgagagccccgccgcagcccgcctcggactccctgccccgcctggggtccgtaccccacaactccgagcgctcctgcgcgcggaaaggcgctggaggcggctttatagccggggaggccagcggcggcgcatctgcatcctgggagacgtctggacccagcccaagcccgcaggctgggcgagcggagacttttgatcttaccgtgtgggtgagatcactgtctcccggtctaaaagaaaagaaagcatgctgtgaacttttgaaacaaacttgcaaaaacagtcgtagagaaaaaataaaaaggacacagggcagaaaaagagggagaaagagactaaaaaaagaaaaagataaggggagggggaaggaaggaaggagagaaggaggaagaagtctggggtttgctgctccaggagcgctcaggcagccggtgctggagcgcggggcgcccgccctcgccgggactgtcggcctcggggcctgcgagagcgccagagccccagccggcgcgcccgggcgcagggccgcctcggggatagtgggcccggaggccgcccccgcgctccagcagccgccgcccggcagcgcccggagccggccccggcgcggccgccccattcccggcctgagagctggcccagggagacgcaatcgagcccgcagcgcatcgatgcgccgccgcccgcgccgctcgggctccggctcccgctcagccgccgccgcccgggggtcgcccgcatgagctccggcccacccgcgccctcaccgccgcccgtaagtgagcccgcgtcgccccgccgcccacgccgcccagccagctccttcttgccgcggccagtcggccgggccggcccggagcctcagcgaccccgatcaccaatcaataatcaatccctctagtccagcagccccggcaggccgggcgcgggacacggcgcggcggccccctaggctctcggggggagcccctggcgggggatgggcaggggagcccggtttccttctcccgcccccgtcccgccctaggatcggcccgcgccgtggatggggggcgcggcccggctcccgggggcgaggggcggggtggagggaccctgatcatcccaaagtcaggagaggaaacttgaaggaaccccctcccacaccgacccccgggacgggcccaggaaagtttgtccggggaaaaaaaattgggggaagtggctacggcgggtcctgggggaggagctgggtggcgcggggtctgagggctgcccccacccgccccggcccgcgcccgcctcctccctggagggggcctgcccgtgggctctggcttccccgggggacgccagccccggcccggggaccacgctgggggctccggagtcggcgggtggagaggagtgcgagccgggtggggcagctggggggtggctggggacgaacgctgggtgggaataggggtggggggtaacgagcgccccgggacgggctcggcggggctggcgccgcgcccccgcgtgtgcgcacggggcggaggcggaggggcggcacccctttcgctggcggggcgggggtcccacgcgggcctggggccgggggcgggggcgcggcgcccccgcgggcgggcgattgacacgatcatctccttttcctttaagcttgcctgttgccgacgccgccgctccagccgcgccacgggcagaagactggaccgccgagccccgggccgcggcggcggctgcgcgtccccccggatgccgtgacccccggcctaggggcgggggccggggcagtaccggtccgggccgctcccgcgctcctcctcccaccgctctgcccgccctctccccgccccccagccccgaaccccgcgcacctcgtctggggacggggcgggggggggcagggccgccgctcctccccgccccctcctcctctggcctctggagcgatttgtcaaacttcccattccgccggcagcgcggtcctcctcctcctcctccacctcctcctcctctgcctcctcctcccccccgtgctcctccctccccgagcctccctcgcccgccctccttcttccctccgcacgttcggggttcgcggcggagcgcggcgcgggggggacgcggagagcctgggcgcagcagcatcctgcgggcggccgctctccgggggggaggctgagagcaggcccgcctcgcccccccgcgggcccgccgccccctccctccctgtcctcagcccggcagcggcggcggcggcggcagtggcagtcgccggagaagcatcatgccgaggaggaagcagcaggcgccccggcgcgcagcaggtacgagccgcttccccttccttctgctctcctcctcctcttcctccgctcgccccgcgcctccagcgggcgcgaccccgctcctcgccccgctcttctgcccgcactgagtaactccgggcgccgctctcctgtttgggtgcgtgcgcccgcctcgggtaccgggcgccccccggacgccccgccgcgctctgccctcttccctctcgcacccatttggggagccgctcgcggagcgcgctgagccgcgccaggtccctacctcctcagctctccggctgcagagggaatgggaagcaaccccggcctggctctttctgtgggtggcgggcggggtcacctgagttccccgggacatcttccgcgtcctccgagcggccgaccgccgggggactgcctggtgtccgccgagccagggagcgcgaacgagtgagcgagccggtcccctcgg

SEQ ID NO: 5576 - DNA, 3415 bp, Homo sapiens; identical to SEQ ID NO: 5575

SEQ ID NO: 5577 - DNA, 1592 bp, Homo sapiens
cgtgctctcctccgctgatccggccgcctacccgaggcagtctcggaaccccggaccccagccatgcgcgcagggaactgccgggccgagcgagctcaccgaagtagtcccgcgccgtgcgcgcctcgagcgcccgctccagctcccgggtgagcgcctccagccgccgctcggccgcgcttgggccgccctcccggccagggggcagcgggagtgcaggcagcgggaagggagccggccccgcaggctccggggagcgagcgggcgcggggcaggcgccgggcgggaggaagtcagcgtaggcgccggccgagccccgggagccgaggctggaaacgctggagcgggcgctgcccaccgaaggcggcccgggaccgggacgcgggtccgagcgaccggagcgcgggctgccgtggcgctggtcgtagcccaggctgatgccgctggatcgggcgctgccgccaccgccgccgccgtcggaccccgccaggctggcccgtgggctgcccgcaggctgcgcgctgagctccggaaccgccgcgcgccggggaccccgctccccgcggctcagtccgtccgccccggcctcggggccgccgctgcccttccctctgcggcccagcgcgggcgccgcctcgtctccaggcccaggccgcggcccccgccgcccccgaccgggagagccgcacccgggctccagctcccgcagggccagcccggccaggagtagggccgcctcgtccgcgcccgccctggagcgctgcatggcccggcccgccggccctggcgcgtcacctccgcctccgcttcccgccgccgctccggccgggccgccgcatcgtccgcccgaagcccggagcccgccccgggacccctgggcgcggggcggggcggggccggcgccgggccggggtcgttccggcggccacgcgcgggccgggggacgcggcgccctgctcggcggcgcgcgcggcggaggaatgtaagctcccaggcgccgggccgcgccccctcctcgccgcggcctcgcgcggggcggagggactcctttgcgggggcaggaatgcgaggaaggagacggcgctgcggcctctggaatgtggggggagtggcggcggccgcgctgcgccgggacctcggaggggcgtggaggccgggccaggacgcaggggcgggcggcggaggcaccgcggggagagcccagggtctgcggggcgcccgggccgtcgggccgctgggaagagctcggatttccgcaggctgagctggaggcagctggcgccatccgggccggagagatccaagcagtcgacagctttccccacatcccgccccatctcccttccctgcgccgccttgctctccggcgctgcagggccgacccagctcagcttggaacccacggcgcttcgcccgtcccgcgcccaggaatactgtgcgcctagcgcagatgcgtccccacgaccccctgcctggcccggggccatgtggccgcgcaccggcctctgaagcccccatctgactgctggggaaggcgcccagaactaggagcgggttggttggggactggtcctcgcgctgggtcgcttcgc

SEQ ID NO: 5578 - DNA, 903 bp, Homo sapiens
cgggttcggctggctttcagtaggcttgccggggtctctgcactctgtgtccgggatcctcaatttgcgaatagtctggggaggctgagcgcgagccaggagcggacccgggggtgggggtaagcgccacgtgcgcgccaggtccttggtgtgcccggcaggcggcgctgcgtggctgcggctggctccgagggtgcggggggcggcgacccgggagggaaaacccctgcctcttcccggggcttgctctgcccgtcctttaaactcgccctacaccctccccgactcccgtccttgcaagcgttatctgcagcctcaccggccctcgcaacggtggtggtggttggtggggggtctcgaagcttgcctctggccagccggaccccggtgggagatggaggcagaaattccggcctcctaggagaagggcgtctgctcactcccccactccccggggcttggggagggggctgggcaggggcggaagcgagctggagccgtgtttgtcgcggcgctgcggagtggaacagatggctggggaggggagagggtgcgtggcggggaggaggaggggtgcgggggccggaggatagggaacgaggaatttcgaagcctggagtctcccaggagaagcccccctccccgtcttttcccagaaaggggggcatatatgcgcctgcctttttcccggagagccctggcctctgccctgtggcagaccctgccgcgcaatcctctgccccagggcgcgcccctcacccccaaacccccgccgcgggacggggtggcggggtcaggaccgccaggagcggcccgggtcgcgagggttaatggggccgccctcccaggggcgaggaggcggcgggaaacgggctcggggtggggaacgagttctgggatcgc

SEQ ID NO: 5579 - DNA, 1592 bp, Homo sapiens; identical to SEQ ID NO: 5577

SEQ ID NO: 5580 - DNA, 382 bp, Homo sapiens
cgttttttacctttaatcgcgagacaatacgggtcagaggtcaggaaattatgtcagcaccaatgcgggcgcccacgagtgcggtggaccgatgtggaagggccgggacgcagcccgagtcccagttcccgccgtagcgatggccgatttcccagccgcggacgctgaaagcgaggactccacgccgatgacccttcggcgtaccatgtccggcgggcgcttggccaaacagcccaagactgcggaatcacactcgccactgtgtacctggacgccatctgcagacccagcgcctgcggggattccggaaacgggagagcgggcttccggaaacggtgaccaatgggaaacgtgatcagatgttactaggcgaacagtccgt

SEQ ID NO: 5581 - DNA, 665 bp, Homo sapiens
cggggaagtagggccgcgaaggcctctgggaaatgtagttcggcgcaggaagcagcggaacgattcgattcttctcagcaccaagttgcgctcccaatctctcagagctgggctcgcgggaggccgctcgtgcaaaacctaggctgagctcccctgcgcggagctgtgagccctggaacaccgtggtctgcttctcaggacgcgcaaacagtgaagccagtcccgcccgggtgagccgcgggggcctctgggaagcgtcgcccctggtgtaacggaccgagacttgtggcgctctcagccaccgacagcgccggcctcagtgccgcctctgtcccagcccgcgccggctctgccactttggcagcgttaagtgtggaatcggggcctgtgtccgcgggcttggtggtgagtcctcgggaaaccgctagctctgagcgccggactctttgtgctgggtgggagtgggggcccgcggtcctggtgccccaatctttggaggaggacgccgggcggggcgatgcctgtgcttgtggttccctgaggcagtgggagtggcgtgtgaaggactgtgagagtctggcgtgaagtgactgtcatttgccagacattcgtctggctgagtgtggccccgggatcgtgtccgtaagcggatttcgtggaggcgc

SEQ ID NO: 5582 - DNA, 764 bp, Homo sapiens
cgcgggtatcggcccaacaaggtgcagcgaacagtcgcccgctcccgcctcaactcacagcctcacattccacggtgccattgacttcctcgcacccagtcacacaggacgtggacaggcacacggggtgacagcctcgcactgaacggtaccaacctccactcgcaccggagtcacacagatggcctgcgacgagcttccggagacccacacgccactcctcagcccactcccgacctgcagaacagaactggtggaagatctccttcctgccccgaaggctcggggaatctgcactcgggtctcaccgctacccttagttggatggaacccagcccttacgggcccggaaagaagcgcctcagctgcctccgcccccggaggacacaaaggggccgccggcccaactcccgcggggtccgctgggaaacgtagtccggagtagaaaaggtcgcggcgtcgcagtgtctggcagcagcggtgcagctccgcgcagggtttgtaacacggcctcctccccaccaggtcctcccacactggcctctccccggccttccagagagcccgaaagtccggattccctgcagctccgagcctggcccggtcacagggacggggcccagcgtcacactacacgggctggtgtggaagtgcgcaggcacaagcgctctgcgcgcctcccttagcaaccagggcggggagttgagaatcgcaggttggccgcagggaaaaggtttgtgcgtgggaacgcgctagtggcgcgt

SEQ ID NO: 5583 - DNA, 1394 bp, Homo sapiens
cgatgtcaggtacgtcacaaacgcagacacaaaccgcaaagaccccagagacccgctacagccagcgtcagagtcaggcaccaccgcgcagccttctctgcggcaccatcctaatcccccgctagagaacggcacacgcgcacgcagcagccccgtgcacggaaacactactccgccagcggccaggcactcggtccaggtacgcgggggcgcggcggccgtcactcagcaaacaccacaggcagcacgcgccgcgccttggtccaggctcgcgatactggggtttcctccatccaactcacgccagggtcacggctacaggcctagatttgaacactccatccccatcgggatcctgtagccaacctccaccctcctccaaacctcccgacccctcggcaggtgcggccccacacttctcccttgctccctgaagggccccagcgttcgccccccgcgcgcttgcgcactcgaggcagaagccgatttccaaaggttccggtgaggcgtcgctgggggcggggcggggctcgcagcctccgcctgtctccgagccgagaaccaaatgaaaaataaaaaggcggaatattgtttttttaaattttggaccgcagtgtccacaggggagcaggcctggattatctttaatggcactggtcagtcacggggcggccattacaggtagaggcctgaggcgagggacactgcggcccctctggctccgtctccccggcccgactatccccgccgagacccggccccacgcgcccctcccggcccggagcagctgcgggacttgcctccgcccccccgcgcgctagcgcattcgcgacggagacaggcgctctcccgtattctggcgccgctgactcccagggctgggctatcctctgagtcgggtgaggctggggctgggagccgggcgccactgtggccgctgcttttctgagggaaaagagcgcggagtgggccaggttttgcaggccgggccaaggtggagaaaaggttcctgtggagcctcaggccggtgtgctttttttcccgggactgagcttctgcagccctgaggcctggaggcccgggcggtagtaactgtgccggaccaggttcgtgggtgcggcctgtggtgcagttggagaccgaggccccgcgcatcctcgtccgcgcttcagccacttaggctcggccgtagcgaaaaggcccaagagggaagtcagaggtgaacgccccaggatgaaggtcccctgcaaaacgctgggacctagatttggggtgggtgtctggggtctaggaggacacgctggacagttccgaaaagacacagtgggtggtcccgggcgtgggcaaccgggtgcggaactacagcgtacccggagctgcgaacccagacgcgg

SEQ ID NO: 5584 - DNA, 949 bp, Homo sapiens
cgctccagcgctcccgagtcacacctgtgcggcttattcaacgcgatgcctggacgcagcctccagagaggaggccgggattggaatacgcagccggggaatggttgcaggtggtccagctcccgcccccgccccgcccccgcccgggcctcgtgcggccccgggtgcgcaggtgaaagcccggcctcagcggcctcggccctgccatggaccccgcgcccggcgtcctagatccccgcgccgcgccgcccgcgctcctgggcaccccgcaagccgaggtgctggaggacgtgttgcgggagcagttcgggccgctgccccagctggccgctgtctgccggctcaagcggctgccctcgggcggctactcgtccactgaaaacctccagttggtgctggagcggcggcgtgtggccaacgccaaggagcgtgagcgggtgagggatccctagggtcgacgtccgttccccccttccctgctctaccaccaaacacctggtcaacacccgggggtccgctcaccgcccacccccgctcgaggcgacttcgagctcccgaggcctcccacgcccccagcttgtcaggagaatggcagtggcctccttcttctgcacctccgtgcagctgctcgttggcggccgctgcggtggccgcctcgcccgctaaccctccaggatttgtgcaggacccgggtctgggaggggacagaggaggggccctgacaacttcaaaaatgtctccctgggcaggtgctttaaaagcttcgcgcccagggggtgcgccttcatctcacaccgtaggcgctggtgggtgcttgggacgcgcagggatccccttcgctcctttttcttgctctctgcatctcggcctcgaagcacacacgagggtgaggagaaaggggggcctgacggaagtgacttttcttttttaaagtaacgaaacacgacgt

SEQ ID NO: 5585 - DNA, 1365 bp, Homo sapiens
cgctcaacagcaccgcccggagcgtccacttccccctaccccgtaaaaaaaaaaaacagggccattggttcgggtcgagagccgctttgggaagcgtctctgtcactaagcgctaccccggggtgtgcgagggagtcaagggacgcggagaccgggagcagggctgggtccccttgcagccccagcgctggcctcctgcccaccgcattcaggcgctgcgccgccctcacacccaccctctcccacctcagcagcgtgcgggggaagcctcgcgccggggtctttttcagcaagactgtcgcggtcctcggcttcaactgcaaggtaaacggtggcagagccccttcccactccagccgtgtgtgattctcacactcagtgccctctcctgcactggggcgccggcagtggcgacctaggctctccagcccccgcccagtcccccgcgtgcgggcgccgggaccgcagtacctgtgacgccgaagcccagcaggccgcagacgggagccacgcgcggccctggcacagggtaaaaacctacgctcaggtaggcgggcagccacgatgtcgggcaagcccagggcagacccccggtggcgcacagggaagcagcggtccagaaggccgggtggacgcaggcggagcccgacggctgggaggccgccggcgcgcaggggtcgggcctcgccaggatggcctcgaccgagaaaggggactcgaagcgtccgggagcgcggggcgtgttcgggccagtaggggacctgggcgccggagagcggccagagcgcggaggtcggacccgagagcccgagggagcgggtggcgggctgcctcgcggcctggggctaggcatgacgcggccgttgcccggacggacgcaaggaagggagctcgggagaagtgagaagattctgcaaaaggcagcgagcaagaccggttgtctgggaacctcctggcgctcggcgaaggctcttaaatttggcggggcggggcatggggcggcctctccccactgcggtccgggcggggcccccaaagcctgtgagcgcccgctctgtgcgaggcaaggtgggcacagcaccaaagagtgtgttccctcccttcctccgcttttaaaaatgcccaccctggggcggtcgtggggaggactctgagctcgctggtgatcctgggcgaaacacccagccaccgggctccgtctttctcctttgctcactgaagaagggatgcccgtttccccggggccttgcagaggcggagctgtgatctggagagcggtagggcagtgcctgcggtcttggcctcagctgacccgcgccgtccttgacgcagaagcctcggccagattcacctaggaccgcgcgg

SEQ ID NO: 5586 - DNA, 2638 bp, Homo sapiens
cgtcgacagcgaagtggcaggcaatgggaatctgggcgggaagcaaagaactactacgattcacatcgcgcccaagcagcagcacgcgggaacctggcacacagtaggtaggcgttcacccaacatctgtcatcggacccagcacctgggcagggagcctaggggtggagtggcggcttgggggacacaaaggcctcgccagcccccagctgcgcccctcgcaacgcggggggcgggagtttagagccagagagagggggcgaaggaatccgccctcatttgcacgtcgtctggggcccggtcaatttgcttaatcaccgctctaaatgccagcgggcagcacacaatacgcgcccattaacaggtttaaagtgtcgcagcgctcgctttaaatgagaaaagcaggcgacaaaagggggaaaaagccaagttcctcaacttgaagaatgccttgggtcgcctcgaaatcatctacgcgagtttaaaattcggagctagctccgcagaaaagctgaggccccggtgcgagggctgggggtgggaacgggggctgtgaataacccgccacgaaaactgggtttcttaggaaccagcctgcagccgcccagtgaacccggagtcggaggacaacgtcgccaacccagctccctaggccccttgccccactgccagagaaagctgaccgatttccaagaaggaaagcgagacccccccaaagcgggcacaaatccaagtttccttcggtgcaggcgaagaattctggaggccaaggaagatcccagaggtggactccaaaacctcaacccgcaagaggggaaaagttaaagtaactttactttcatccaggcactggccagcgcagcctcgcgctcggccgccagagagtagttcaactccgcaaacaagttctgcttgggatcggcgcagaaggccccatcccccactccatggccaagcccgggggcgcatcctgcgggccgcggcctcccaccctccccggcgcgcccgacgggcactcacggtgcgcgctcctccgggagacaggggtccgttggagaggtacgggctgctcaggtccgggatcatcaggaaggggtacccagggtacgggggtcctttaaagaacgcgctgtcctgaggccttctcactgcgaacaagaccaaggcgaggtgaggcccaggcccccgggactgacagcgccgcggcagggggctcgaggcgggagctggggaccccagcgccccccacgcgcgccccacgggggctgccgccaataaaggcggagggcaagggtgcgtccacccaagcaagggggacggtgggccgcccgggctgagcagcggagcgcagcgggaatcgagagtggggggctgtcccagcgggcacataccttcggcgaaatagtcccgcggcttctggaaagtgtcccggacgggctgcgggcgcctctccgcctgcggaggagacacaaaggcaagagcgggtgagcggacgcagggccgggatcccccgggggtggccgcggtgcttccttacctccgagtccgagctgctgctctggttctccgactcgttgaccagggacgacttgacctcgtctaggtcccgctgcgccgaggcgctatcgctgctcggctcctgctcctcgcccccctcgtcctggaaggggatcagctcgtcgttcgccccgaggtcgtcccctccgccggccgccccggcgctggagccgccgcctcccccgctgccgccgccgccgccgccgcccccgccgccgagctggggcatggtggggccgcgggccggggccgccgctctcggagcccctagccgcccgcgccctgcccggcccggcccggcgcccctcccgcccgcttgcgggcccgctgcgctagccgccgcaacaaagtttgacagggcgtggccccgcgggaagcgggcccggcgctgcccggccggggcgcaggcggctcggctcgggcccctccggcagcgccgagcctagggctccccaactcgccaccgccgccgcctgctccgccggggcgtcccagcccctggcccgccggggaggggcgagcggggagggagggaggagggaccgccgggctgggcaggggggccggagggaggagccccggctgcaagctgacacccgcgcgcctcgcggaacccggagagctgcggtgcgcgcgcacacacacacatacacacgcactcacactcacacgttcacactcgcatcttccaggggctgcgtctccctgcaacgtgcaccgcccccaaccccctcctgcgcctcacactgcaccctcggcggccctccccacggcctccctggagtcctggaagtcttgcgcccacccctccgcatcccctaactttctcccaaagaacctccagaactccgcgcaggttcccaccccctcccaccgtatcggcgcgcgggcgggcggcactgccccctgcgggaaagcctcggacgcacatactggccgcggggccctccccctgcctagagtccctccgagtgcgcgagctgatgcacggactaggacactggggacatctatggaaccccggaaaatgcccggcggctttccgcgcctttttcctgtggggttccaacgcgacccccgg

SEQ ID NO: 5587 - DNA, 1531 bp, Homo sapiens
cgaaagcccgtacaaaccgcacagaaaacgaataaatgcttcccgaatgtgagcgaacctacagtttggttagaaaaactcaacactgatttccgttcctccaatcacagaatccccgaggagaaggggacacgccaagcgggcctgttaataacctctaccgtataccccaaagcgttgtaaatcacatcgattattttcgactggaagccgatcggttgagactggacgtgaattccgcgactcgatcacaaaaggttaggaggaaagaggtagaaaagccaaaaggatgactaggcaggtggcccgagcggccaccccaagttaactttttagaaatcattcgtactgttcgggttatcttctctttaatattcgtggctttacttattatgatgttaagaaacgtgggctaggaatggggtgctgctttttgcccgaaacctggaggcgccggcctcccagacgctcccgggcccgggcagaggggcggtaggggcggggcgggcgggctccgggtttgggcgcgcgggcaggtggggcgtggcgggggcgtggagagcccaggcccgcggccaccgccccgctccgggccggcccaggaggagccgcgccgggctcggttataagaggccggctagcaggcgctccgctagcacccgcccgaccccggcccggagcaccgggcgcccagcgcgggtgaaggcggagccgcagggttggcccccaaagggatgctctcgcccgagcggcgagaccagccccgctcgcccctcgccgcggccgcgccgcagccgcccacggccgccgacatggccctctactgcggcgacaacttcggagtgtattcgcagcccggcctgcccccgcccgccgccaccgccgccgccccgggcgcccccccggcagccagggcgccttacgggctggccgactacgccgcgccgccggccgccgccgccaacccctacctgtggctcaacgggcccggcgtgggaggcccgccctccgccgccgccgcagccgccgccgcgtacctgggcgctccgccgccgccgccgccccccggggccgcggccgggccctttctgcagccaccgcctgccgccggcacttcggctgctctcagcggcccttcgcgcagcccgcgcccgccgcgcccgcctcgcccgccgcgcccgcggggcccggggagctgggctggctgtccatggccagccgcgaggacctgatgaagatggtgcggccgccctactcgtattcggcgctcatcgccatggccattcagagcgcgcccgagcgcaaactcactctcagccacatctaccagttcgtcgccgatagcttccccttctaccagcgcagcaaggccggctggcagaactccatccgccacaacctgtcgctcaacgactgcttcaagaaggtgccccgcgacgaggacgacccaggtgagggccgctggcaggtgcttcccagccggggagggcggacgcgggtcgcaagggccggcgcaggggtcggtgtgcgg

SEQ ID NO: 5588 - DNA, 2045 bp, Homo sapiens
cggcgtcctcgctctgtctgcattttccttcattgctctttcacgtttggaatgcccccgtctctgcagcctgcagacagcggaaaccgcgggtgcaaatgtgcaggggccgctgacatgaccggctgcagaagcccactcagggttacccgaacaggctagcgttcgggattgcacaagaggtcaggcgatgctgtgggcttccaaatttgtacagctgcgacactctgcgacgtgccaccctatccccagtggggtggggtgggggattccctccgcagtccgctgaaagcgaggcaggaatcactgcaactcctctgctcaggctgaggtcgccaccgctccgcggatgcacgcgctgcaggggcgccttccgccgcgggcacggcgcgggaagggatggggtctggtgggagtgggcaggtggcgggagaggcgcgtgtccgtgcactagaggcccccgtgcgtgacacaggccgatgagctcctgcgggctgcacccacgcggagtcacagaccgaaaaggtcagccggtggccggtgtgctaacatatatagagagacgcccgccaggcgcgccgcaggctgggacgaggctaggagggcccaggctggaggagggctgaggagggctgcgggggcgggccccggcgcagggcgcccggagcggagggggcgggcccgaggcggggcgggccgcggcgctgacgggctgtcgccgctgcactcgcctccagcccgcggtgtcgagcgcaggcggaggtacatggccccgacgggaggcgcgcggcgagcacccggagctcggctccctgcctgagcacggcagccgcgcctccgcccgcgcgtcctcgcccctccggccggcagcccgcggacatgatcgtgtagcctcctcctgggctgggatttgtttgaagattttcttcatggaagcgatgtccccccagcaggagactctagggggacagccggggcgctcctcttccctgacaggagtgtctcggctcgcgggaggcagctgcaccaagaaggtgaggacgctgagcgggggcccgtgccctccgccgccgcagcccccactgccggcgcgcgccctccgcgcccgccacagcagcgcgctaggcggacgccgcgggaatttgacgctcgaggctcgcggcccctaatgagagtcccagaacacttcccgcccttgacggccagcggcagcgccgccgcctcccgcagagcgcccgcttctccgtttctagagccttagtctctcctcgagcgacctcgcagcctccctcccgtctccatccgccgccggttctgcagcccggctcctccctcagtctaggcgcgcgggctgtagtgggcgatcgcctttccccgacccctcgccgtgcccctgggcctcccgaagtggcctgggcgagcactgactgccctttggcggtgtcagccccaaagtcagggccggcgatgtctgcccgggagcggcagccggcgctgaagaaggtaggcagcggggctgcggcgctggtgggctcggccccctcacctgcccgccgaggcgcggctgctccatagcagttttcggggggcagatatggggagtactgccccccacaccagggtcctggatgattccgggtctcccaggtgggggtcacagtttgaggggcgactgtggatgataacgctcgacactacggggacatgtaggttcggctgggcctagaaccgagcagggtgggggcgggtgggctgtggttgggggtcctgagggctgaggtgggggaccttctccctgcactggtccctggcccctgggactctggccgggctggatagggatccgggtgtcggtgtgggcgtgggggcagcgcgtgttccctgtcaaagctgggagagggatgcaggtgacaacttgtagcgttccattccgataaacacggccgctgtgctgcgggaggattccgatccgggtcaggtttcgctggaacggttccctgagcaagtgcacgtgggccgcgggctgccggcctctgccgtttcgc

SEQ ID NO: 5589 - DNA, 476 bp, Homo sapiens
cgggcgacacgccctgggagggcgggctggcggcttctccagctcggagcgcgtggaggctgcgcgtaggggtccgggacgcgggacagggactccgcgcagcccaggcgccggggaaccggggctggagtcggggatctgagcccagcggacgcctcctccgcctggaggcccggcacggaccgggacaccagggcgtccgtggccgtggctcggcccctggctgctgcgggccgcggcctccagtgggtccccaggacccttccccacggcgggtactcaccgaggctgagaggccacgccgtgctgttggggcttctcgtcgaccacattcctgggcgtcagcccgggcagagaccgcggggactggccaggccgggccaggccgggccgggggagggtcgcgctcccgggctcctgaccctcggcggcgagaggaagcggcacctgggtcacactcctcccgcgcgggccga

SEQ ID NO: 5590 - DNA, 455 bp, Homo sapiens
cgcccttgcccagcgaggaccgtgcagaagcgggaaccgggcactggagggcgcgcgcggcacgcgcatctcggctggcacctcctggctccgcggggccggaaagaacctcgaatactcggtcttaaaaggctcctagtcatcccgttccttccactcctcacagcacagatggggaaactgaggcctggagaataagcgtggcatacccagggtcaccggaagagtaatgagctgaaccagagaggaggaacgggaagcgagacttctaagcaatgcggggtggcccccgggccaccggaggaggcatggtcgggcacgtccccaagtttcggtacccgtggtggctgtgccagccgatatgagcccctccctctctaggaaggcgcaggactcggggaagcctccgcggccaggccgcctgcctacccgcagaccccgggcgccgcccgcgt

SEQ ID NO: 5591 - DNA, 749 bp, Homo sapiens
cggggacccgagcccccgggctgaggaccgcgggggaccccaggtcgggacggagcctcctctggctcgctgtgcgcgcacgcctggaaaggcgggatttaaggcagcgatgctgcgggaggctctgcagtgtcaacgagcccccgaacggttccgcctcattccctctctgtgtgcctcgcaagtctctgcttagtaaaccgtcacagcttcggcgcgcgagagtggcgttggcacgtccaaaccccggggtcctcggccaggccaggggggcgggcgtgcggcggggccgggccgggccgggcgcgcccagcgggctccgggcacacgcccctcacctgggcgaggcccggtgcgcaggcgctcagcgcgggggcagcggccgggcgcttaagcccggcgcgggcaagagttggacagttcaggggccgcgccgggccgagctgtcgcccgcgccacctccaccgccgccgctgctaccgccaccgccaccgcctgggctgcagcagatcgcgggagaacgtctgcgcgaagccccggtgcagccctggcgggaccgcagcaaccaccggagcgtgagcaacagcttcccggctggaggagccactgccccacgcgcccgcggcccgcgcgccgaggtaagctctgggcgcccagcccagaccggcgcccccggactgggcgccctctgcttgcccggcccccgccctcctccgcagagcgagcctgcacctgggcgcgccgcccga

SEQ ID NO: 5592 - DNA, 1134 bp, Homo sapiens
cgaggagggcggggcgcccggtccccagtcgcgcggccaccgcctgcccagcctggctggatttgagcccggcccgccgatcgctggccgaggcgcagctgaagcagccccccagccgcggcgcccccactttccaactccacggttcctgcggcgcgggcgcgatgcagctggcccggggtgaaggcaaggcgcggggcgcggggcgcggggcactgggagcgaggcactggcgcgggatgcccggcgcaaggtgcagggcgcgggccgctctctttccgcgtccccccacctcgccaaagtttttccacgatggtccctaccccggctgggtcagccccgtaatcctcgcctgtctcttgtctcctctttcctccccgagccgcggggctcccggggcgcgcggacccccgccaggggccgtgtaggcgcggagccccagccggcctgccttgggtccgaagaaagttgtggcttggagctagtcctccttctacgacccctgggggcgtccttccttctttttgagcccgcgatgggaaggcgctcccaccccatccccggggtctctgagacttcctggcgaggtggggcggcgcggcaggtgcagggctggggagggcctgacagccctggagagtgcccgaccccagtccgccgccgtcttctaggcggattccccagaggcaggtcccagtccccggcgcggggaggcggcgcgcttcagaggggcgcagggtgcgcgggggccgttggccctccgggcacttcccctttgcggtctccccgccctccttcggagctggtgcctgaggtcgctgggacctcagcctggcgtcttctctcgccccgagcgaggcaggtgccgtgggcggccccggctacttctgcatttcgagcgcttactttgcattcagctctaagtcggagagctctggggacagccgagagtgccagtggcctcatagggagactgagggttctgtttcacctcgggcgccgtgtgggtctgggctgtccacagcacctctgcgcctcagtgataggagaagccaagcgcgaggcctctcaacagctgcgtgcactctatttcccaggtatctggaatcccggcgcctagaacgtgtttttcgg

SEQ ID NO: 5593 - DNA, 1645 bp, Homo sapiens
cggcgctttccttccggaaaggacgctggattcagggcgcgccagtacgcgcagtagcggcccgcgagtcggcaggtgggtagccccggcgcgggaggaaggggaagttaccttcccctcggaagagggcgctggctcccccatcctgcctttataataaggccaccggaggagaggaagcagccagctgccgtctgcgctttgcaaagcatgcagttaggggagcagctcttggtgagctcagtgaacctgcctggcgcgcacttctacccgctggagagtgcgcgaggcggcagcggcgggagcgctggccacctccccagcgcggccccctctcctcagaagttggacttagacaaagcgtccaagaagttttccggcagtctctcctgcgaggcggtgagcggggagcccgcagccgccagcgcaggggcccccgcggccatgcttagtgacaccgacgccggggacgcatttgccagcgctgcggcagtggccaagccggggcccccggacggccgcaagggctccccctgcggggaggaggagctgccctccgccgctgcagccgccgccgccgccgccgccgcggctgcggccactgcgcgctactccatggacagcctgagctccgagcggtactacctccagtcccccggtcctcaggggtcggagctggctgcgccctgctcactcttcccgtaccaggcggcggctggggcgccccacggacctgtgtacccggctcctaacggggcgcgctacccctacggctccatgctgccccccggcggcttccccgcggctgtgtgcccacccgggagggcgcagttcggcccaggagccggtgcgggcagtggcgcgggcggtagcagcggcgggggcggcggcccgggcacctatcagtacagccagggggctccgctctacgggccgtaccctggagccgcagcggcgggatcttgcggaggactggggggcctgggggttccaggttctggcttccgtgcccacgtctacctgtgcaaccggcctctgtggctcaaattccaccgccaccaaactgagatgatcattacgaaacagggcaggtgagcgcagcgtggaggggcccctgggttcggggataaagggtgacgtgtggtcctggggaaggtccgggatgagggagctgaacccagttgttccgcgcggtgcttagagtgtttcaccgcgcgcaataaatctccgtagacaccgcatctccaatgcggtgtccctctgtgtcagtgccccggcggctcttgcagggtgccaatgttacggctgtacaccgcttttccctcccatcatcctcacctgaacagacctggaggaggcggaaatggaaattagggcatgtccacaagctggattcgttagatcctcctgctcggcggtatgcttgtgcatgcctgcatgccggcaaggagccacggatagggaaggctcaagagctggccacctgagcgcagtagatgggctcccgcagttttaggcgccagggtctccacggggcgtctccgggaggtgggcatgaaggctagagcgccggcctcggaagctcggtcggagtaggtggttagatctgccctggagccagacctggctcgggttcggtgcgcga

SEQ ID NO: 5594 - DNA, 4698 bp, Homo sapiens
cgcacggactcgcgttcgcatccgaagaccccacacgtcccccgcactgtccccacagcatcccacgcccgcggtgcacgctcacctgccggtagacgagccacacgcctcggcggtccagacttccgtgtcgacctccgtgggcgagcctacgcgctgggtgcccggcgcgccctcaggagtggctgggaccgcgggctggcgccgggcagggcggtgggacgcctggagccggcgggaggagcacgcccaggcgggtccgcgccgagcccgagcgagcgggcgagccgggcgggaggggccatttgtaaccgagcagacgctaccaccgccccttactcgcggggggcgggggcgggcggtcaggtgacggcggcccaccctccgccgccgagccgggtggttcctgcccgggaggagccccctggcgcgctctgattggaactcccgccgcagtggcgggggaggggggacacgtgaccgcccggccaggcggcccggcgcgccccattcgcgatgggcaccccatcttcctcctggaaaagccgggggacacagagaaggcggaggagcacgcggggtgcaggagagcctaccagcccctttagccgcagtgctggtgattccggccgctgaacccggagaggaaaggctcccacgcggccagccggccttgactgtcctctcgccctgcccttggccgcagtaccctcccctcggctgcagtaaccgccccctacacctccaggcaagggcacgctcagtgtagaccactgccacttcatagatgccagtgccacttaagagtggtgttgggttttttttttttcctttcctcctctctgcacaccagcacattgtacccgagagaaactcacggcggtgcactgcagacaccgcccagctccagggcccgaagaccctccgaccaggccccgggatgcctgaggtctcccaggtcattacgtggaggaactcaggcctgctccctgcgcaggaggaggaggcgtcgcgggagctgcagtccccgatccttcccaggaagccggccgggtggaaggggagagggccgttatcgtggtgcgaatccaactcgcagcctctgggagcacgttgctaataaaggtcaaattaaaacaactaagtggtgccggcagggacgcgccgcatggtcaggagaagcccggctattaatcatccataaggagcattgctcttctggtgtgggagaatggggctgtgcgacagccccccggagttgcgctctgctctgaaccctaagctcccccagagcaagtggattgcgcagcctattaccccacctccccacggccccctcttggggcggcaccaccctagatggcaggaattcggagaaaatgcggtgtcacgtccgccgctatgcccgcacacgcgtctgcgccaactccagcaacacgtggggaccgtgaatctgggcgtctgctctccacttaggtggttatgtgggtatacttatatgattactgattaaaaccaaattggacggagaagtctgtttctacactggattctttcaaacttctgtccaagggagttttgcgctcgatttgggcggggacgcagttttcagccaagaccgccgcagcgctcagcagagcccggggaccggtggtggtggtggcgggatggggaggaacagaggcccttgattctttggtactccactttctttccttatttagaccagtcgggcaacacgtccctcgcccaagatggcctttccaactggaacgtgactcagacaatgtggaagccaggggtccttgacccatcgtacctgggcttcgctgggcataggacaagggttgggcaggtttacctggaaagggagtttattcgtaaagcttcgggcataaacgctagatagcgaaactttgaggaagctcaaagtttacctattgtaaattggtggggggtgggggagcatcttatgtaaaaaggaacggccctattaaattagtaagtatcttattttcgtagtggacgtcttgctgcccttggtcctcccctcccccacctcatttctccaaaccaccaaggttggagaaatctcataaacaaagtataagtccgtggggggggggggggggggttacttggtgttttaaaaaaacaacaacaacaaacgacctttgtaataagaaaggtgggtacgttttcatttctaggtcttaatcttaacgttacggccacgttaaaattgaagttgattgagacaagagaatcccagagcacagcacgcagacagacaatttcacaattaaaaaatatgtacttccttctccccgctctcgtcacctccccctttccccgccattacctactcccgtttggactaggggctgggagaggaggaggatgtagtccctccgagtgcacaagggaggcggcggggccacttgttgctgcaccgccagaagagctaattccgagcggatctggcagggagttaaaacccttctcctggatgcgacgccccagagaccgaggcagacggcgagaacagattcagcgcctcgagatgtgctttccaatttgaactctggaccatctttgcttgaaatgctttgtcttgcacgtctgggaattactctgtgcgattaaacgcgtgacacacacacgcatacgcggggtcgccccgcaggggggagggtgcgtggcacaggagcctcggactttcaggggctctgcacttggggagtggtgcgagggggaccgcctcggtgtggctgctgacgtgagacaggtaactcggaaaggtcttcctccggctgccttggtaatgggaagctgtgggcaaaggtgcaggggcggtcccggagcgcacacggcgcagtccgcagtgaagggcagtggtgtggtggggcagagagactagacaagggcaggcgggttttgccgattccgagttcatccgtctacggggtcacgttctgttgagaaaatgcgcgacacccggtagggagagagtgacactgaccaagtgtccctggagggccgagccgtttgccctcgggagggggtcgcgaggcccgtcagcactcggctcccgcggaagctgtgctagcgcggcagtctcgccggcgcctggccccaccagcctttgccttcagcgtcctccggtggcatcgtccgagatttgcggagcagaagccgaggacacgagcaactcgctgtgggcttgaagtgaccacgccttagggctgtgaaaagctgccccgtggtgacttgggtacgaggaggttaataaagtgcagaattagtcttgatttttacctaaaatgaagctggtagtactgagcgcttaaatgactccgctaggaccctggaggttgtgggagcggggtgggagagggtaaatgctaggtttaggacaacacaggatatgtctaatttaaggaagctccccttctcgggccacgttctctgtagctctacccaactggaatcgcctctgcacccggggtcatctccggcattatgacacccagcgttgccctctaaactccaagtccccgcggccacatccttccgtgcctgctggcaccagcaagagtctctgcctgccctttctcctttacatggacccttttcctttcacccctagaccgcagtgcgactggcaggcacctcttcgccccctccgcgccccgcgccgacggtgggaacagcagcgacagcgcgaccgcagccttctagtgccttcgccccctcccccgcggccacacctcacccacctcacccgccaaaccccgcactccgccgccgtccctcccctgcgcgctcccggcgccaacccagccagaagcgggtggaagcccgggtccatgtgcaggtgtccttgtgcgggagtaggggagctcataggtcagcgatccgcgaccctaccctgccctcagctcggggtccacccacgtggaacccgccggcccccgcgggtacccaacaccagtctcccgggctcggctgccgttccctcgaagccccagggcgctcccacgggtcaatgaccacctcagtctttcctcaagccagggtttggccagttgggaaacctcttcgtcccctgcccacatcccctggcatctccggacaaagccactcggcttcccgccccggcatcgggaaagatgcgcgtggagagcgcctccaggcgctgggccacggtcccggtccctggccgtgcctgctgtgtgcggagctggggcggcgggtaccgcctgcgcggggcaggcaccccactcgccgttcctccagcacgggcactcgaccgccgcggcgctgcaggaaggaggccccgccgcgccggttcctccacacccacgtgcccctcgtgtgcgcgcccccggcctgcagatgctacaaggctggcgccgcctggatttccgggcggccccaccctccgcggccgctacgcctcgctccctgcattcagtctccttggcgtctccgctgcagcatccaagaccaggcgccgcctctgctagccgtgctgcccagcacgcctgagggccgctgccggcaggcctcacctcccgcccgggtcccccactcacctttccttctggacggtggggttcaagctctgcactggggctgttaagccaccgcccacgacctcctgtagggtgcagcgggagggcgttcccgaggcgc

SEQ ID NO: 5595 - DNA, 462 bp, Homo sapiens
cggctcgtaaactgattatgaaacatacgatgttaattcggagctgcatttcccagctgggcactctcgcgcgctggtccccggggcctcgccccccaccccctgcccttccctcccgcgtcctgcccccatcctccaccccccgcgctggccaccccgcctccttggcagcctctggcggcagcgcgctccactcgcctccgtgctcctctcgcccatggaattaattctggctccacttgttgctcggcccaggttggggagaggacggagggtggccgcagcgggttcctgagtgaattacccaggagggactgagcacagcaccaactagaggggggccagggggtgcgggactcgagcgagcaggaaggaggcagcgcctggcaccagggctttgactcaacagaattgagacacgtttgtaatcgctggcgtgccccgcgcacaggatcccagcga

SEQ ID NO: 5596 - DNA, 300 bp, Homo sapiens
cgctgcaaaacagccgccgggtgcagtgggccgggcgctcggccaccctggctgcgatcatcgcagcctcccaaaggatgcgggcagatgcagacggctctggcccatctgtccctaaaggcctgggactgtgcttgcgtgctccgggagggtacccgaaacctgggagctctccggcgctcccagcctcgggtatctggggctctttgtctcccaacagcactaatcctgagaacaacgcgcaccgaaggcggaggcccctgtgctttggacaagcccgccacgggcaagccagttcga

SEQ ID NO: 5597 - DNA, 554 bp, Homo sapiens
cgccggggcggggattaccttgtagcaggagcccgcagacactgtagaagcggagaacggcgctgcgtttccaaatcatggtcccttctctaaagggctggggaaggaacgagggggcaagtagatgctggtgagcggggcacgagagtgcagggctccgctggtgtcctcctcccggcgcccgccggacccaccgtccccaccgctgcggtgttcgaacccgcggactcggatcggcggcagcagaagcggcagcggcaaagcacccgcagaatggggtatcgcgaaatagtttcttctcctcctcctcctgctggtggtgcagccgcgacagcccgtcttccaggcaggggtttggagcttgccttcctctcggcgcgcacagcaagtcccagagcccgccggggctgcccgagcaggtggtgcagggatgccggggtgttggagaaggtgcgggcgagggctgcaaggagtgggtaggtcacggaggggaagggctgggggagaggaggagcaagcaagcagcactgccgctcgcgcccggggtgtctcgg

SEQ ID NO: 5598 - DNA, 1153 bp, Homo sapiens
cggcgcacacaagttgaggactgccgaggcgtctcctgcgaggtaaacacgaagtcgcttggttagtgagaagaaacccgaggtggcctctggggcagacagagcaggacctgcttctgccccttgccctcctcgtcctcctctctccagcggcggcgaccgcagtaacagcggcagtggcggctgctgccactgctctgccgctgccgagccggtcacctgggcacccgcggagccgcgccgctgctaccgccccggcggcctcccggagtgcgcggagggggcggcggaggagcgagatatccatagtaaccgaggatgcgaggggcgcccagcagcagcgagtgcctgggagccaggaggaggcccccgcgcgccggcaacccccagtgctaggcgccctgcagcccccgcgcgccgcgcctgggcccgcatcgctctcgcagtgagggtccgcccgagcggtaagccctccccggcggccaagccgacacctcccccccgcctcgccgcccaccccgggcagcagccgcggaacaatggagagcgcagccagcagccctggagacggcgttcgggggaggacgcgccgccgccgccgccgctgccgccagggcaggcgcgcgccgcgtggagccgggcgggtgcgagggcgcgcggcggggggtggggggcacgcgccgcgcggggggcgggggcagtggggggcgcgcgcgcgggcccggggagctcgcggggagagcccggcgctcggcgcagcgcggcgcggccaagctccgcgcctctcccgcccttcctcggcgcgctcgccctcgcctcgccgctcgcattcgctgggggcgcccagaaagatgcacagaggcaacggctaggggagcggaggttcaagccacatgtctgcgtcctcgggggccagagcccgccagccctcgcggatcccggctcgcggccagcccgagcggctcgggtgagtagcggcacagcggccccctcgctccgcggcccccgctcgccgagacgtggctccaagaagtggtgccgcagccggggcagaggcggaggaagccgagtcgggcaagccgggaaggctgcggagacgctttgccggggcaggtgttgcagcctcagctagcggtctctacggagggggcgg

SEQ ID NO: 5599 - DNA, 1603 bp, Homo sapiens
cggcccgcagggggtgtcccggggcgccccctgcgcgaggtcccgggaacagggcacgagggtccaggctgcccagttgcaggtgcagctgcttcggaggaggacgctgcctgcggcgccggggagctcctcgcggctggaggcgaggggaattgcatccaccacagtgtcccgcttgcgcgaggactattcacttgggccggagagagcgcgcgcgcgcaagagcgagctcgggctgtggtttgggggaggggagcgagggggcggggagcgcctcaccgcgaggacgggggcggggacggactgccaggtggggcgggcagttggggcggcccgaggacctctcccgactcaagtgggcacttgcggagccaaaagcaggggaggcgctgcagctgtgaagaggcgtgggggccgcgggaactttcctctggccggtgcgatgaaagccgggcggacgaggtggctcaacggggctgagagtggttcggccgaggcgcgggctgagccctcagcacctggcctgagcggcgtgggcagcagcctgcaccgcggacacctccaactctgccgcgtctgcgccgcactctggccgtggcagcgattttccgggcatctctgaggccgcccttagtcccacaagcacttagccgcccatttcagagcagcggcgccgaccgttttaagaggagtcagttcccgacaccgcctcccacttacttctccacatttccaccgctggagggggtgagtgccgtggacaggcgctcccgtccggggacagctcagcggcggcagtcagcccgaccctcctccgcgcgggtcgcccaaacttgaccagcagagcgagcggctcagcgcagtagccgccttcgcggcttccagttgtagaaaagcaaagcgccgggaggaagcagcagagggggggttacatgaggctggaaagtggcgggtgtacggcgcccgggatcgccgaggtccttgcgtcgccttgcggaggtgacttcgcggtggaggtcacgagcatcgtcgcagccttgacgctgggattcaggggtccccgagcgtccacggcgtggtggcgtcgggccgcgctctcctagcagtccaagggccgagtggcgcgtggccacatccacagcagcgcaggggcgccgtgggctgacggctctccccgcgcgagccgccccctcgcggcacccactccctccccgcgctcgggtctcccggaagccgaggcgcgggccacttggtgggactccgcggcccccgccccagggccggggcaacgcggcgtgctgactgggaggaccctcggcgtccgcggtctccaccacctcgccccgcggcggaggcgggcgcccagggcagggacggagcccggagcgctgcagagcccggccaagcccagccttctcccggcctggcagccgcggctcggatgccgccagttcggcgctagagggggttagtcgacaacaaaaatgcctgcaccgctcgcaggtggaggcggctcatcaggccaggaaccgaaaggagggagggatgctgtcaggctaaacttaacgccttggttaagggcgcgtcaaggaaaccgtatcgc

SEQ ID NO: 5600 - DNA, 1411 bp, Homo sapiens
cggtccccgctactcgggtggatcctgcttaccgcgagcggggaggcggttgccttccgtgcaggatttccgttgagggctcacaataagcggtctcaagcgggggcacattccccgccacttccgcggtccctcaaacaaacaaagaagccaaagtcggctgtcccaagaccaatgtaagcgcttaggaagctttgaggcgcttgagggcgaggcaggctgccgtgggcaggtgtgaacacctcagccctcgcggcgggtttggagccgcccagcgtaggaagagggcagaagtgggctcgcgtctatgcgggtattcgaaatgaaaaagagctgcaaacggcacaaaagtccgggggctaggcgcaggaaaacagagcaagggagctgccttagttctcaaacactgcatatggatgggtgttccgcggaagattattctagaccctgtgaaagaagtctccactgggcgccggccacggcattggggtgcgcgcctgctctgcgagaagggtcccccaggccgcgcgggggaacgcaggagacgcctgtccccgggggaaccagcggaggattgtttcatttcaaagtgaaaatctgcaggctttgggaaacgatattcaaaaaagtatataatctccatatgccgctcaatggaggatcctcataatttacagcggcagataaggctagagggtgtaataaaaaatctgaagccctcccctcccccctcgccgcctccccggaattgcaccttgggcagcggagcagaatccggaatgtgaacttctcccgacatatgtttcccgcagataagtaaacaatctggacgtgaaatggaaatggtaattaatgcagtaatgctgttacacctcgagtgtgcaaatcccattgactcgccgcgccacggggggtgccgggcgtacggggaccggtggcgtgcgcccaggctgcccactccctccctcctctctccctcctccctaggtccccgggcggggcgtccagaaatcccgcagggatgtggacgggctgcgggaagcaaggagctgcttaagcggcgttcgggactcccggctctcggcccttggaggactgggcgggtgctctgcgtttgcctcgacagccgcacctctcacccacctccctcggttatcaccgccgcgctagcgctagcagggcctcctcggggctcgagtgcagcccggccctgaagcacctaggagagcctgagctcgggcgacagaggcctggaggcagagggaaccctcaaacttagtgcggcgggtggccctgagtgcggcggtcaggtctttctctcctctctgttccggggccaagtgctgccgggttgtctggcgagagtttttctgaagtttctttccatcctcgcaccgaaagcgctgatcgt

SEQ ID NO: 5601 - DNA, 2629 bp, Homo sapiens
cggcagcaaacggcagagcaaaggagtcgttttctttcacctgaaagccgcgaggaggcttggagcgcctttcctcgctggggcccgagcttcctgggctttggccgggtgcgggcagaccccaccggggtcctcgtcatctcccagcccagcccgcagagcgagtaccggcagatttcaagggcgcgtgagcctggctgtcggctgggcccctgaggctcgctgggcgggggcaggccggtccaggctgtgcggggcgtttacaaaaagtgacttggagatgaactcgcccgtgcgcggctggccgccccgctataggggcgaaggcgcctgacgcaagcggaactcggtggagcccatacgaatcagaacagagcgaggctcctggcgcactagggactccaggaggcagctccgccagagacgcgggtcgtgcttcgggaaaccggggggcggggggaggggaagagcgcagaaaagaaaacccaccaaggcggggactggcctgagcggggaggggcggcgaggccggagcccctctctgttgggcggactccccatggccagaggctgagctccactcccgccggccgctccctaggggaaggggaaggagaggggagagcagcgacaggcctccagcaagcaagcgcgggcggcatccgcagtctccagaagtttgagacttggccgtaagcggactcgtgcgccccaactctttgccgcgccagcgcctggagcggagagcagaggcggcccggccgcggcgcgccggctttgtcatgatggccagctaccccgagcccgaggacgcggcgggggccctgctggccccagagaccggtcgcacagtcaaggagccagaagggccgccgccgagcccaggcaagggcggtgggggtggcggcgggacagccccggagaagccggacccggcgcagaagcccccgtactcgtacgtggcgctcatcgccatggcgatccgcgagagcgcggagaagaggctcacgctgtccggcatctaccagtacatcatcgcgaagttcccgttctacgagaagaataagaagggctggcaaaatagcatccgccacaacctcagcctcaacgagtgcttcatcaaggtgccgcgcgagggcggcggcgagcgcaagggcaactactggacgctggacccggcctgcgaagacatgttcgagaagggcaactaccggcgccgccgccgcatgaagaggcccttccggccgccgcccgcgcacttccagcccggcaaggggctcttcggggccggaggcgccgcaggcgggtgcggcgtggcgggcgccggggccgacggctacggctacctggcgccccccaagtacctgcagtctggcttcctcaacaactcgtggccgctaccgcagcctccctcacccatgccctatgcctcctgccagatggcggcagccgcagcggctgcagcagctgcggctgcagccgcgggccccggtagccctggcgcggccgctgtggtcaaggggctggcgggcccggccgcctcgtacgggccgtacacacgcgtgcagagcatggcgctgccccccggcgtagtgaactcgtacaatggcctgggaggcccgccggccgcacccccgcctccgccgcacccccacccgcatccgcacgcacaccatctgcacgcggccgccgcaccgccgcctgccccaccgcaccacggggccgccgcgccgccgccgggccagctcagccctgccagcccagccaccgccgcgcccccggcgcccgcgcccaccagtgcgccgggcctgcagttcgcttgtgcccggcagcccgagctcgccatgatgcattgctcttactgggaccacgacagcaagaccggcgcgctgcattcgcgcctcgatctctgagagcccaccgcatgccggtgcagacggatgcgaggatgcagggacgcgcgacgccggccccggtcgcagccgacgacgccgccgccagcctgacctcacaccctctgggcccgcctctggagccagcgcccagggtccctctgtgctttttcgctttcctaagctcctgtcgctcctctttgtcccctcagtttatgtcctcctgtgctcacctccctgacctctgtgaccttgcactcccctggcctgaagctgcctctctgcgcgctttctactgggctcgtctctttccggagccccagcgtctcctgcccaaattcaccgcggaaagggcccggggcggaggtgcgaccgggcgtcggcagcgcagacctcttggccttctctcacaggtcggtgcgctcgctctccgcgttccccgcccgactgccgtgcagtccatggctagacgcgccggacaggactgatggcgggaccgcgctgcccgagaaagggacggaccaatacgtgtgtttgctccgcgaaccctcttgaagctgttcagaagccgcttgccgcggggcccactaggcggggcgggggttgggacccagcgggagccggggcagcctggctccacggcctgtactcggtttacaccgcgggcgggcgcggagggaggctgcgtttcctccgctatcagtcccgtcgcttcgggcacctccgggccccggcgg

SEQ ID NO: 5602 - DNA, 1686 bp, Homo sapiens
cgacgctcccaggcagctgtcaaagtccggggttcgccggcttccaggctcgcctgacagagccaggcgttcgcttggatctagcttccttccgggcgggaggcgcggggaggtcaagctcttcaaaggaacagggtgggcaggggagtggtgccaggttaggctcctcggtcctcggtagtcagagcggagtaggaaaggcagcggggagcctcacatcccgcgcttcttccggaccccgccgcctacccggagggtacacgttccccggggagtcagagacgccctgggggagcttgaggagtgtcagcggggccttccctggagcctacaagtttccactccatccccgagctgggagacaagtcacagctcggctccctccttgaaagcaccgccgctgatccttcccccaggcaggagcagacacctgcttgtccccacggcgcgccagcgccctgctctagccgtccctgggccagagctcgaaactcacccactgcgctcccaccccggcacagacagccctcaaagttgtccgtactccccagacctcgccttctgctcagcccccggaccccgcccaggggttgagttgacgtccgcgggtggacctctctggtccgctgcgcagggaactgacttcgggaatccagggcgcacagaggccaaagaagctgcggcaagggagggtgggcaaatccagcttgagcctaggtccttgccgctttcaccctcaagcctgccctgcctccctcctgggagaagagcaaacttccccagcacccacctttagccgcgaggaggcggcgctgccggctgtccccgccaccgccgctgccgctccccacgcccagcgccagcaggagcggcacccagcacagccgcccaggcagcatcctcgcagcagccgccaacgagctgcagccgccgcctactgtccgcgccggctctcgcctcccggtgcctgccgcaccgtgggccgcctcgccgtgcccgatgggtgcgcttctagcgctgccgccgcggcgctcggcctcgggttcccgccgctgcgccgctagctcgccggcagcagccgcgctcactggcgcggacccggagcggctcaggcgctcaccccgggacggcccgtgacgtcacggagggagggaggtggctcgtgcatattcatgaacgcgggcatcggcgccgggttccgcgctccccgccccaaggccccgacccccaactttcctcagccgtctccacgctccggggccctgtccaggtccccctgcccagtcgggaccgggcccccagaggaccctggtgggcggctccggagagccctccagccccgcgcctccactccgactctcggaaaagctgccgcaagggatggagggctcccccagaaagtggccacccgaggcctgagggtcatctggggtggcgcgagggaccctgacctgccatgccctttgaactgatatctgggcggagaggactgacgggcgtcgctaagggtcttgcccttggctgggtctctgggcgttctgcgtcgactggtctggggagggcgccaggcgcacactagagcagcgcctagtggtgctaggggttgtcgggcagagtagatagccttggacctggatggcaatggcagggctccgcgtcatctccgagaagcaggggcagccgcgg

SEQ ID NO: 5603 - DNA, 1686 bp, Homo sapiens; identical to SEQ ID NO: 5602

SEQ ID NO: 5604 - DNA, 2132 bp, Homo sapiens
cggctcgaagagctggtgagcgcgaccacagggcagcttgcggacggttctttcggacaggacaagggcgagggaaacggcagaatggtgacgcacctgagtgcgcccactagacgaaagaagaccaactaagccttcgtgtagtgcgtagacaggccgacacacacacacacacacacacacacacactaacacacacgcaaagacagtgagggagcgagaggcgcatccccaggtagctgacaatgacacggccccgatccggacgcgggcttaaagccccccgacttccggagtgcccccctccccggcgacctccggagattaccgctggcgcatctctccgccctgcccggctccggcgccctcccctccccccgcagccgcagctccccgccccccgcgaacgcggctccccagtgtcctccagaacgcccgcgtggctgtcgggtttcgaaccccagggccgactctagtactcggcgcgcgcgccgccgcgtcgccgaccagcctgcggcccccgcatcaatcattaacggggcggcccgggctgcggcggcccgaggagggggatggtacggaactcgagacaggggacaactctatcccccgaagcggccgcgaaaccctagcctgggaggcccccgcccttcctcggtgcgcccgtccctccctccgcgcctcggctcgcacatccccacctcccgctccgggggcggcggcggcggaggcacccgcaccgcgcgatgcccagtcaccgctgccgcgctgccgccgcagtcagccgcgccgccgccgctgccgcagcgcgggcggccgcgcgccggtagcaggggcttggcgaggaagccgctgagcctcgcgcgctccgcgctcctggcggtcgcagcgctgcctattaattgattctcttattgatttatttaatttttaggagcggctgctcggaggcacgggtcttctcctaaacctgcagcgacgcccccggcgtgggcacaaaggctccgacggcggccggcgggggctgcccagcgcccgggagccggcgccagaggtcgcctgcgcgcgccctagccgagccccgggcaccatgccgcggcgcctgcagccccggggcgcgggcacaaaaggccctccggccccggccccggcagcttcgggggccgcccggaactcccactctgccgcctcccgggaccccccagcgtctgccaagccgctgctgcgctgggacgaggtgcccgacgacttcgtggagtgcttcatcctgtcgggctaccggcgtctgccgtgcacggcccaggagtgcctagcctcggtgctgaagcctaccaacgagacgctcaacttctggacgcacttcatcccgctgctgctgttcctgagcaagttctgccgtctgttcttcctgagcggcggcgacgtgcccttccaccacccgtggctgctaccgttgtggtgctacgcgtcgggagtgctgctgaccttcgccatgagctgcacggcgcacgtgttcagctgcctgtcgctgcgtctgcgcgccgccttcttctacctggactacgcgtccatcagctactacggcttcggcagcacggtggcctactactactacctgttgccaggcctcagcttgctggatgccagagtcatgactccatacttgcagcagcgcctgggctggcacgtggactgcacgcgccttatcgccgcctaccgcgccctggtgctgcctgtggccttcgtgctggcggtggcttgcactgtggcctgctgcaagagccgtaccgactggtgtacctacccgttcgcgctgcgcaccttcgtcttcgtcatgccgctcagcatggcctgccccattatgctcgagagctggctcttcgacctgcgtggggagaaccccacactcttcgtgcacttctaccgccgctacttctggctggtggtggccgccttcttcaacgtgagcaagatccccgagcgcatccagccgggtcttttcgacattatcggccacagccaccagctcttccacatcttcaccttcctcagcatctacgaccaggtgtactacgtagaagagggcctgcgccagttcctccaggcgccgcctgccgcacccactttctcgg

SEQ ID NO: 5605 - DNA, 2954 bp, Homo sapiens
cgcccagagcgtggtagtctgcggggccgcccacgccctccttcttggcgccaagcttgtggcccgcggcctccaagaagggcatgcggtgagctcgcgggtctcggctgcgcaccacctgtaggctctcacggatgaggccgtggcgcgagcggatccgtgaactcgccaccgcgcggggatcacgcaccaagtggatgaccttgaggtccagggccgggtctcgcagcagtggcgccaagaccgccacgtcgaagacgcgcacaccctttatgactagtgtgcggtacttgcggcactcctcctcgaaacgcgccaggcgctgtggcgggcacttcttgcacacgcggtcgtccaccaaccccacgacctccttgcggtaggcggggcagagtggtgacgagcacaccaccttgttggtggctgcgccgaagatgcccagcgtggtgaggttgcgccccccgctgcccgcggggctatacaactggaagacagagaggtcgcagcggtaaagagcgctcagcatgtcccgcgctgccccctgcagggaaacggcgtcccccggatacagtttttgccatacatgccacactggctcgtagagaaagaacacctcgggattctggttgaatagctcgccgaagaacgacgagccagagcgccacgtggtgaacacgtacaccagctgccgcttgtccccgacgcccccggtgccccgagtgccattgcctggaggggccgcaacccccgccatccctgccgcggctgcaggagccgccccgacggcggcagcgggagggcggtaaggagtgcggaggtccaaacgggcatgagcacggggcggcccggccggaggcggccctgggcgcccccagctgcctccggctgcccccgctgcggcacccagcggcccatcggggttgcactgctgcagcggctccttgtgccacttgtagtccaggaggttgagcatagtgagcaccagcagcagtgcatagcccgcgcacaacaccagcgccttcctacggaacaccttcattccgagaggggacgcgggccagcggcgtcctgggcgccggggccactgcgggagcagggcacgcggcgcggctgcaggcgcagcctggagcagccgagggagcgcgcccgggggcagagctcgctgcgggctgcggctcatcacaggcacaatccgggccggcggcgcggcggaggcagccctgcagcccgggaaggggacgcagcgggctggctgctggcgccgggactcgggccgcgactccgaggcgggcgcggcggctggtccccagcgcccaaggctggctctcccatggcagcggctccgggtaggacctgcgaggggaagcggagtgagcggatgcgccccaatctccctcccagcctcctcctcctaagtaacgcccaccctcggttctgcccggttcctccgctcacctggagccgagggcgcgcccgggagcggccccggatcaccgcccggcggactgtccggctgtcactcgttcctcgatttcgctccctctcgcttccgctgggggtccccgcaccttcgaggggtctggggagtcggccgacttatccctgggcagtttccgggcagcgggcgccctgcggctcgggaagaaaaactttcacgcggcccagagccccgctccgcgctccgccgaacccggcgcctcccggctccagcgacgtctcctccgctttctcgggaccgcagcttcctgtctcgctcaggggaacgaagccggctgggggcgatggctgggggcggcttatatgggactcagctcccggcatagcggcgcagcccctctcgctttcggcctccgtgcggcgaattttcccacctctctggcagcggtggatggggcacagcgcgaccccgcagcggcggcggcggctgcttccatcaccgggaggatgcccgggcggacagcgcaggcaacccccgccgctccgcagcctccgactggaccaaaggaccccgaacacacagctctaggcaaggaaacccaggtgtgcagcactgcccgacccgacccaacccgcccccggtaccagcgcttctggccaacgaggtatttaagcaaagaaagaccccgccgcagccgccgccgccgcgcgaaagcggcgcccaggaggatgctgctacccgactccccttacgccgggcgcccgcaacgcgctcggaccagcctctgcgcggctcctgccagccggcgcccggttggtgcgcgccgccgtctgtcgccgcggctcctcccctccgccgcgcagccctcccccttcgccggccccgcccccgcccccaacgccgagccggctcccaccgtcgctgcgcctcgggggctggagacgcgacccgctttaccgcgacgcgcgggggctgcagtccacgggtccgaaggcttagctctgcgcgcaaagcgccgggatgcgaacgcgggatctggagctcgtcggtgccgagagctgccagagagttggattctgcgtgcagctgccggactcggccccatgtttttgctctcagaaagagttggtgatgaagtttgggcagaaatcccctgtcggccgtccgctccacgcttccctcggggccgacactgccaacctctccgggcactgaggacacctctgcgccctggagcggtgggaggacgcggagcgccgttctctggcttccgacaccctgcccgccctctctagtgggtctgtggctgcgccctctcgaaggaagtaataaatctttctgaccttgggggtcagaggagacgcttcagttttccggaggggtgtgcgggcgggaccgtctttccgctttactggacctctggccggggctgctcttgtttcattgtgccccacatgcggagccccgatgctctccgcatttccgctcgcggtgctgcgtccactgtgattgacgt

SEQ ID NO: 5606 - DNA, 2954 bp, Homo sapiens; identical to SEQ ID NO: 5605

SEQ ID NO: 5607 - DNA, 885 bp, Homo sapiens
cgcccgccgcccttttgaggtcacggcgcaggagagaaggagggcgcggaaacgccggcaccggctgggaagcttcggtgctccgggtccctcttggcgagggcggagaagtcggcggcctctgcctagaattctgtgattgtagggatcgagacatcaagggcgggggtgcagaggattacaagttccctagcgcgtctcatttgcacataaatgtgctttgcctcctaaccttgtctctgttacctgtgcacctgccttccaccaaaccaaccaaccacccgtggctcaggaagaaaccagaactggggggattgtcttcccaagggggacacagttgaacgtggccggcagcctctggcctcccgggcctgggttcagacggactccggcgctgcttccaagaccgacatcgggcacctggccgccggcgcacccaggagcacgatttcatgcgtgtgcacgctctctgctcgggccaggagctctgtttcagccccactccgggctataaatccctggttccgcccagcgcagcctcggctcggagggcagcctgctagccaggtcctgggttagggatggcccacggtgcgcgcggggaccgccacactccttagcgccacgctggggccgcgcgggccggagcagggggagggggcccgatgacgtcatggaacagttggaggatttagctcgggaacccgccggggagcgggccccggggccggcgttccatttaggccgacagcgtcccgggctcggctccactttcccagacggcacggctgccttccacgtccagagcgggcctggggttctgaaggaaatcagtgcacgatcgcgaggccaggaactctggagaatgggcacgcaggcgtgcgc

SEQ ID NO: 5608 - DNA, 2174 bp, Homo sapiens
cgcgctgtgcttcccagcgctccaggggcccggcccccagctcggccccacctgggcgctctttcgctcttccgtgggtcggcgggccgtgcgggaggaactctggctgccgcgggctctgcgtcccacctgccatctcggtggctctcgcccgggccccgagtttcctgcggagctagcactccagctgagccagccggaggggcggcggcggctccgcgcgcccagagcctcagcccatgaatgggactccaccctgagcgccccctcccgggcctggggaggcggcggcgcggcggcggggggcgccccgcaagcccgcggctctgagcggccacccgcgcagcaagttgggcgagttggcagccgcctgcacctgcctcctggccccggcccctgattccgcctccggccccaagcgcccgggttgcgccctcggctgcctcgcgaggtagccccaggaggcctaggggccccgcctgcgcccctggcgccagaccatggtgggcagctccggccaggagcctcagccgccgcgagccaacatcgcctgcagccagcccccgccccacccgagcggacgcgcgggtattcgcagcgcgcgggtcacttccttcctcggccgggatgggcggcgcgggactgagtgatcggccttgcgtccggcgggtaatccccatctgatctgctgcctgtgagctgctgactgccggggcgcgcgagcctagggggcacgggcagcagcgcggcgatgacctgatcccgagcccgccagggcgccccttccttccctcccttccctcgctccctctgagcctgtgcggagaccagctcggtgcggcggccccgggtggaccatggcggggagctccagttaaaggcgtgtgggcgccgagctggagaggacaccttcggcatcgctgccttttgagggggcttatttaaactactgagtcattccagatttaggattccctaaataatcaccaactgtgcccgtctcgtgccggaaagcaagcggaaagagaaagagcgcccactcttgggaccccgcagatcgcctctcgctggtttctccccgaggggtgcttggccctcgaggatctccctccctccctcgcgccctcccccctccctcgcctcccgctctctttgcagtgctgctggccgggagttgctctcaccgcagctggaaacagctgcccccgccccgcgcccctacccagactccgggtaaccgctcccacttcgcgcctctcggaattccagaactcgggtggccggcccctggaaagccgcagccggcgcgatgcattctgtagacctcaccctgctgggacggacctcctaatcttcagaaccgcgggccgcagggagttaaattgctgccttcctctccttctctcgtgcggttggtggcttgttttctaaaggaacgttttattcactttttagtattttctaccgggggcgcgctacccgcctgggtccagactctgctttgtaaacgggttttctatgtatgtatgtgtaggtatactttggacaccttacaacgcttgcgcctctccaacagaggcacgtcttgttattttgggcatcgttcttccccttccacttggtaccccgaacgcagtgtgactaaactccccactgccccttggacgccgatcgccttggggtgcaagtttggggtgcaaacgtctacttcgcaagagggcctgggaccgccccgccccgccccccggccgccagaggttggggaagtttacatctggattttcacacattttgtcgccactgcccagactttgactaaccttgtgagcgccgggttttcgatactgcagcctcctcaaattttagcactgcctccccgcgactgccctttccctggccgcccaggtcctgccctcgccccggcggagcgcaagccggagggcgcagtagaggctggggcctgaggccctcgctgagcagctatggctgcggcgatagccagctccttgatccggcagaagcggcaggcgagggagtccaacagcgaccgagtgtcggcctccaagcgccgctccagccccagcaaagacgggcgctccctgtgcgagaggcacgtcctcggggtgttcagcaaagtgcgcttctgcagcggccgcaagaggccggtgaggcgg

SEQ ID NO: 5609 - DNA, 873 bp, Homo sapiens
cggccgggcttagcgatgcggctgagctgcccacccgcgtctgttgaatcggccaatcagcggcgcccccggacctagcgggagcgtttccatgccgaccgcggcaggcgtgcgctctccggggccgcatcgccatggcgacctgctcacctgactcgctccgggtggactcgccgcgacccctgggcgttcaggcccctgagggcccaacgggcgacggccctccagctccagctgtgcgtctccgcccgggcgaggtggggctgaccgcggccgtctgcacacgtcccctctggtccgcgcccccggcctgggagggcggactcgcccaccccacgatggccccggctttggaagggactgtttccgtgacccgttctcccaacagccgctaacaaccccctctaacgtctcctgcgcggcccgctcctgagaaccctggctcgggagagcgacgcggggtcctcggggctgcgcaggctgcggcgccctgcccacgctggcccgagggcgcggctcgctccgggtcggctcacacacctacgcttcctgccgggaggcggctgggacgcggcggggctgccccaagtgcagtcgcggcagtgttgcgtctccatcgcgggggtccttgcgggccgcgcctgccccgcccggctcccggtgcatgtggcctgcgaggcggcagaggagatgtggggatttagggtcgcacgtcgtgctcgaggtccccacgagaggtcttcccccgcgggctcctgcgcaactgcgtgaagccggcccgggaaagccaagattgtggcccaggaagaggaaggaacgcgggcgacagagctggggcttgggacgttgagggggtcggtggcagctctccgg

SEQ ID NO: 5610 - DNA, 2174 bp, Homo sapiens; identical to SEQ ID NO: 5608

SEQ ID NO: 5611 - DNA, 510 bp, Homo sapiens
cgcgcagccggagaggagggggcggcatccgggatctggcgcggcttttgccttttgcgccagcgtgagctcggttagggtctccacggccgtgctttcacccctcagggaggcgtcggtgattcggtcacagcctcagcctccgtcgctctgtgacctgcgggtattggatgattcgtagctgagactccgctacacccctgaagtggggaaatggtgagtgtgggggcagggcgtcccaaggctggggaggcctcatccgaaccggcgggaaatggcggcggcgggacggagtctgcgaacggagtctccgctgccgccgctcagccctcagtccttggtcccttccggtgagggacccgggttcatgtcggtccccgcaaggcggctttggcccagcctgcagccctacttgtgcagctctgcgcccgcagccccgcaccttccctgggctgtggggtgaggaggagctcatcgggaaaacgcctgcgtggcgtgcgaggtgcccgc

SEQ ID NO: 5612 - DNA, 511 bp, Homo sapiens
cgctctgattcggtttgggcgcaagcaaacccaggcctggccgccgggcgcctgggccgcgccaactcgctctccccctcccacgcccgtccggcacctcctggcccgccaagccccagatgcgggtgtttgttccagaaaactttcggcggcggctcgcactgagcatgctcggcggcggggcgggcctggggtccggaagctccagcgactcggcggcacccgccgctttgaggtagcgggtcccgacaggcgatggacccctcgggctcccgggggcgccccacgtgggtgctggccgggggtctcctggcagtggccctggcgctggggggccgaggctgtctcggcgccagctcacgtccccgctggcgccccctcggcgcgcagccaccccgggatccccaggtggctcctaggtctgggcccggcctgaggatccctccggggcggagcggggcggggcccgagagcagcacgcaggtaaggagggcccgaccccaggctccgg

SEQ ID NO: 5613 - DNA, 417 bp, Homo sapiens
cgccgccacctccctcctggagcagaaggggaacccgacgcctaagcggttgcgtgcgaagttcccaaccaggctcaaggagtcgcagagccggggctccgggcccgcaggacccagaagccacgcgccccgcgctccccgccccgccgctgtctgctcggccgacccacctggtgtcgcgtgcgctggcggcccgcgcggcagccaagccaaaggccgaggccgaggccgagcgcggcgcccagcagcacggcgggggccagcagggcgggcgccggccgcagcgcgtcccgccccagcagcagccgcgcgtcgctcttgcaggccgccccgccgcgggccatccggggcgctcaggctgccgccccgccgcatcccgccgcctgctgcaccgtccccgccagggcggcgacgcgg

SEQ ID NO: 5614 - DNA, 1748 bp, Homo sapiens
cgcgggtcggggagctgcacctcttgcaggctcggctctcggccccgccccctagcgtcggagcccgggagccgcggctgcagcctatctctttaaatgacagctgaggctcgggtcccagtccggggcttgacgtcagtgcctcctcccgtgctgccaggagtagttagcgccaccgtcggcgctccggcctcgcggcacgcttgcaagctgccggggcggcgagttttctttgcttcggcccctcctcccgccctccccacggagagccgagcagcagccctagagcctctcgcaagtctctctcacacttccccgccctcgccccaaaggagcagcagctccttcttgcctctccattgccgccgccgcaccggcggagctcctctctcgcgcgtctctcctccgatggagctcgggcgccgccgacgccgccgctgccccgaaccctgagcggggccgccccggtcggaggaacgcgccgcccagtccgagggcgcagagcgccaggagcacgcggagggctggggcgcgggctccgggaacgagaaagtgcagctctctcgggtcactgggccggcggcggggggactatggctctgaaggacacgggcagcggcggcagcaccatcctgcccattagcgagatggtttcctcgtccagctcgcccggcgcgtcggccgccgccgccccggggccctgcgcaccctcgcccttccctgaagtagtggagctgaacgtaggcggccaggtttatgtgaccaagcactcgacgctgctcagcgtcccggacagtactttggccagcatgttctcgccctctagtccccgtggcggcgcccggcgccggggcgagctgcccagggacagccgggcgcgcttcttcatcgaccgggacggcttccttttcaggtacgtgctggattatctgcgggacaagcaactcgcgctgccggagcacttccccgagaaggagcggctgctgcgcgaggccgagtatttccagctcaccgacttggtcaagctgctgtcgcccaaggtcaccaagcagaactctctcaacgacgagggctgccagagcgacctggaggacaacgtctcgcagggtagcagcgacgcgctgctgctgcgcggggcggcggccgccgtgccctcgggcccgggagcgcacggtggtggcggcggcggcggcgcgcaggacaagcgctcgggcttcctcacgctgggctaccggggctcctacaccaccgtgcgcgacaaccaggccgacgccaaattccggcgtgtggcgcgcatcatggtgtgcgggcgcatcgcgctggccaaggaggtcttcggggacacgctcaacgagagccgcgaccccgaccggcagccggagaagtacacgtcccgcttctacctcaagttcacctacttggagcaggcctttgatcgcctgtccgaggccggcttccacatggtggcgtgtaactcctcgggcaccgccgccttcgtcaaccagtaccgcgacgacaagatctggagcagctacaccgagtacattttcttccgtaagttcgcagccccggcgtttcccagcacccctcgccccctgctgagccgccgccagtttgagccccgctggaggccccgcgggggtgtccggggcaggcgctggttaactccttatagagagcggctctccctgcacgattcccttatgcagtagacacgatttacatttcaccgattcggatatttccgt

SEQ ID NO: 5615 - DNA, 1748 bp, Homo sapiens; identical to SEQ ID NO: 5614

SEQ ID NO: 5616 - DNA, 648 bp, Homo sapiens
cggctgtgtcgggagtaaaggttcgggctagtgtgcgtgcgggcgcgggtgaccccacctttagggaagccggcgcccaactatccaggcagtagccccggctgaccccctccctcctccttccctcctctcttccctccctccctgcgtgtctcctctgcaccggcccccgccgcggagccaggcggcagcaccgacgccgccgcagctcctgcccgcatcgcgctaacccgcgcccccggctcacacgtagccggagcgactgagccggcagccccgggcccacgctgcgcaccgtgtgcacggcggggctggctgagctgacctgcgctgggctccggcgccgcaggcggctggggagggcggcgtgggagaggacgctgagacgcaggggcggccgcgccgaggtgacaagctgcgcacctggaaagttacccggctgtctggtgaggttcgtgggccgggggtcttgggcgccggggtgtgagggcgcgcggggagggacggggtcggggtgcgcgcgtgtgcatgctgtgaatgcgttgcgcgatgtgcgcctctattccacacccagccggtctcttgcttgtgctgttcgagtgtggacgtgtgtacgcgttgcattcgctcggtgtggcagcgtttcgt

SEQ ID NO: 5617 - DNA, 863 bp, Homo sapiens
cgacccctaacgttgtaacctgtgaccgtgattaaatttcagcgatgcgagggcaaagcgctctcggcggtgcggtgtgagccacctcccggcgctgcctgtctcctccagcagctccccaagggataggctctgcccttggtggtcgaccctcaggccctcggctctcccagggcgactctgacgaggggtagggggtggtccccgggaggacccagaggaaaggcggggacaagaagggaggggaaggggaaagaggaagaggcatcatccctagcccaaccgctcccgatctccacaagagtgctcgtgaccctaaacttaacgtgaggcgcaaaagcgcccccactttcccgccttgcgcggccaggcaggcggctggagttgatggctcaccccgcgccccctgccccatccccatccgagatagggacgaggagcacgctgcagggaaagcagcgagcgccgggagaggggcgggcagaagcgctgacaaatcagcggtgggggcggagagccgaggagaaggagaaggaggaggactaggaggaggaggacggcgacgaccagaaggggcccaagagagggggcgagcgaccgagcgccgcgacgcggaagtgaggtgcgtgcgggctgcagcgcagaccccggcccggcccctccgagagcgtcctgggcgctccctcacgccttgccttcaagccttctgcctttccaccctcgtgagcggagaactgggagtggccattcgacgacaggttagcgggtttgcctcccactcccccagcctcgcgtcgccggctcacagcggcctcctctggggacagtcccccccgggtgccgcctccgcccttcctgtgcgc

SEQ ID NO: 5618 - DNA, 1288 bp, Homo sapiens
cgcctcttgcgcagccgaccccgcttcggccccggcccaggccagagaggtggccctcggagatgctgaagttactccgcgcagggggaggggtcgccaggctcctctccaatcacggtggccgctccagctatttgcatacattatgctaataacagacctcctgccccgctcccacccaagcttcccgcctcccttgggggttccccgggccggcccgcgggctgggccaaggtgaatacattatgataataaggcgggctcctgctttgccttcggaaggggggcgcgcagcagcgggagcggcaggccggacgccgggcgccgggagggggtcgggggagggacgtcgtgctcggagcgcgcgcgcactcacacactcacacacacactcacgcgagcatcgcgaagggtatttaaggatcgcgcacgcggggctgcggagatccttcgggcagccgcgacttcggcttcgcgagtagcattggttccttgggtttatttcgttttcctctctcttctccaccttagtcgcccctttcgcgctgcgctgtagcgtgctctcacagcctttttgccttgaactgaatgcaggtgggaaacaggtcggcgtgccgaaagacaccgagtaggtagaaataaggcaaactcacagaggcgcaacaggtccggtcctccgtggccagggcgagccgcggccccgcgtggcgcctcggccgttgccctcggaccctgagcggccactgttggggccctcgaaagaggtgtcggtcctctgggagtcggaagagctgtctgggtgggtttcgtcttgctttttaccccaccgccacccagtccccggacggagggtgcttttcacttccagctgggaggagagaagaaagcggggatggtgcacgcctgcgggtctggacgctgagcaaggcaggggtccgtatccgctcgtgggcttgactccaccaactagttgtgcagccacagggactgaactttggaggaatcgacctttttctttccttttaggattatttgaggtgtagagggtgggaagcgaagccgagacggccgaccccgccacgatgctgctgaagaagcacgcagggaaaggagggggccgggagcccagatccgaggacccgacccctgccgaacagcattgtgcccggaccatgcccccgtgtgccgtcctggcggccctcctgtcagtggtggccgtggtgtcttgcctgtacctgggtgtgaaaaccaacgacctccaggcgaggatcgccgctctcgaatccgc

SEQ ID NO: 5619 - DNA, 1275 bp, Homo sapiens
cgcttactccgctctgcctgctcgctcccactgtccccaagcccgccccgcccgcggcaagtgcgtgcccaggcgcagccaccggcgagatcaggagcgcagcgcccgcagcctgagggaaccggcgcagggcagcagcggctgcagctggattcgcgcgccccagcgctcagtggcggcggccgggacaccctgggcagcaccccgcaccgcagcaccccagactacgagcaatcgtgcccgtccccgccggggctggagggcgcagggccgccaccctgcaagttcgtgggcccccggccacccttatgagagaaggcgaagccgggcgaaggagcaggacgctcggcagcaggactcctccgcaagccccgcgggccctctgttcccgcgccccccgggcgcccaagaagcaaaatgcaaccaccgcgctacagctgagaggggaaggggccagcgccatccgctcgcccggaatccggtccccgcggcggctgcgcgtcccggccgcggcccctccggcccgggagtgagcagcagcaggaggagaggcagcggcccggggttggccggggctggggaggagggacgggacggagggagggcgcgggggcggggagggggccccggcggataaagatggcaatgtctctcatccaagcgtgctgcagtctggctctctcaacatggctgctttccttttgtttcgtgcatctgctctgcctggactttaccgtggccgagaaggaggaatggtacaccgccttcgtgaacatcacctacgccgagcccgcgccggaccccggggccggggcggcgggcggcggcggcgcggagctgcacacggagaagacggagtgcgggcgctacggagagcactcgcccaagcaggacgcccgcggggaggtggtcatggccagctcggcccacgaccgcctggcctgcgaccccaacaccaagttcgccgccccgacccgcggcaagaactggatagccctcatccccaagggcaactgcacgtacagggataagatccggaacgcgttcctgcagaacgcctcagccgtggtcatcttcaacgtgggctccaacaccaacgagaccatcaccatgccccacgcgggtgagtggcccagcgggcgcgggggaggggagccggcggggacggaggtgcctagagggatccagcgcctgcctccaggctccttctgggaagtccgtgcggcgcggaagacgtgtctgggttccctggaccgattaagttttgctccgcgt

SEQ ID NO: 5620 - DNA, 1071 bp, Homo sapiens
cggcgctgagtcctgcccagcgcgacccggaccgacggacgcgcagagaccctgccgggacccgccctccagccggcgcccggggagccgccggccggctctacctcccgcccgggagccgggcagggcgagaaggcagcgcgagtggcggtggcgacccccgccggggttcctgcgacgagcggtgaccagcagcgcccgcagccgcggtcccgctctccactcggacgtggccaagcggcggcggccacgacgtccggcttcccgggatcgtccggctgcgccctgggcgcatctgcgcgcctggccccgcgccccgcggagagggcgatgggtcccggtcaggactgagccccccttcccctctccccagtcccgcctggcaccccctcctctgccccgagggcgagccacggtctgcgccgccgccttcccctccggtgcccccggctcgccgtcctcccgcgccctccctccccggacccgttcccggggccaccatggccgcggccatcgctagcggcttgatccgccagaagcggcaggcgcgggagcagcactgggaccggccgtctgccagcaggaggcggagcagccccagcaagaaccgcgggctctgcaacggcaacctggtggatatcttctccaaagtgcgcatcttcggcctcaagaagcgcaggttgcggcgccaaggtctgtgggggtcatggtcgggagatgcgccccgggtcgccccctccccgcctaaacggagcttctccaggctccttccctccctcggttttcccggcccaccccggccccggcctcccttctgagcactctgggtgccgtcgcggggaccctggagtccgctgtcgggcaacctgtagccgccgagaagtgcagccgccagagatggcaagttggctgctcctcgccggcggctcctgccctccgcgtccctgcaggctgggctctgggaaacctgttccccctgagtctcggcttcccgggaggatagggactggcactggctctggaacgcggggcaccccttcctgccacacccggggtcgagccaccgctcgc

SEQ ID NO: 5621 - DNA, 694 bp, Homo sapiens
cgccagggttgtcggacagctcgatgaccaggagctcccggccctcgaagctgcgccccaccgtgtaaatcctgctgatggcggtgcactgcagccacacggacacgagcgcctcgcgcagctcggggtagcggtggtactcgaaggagatgccgtcctcttgctgcagccgccggcgccgcctcatgcccgccgcgggcgccccgggctcctgggcttcggcgcccaggagccacccgcaggcagccagtgccccgcacagagccagcagcgcgctgccccctcgcccggccatcgctgcgctccgccgccgccggccgtgccttcctacgcgggcggcctcttttgtctgcccggccctgggcttagcccgccggcgctgctgggggcggcaagttccgcaccagcctctactcgcctcaccttccccggctgaatgagtgtcagcccgcgcactggggccacccagaggagacgggcaaagccgcggctccacgggctgcactactggccgcggagcccaggggagctgcaggagaaaccactgcgaggagggggccggcggagagacgggccggcgtggatctgggagggctgctggcgttatttgctggctcggaaccacgtcaacagccaaatggcgtccgggacgacgcaggtgaaatgacagctaaggtccggggttcgggaacgt

SEQ ID NO: 5622 - DNA, 694 bp, Homo sapiens; identical to SEQ ID NO: 5621

SEQ ID NO: 5623 - DNA, 1424 bp, Homo sapiens
cgagagctcgaggcgccgcccctgccgccccgggattggcgtgaggagcctctgacgacatatattaacccgagcggccctaaagatgtagctgtacatggagatcttgctgggaaaatccgcttgctcccctcacgtcgtccagcccaggagaaccaccgccgtcaccccggagcttcctcggccaccgcgcagagccctccgagagcccgagccgcggtcttcgagctccaaggctcattcagggccccagatccttgccccgaaaggagaggatctgagaaaatggatgcactgagacctctctgaaaaccctccgagagagcgcgagaggagcgaggacacgttactcgcagctaaaatcacatttaaggaccaaaacaacaacaaccaaaaatttcattaaaacaataagcgcccaagaacccagatcgggctggtggggggaggggaagaggcgggaaggggagggtcgcacggaggtagctttgcagtgagcagtcgaccccgccgccccccggcacagctggaccggctcctccagccgcggctcagactcgcccctggattccgggttagcttcggtgccaggaccgcggcccgggcttggattcccgagactccgcgtaccagcctcgcgggagccccggcacctttgtatgagcacgagaggattctgcctccgcgcagcagcccgggaagcaggagccgaagcgcgggccgtggagcaaggcgggaaccggaggcggcggcggcggcggccaggggcgcacggtgccaggaccagctcgccgcgccccatggggagccggcggccgcagcgctgctgaggcgggcccggctggccaggcggggggacggggcccgggctgcagcagccccctctgcggctgccgggcgggcccgggcgcccgggggctggggggtggggggtgggggaggacgccgagcgctgaggcaggggcccgggccgagggcgcggcggggctgcgcgcacgctggggcgcgtggaggggcgcggagggcgaaatgagtctggtaggtggttttccccaccacccggtggtgcaccacgagggctacccgtttgccgccgccgccgccgcagctgccgccgccgccgccagccgctgcagccatgaggagaacccctacttccatggctggctcatcggccaccccgagatgtcgccccccgactacagcatggccctgtcctacagccccgagtatgccagcggcgccgccggcctggaccactcccattacgggggggtgccgccgggcgccgggcccccgggcctgggggggccgcgcccggtgaagcgccgaggcaccgccaaccgcaaggagcggcgcaggactcagagcatcaacagcgccttcgccgaactgcgcgagtgcatccccaacgtacccgccga

SEQ ID NO: 5624 - DNA, 1215 bp, Homo sapiens
cgtgcgggagggaggacaagaactcgggagtggccgaggataaagcgggggctccctccaccccacggtgcccagtttctccccgctgcacgtggtccagggtggtcgcatcacctctaaagccggtcccgccaaccgccagccccgggactgaacttgcccctccggccgcccgctccccgcaggggacaggggcggggagggagagatccagaggggggccgggggaggtggggccgccggggaggaggcgagggaaacggggagctccagggagacggcttccgagggagagtgagaggggagggcagcccgggctcggcacgctccctccctcggccgctttctctcacataagcgcaggcagagggcgcgtcagtcatgccctgcccctgcgcccgccgccgccgccgccgccgctcagcccggcgcgctctggaggatcctgcgccgcggcgctcccgggccccgccgccgccagccgccccgccgccctcctcccgcccccggcaccgccgccagcgcccccgccgcagcgcccgcggcccggctcctctcacttcggggaaggggagggaggagggggacgagggctctggcgggtttggaggggctgaacatcgcggggtgttctggtgtcccccgccccgcctctccaaaaagctacaccgacgcggaccgcggcggcgtcctccctcgccctcgcttcacctcgcgggctccgaatgcggggagctcggatgtccggtttcctgtgaggcttttacctgacacccgccgcctttccccggcactggctgggagggcgccctgcaaagttgggaacgcggagccccggacccgctcccgccgcctccggctcgcccagggggggtcgccgggaggagcccgggggagagggaccaggaggggcccgcggcctcgcaggggcgcccgcgcccccacccctgcccccgccagcggaccggtcccccacccccggtccttccaccatgcacttgctgggcttcttctctgtggcgtgttctctgctcgccgctgcgctgctcccgggtcctcgcgaggcgcccgccgccgccgccgccttcgagtccggactcgacctctcggacgcggagcccgacgcgggcgaggccacggtaggtctgcgttagggtttgcggagaacccgagagtttgcgttagggtctgcggcggacccgagaacctgcgcgg

SEQ ID NO: 5625 - DNA, 1184 bp, Homo sapiens
cgaatgttgcctccgcaccgattcaaacccgcgccgagcctcctcccattccgacaccacaagggagaagagcggagccgccgccgccgccgccgccaccaccgccaccgccaccgccgcggtccccggagcgagcgagcgaccctgccgcgcggggagcctcaccgggagccgcgctccgccagcccgccccaggccgccgccgccgccgccgctcacccaccttgccgcggcgcgccctcgctgtggccgtgaggaaccgagcccagcgctgccaagttgcctgggtctggagcgtatcgtgttacagcgcctggctccgggctcgggctgcgcgcggcggccagacatgataggctgaggctcctctgtttacacccggccgccgagggggcggtgcgccgcttaaccccttcgcgccgggccgccaccgccgcctcccgccagccccgcgcccagcgccccggctcggccgccgcctcaccccctcgcctcaccccctcgccccgctccacacacgcgggccggggcctgtgagcagccgtgcccccagcgaagacgggggaactgcactgagaacccgctcccggcaccctccgaagaccccgcggggcggcatcctcccctccacacacgcacgctcgcgagccgccccgggcagcggccgtgttcctcggcggggcttcgccggcggcttttgatcccgcctcagagctgttctccggcagcgctactttcccgtgctcacaaaagcatctctctcccaacccatgaacggatcccgacccctgctctgccaccattcatgcgtcccgcatccgaggtgtcgccttcacccacacgccccacggccccgcgaaactcggccctccagctcgcgggacgcgctgcctgccaggcgggcccggcggtacctcgggggcgggaggggtcggtcgcagggcccccagcctggcgcccgcggggcgtccgcagcgaaggggtgggtgtcgctcgtgaacgcagcagggaccagctcagcccgcgctcgcccctgggcctcggccaccgcctctccgccactttctcggcccctgcgtggaccggcccgtggcgggggctgctctgcgccctcgtccccgcagcagtcgcggacccccattaacgttgacgagtcagtgtcgcgacccggggagagaagacgg

SEQ ID NO: 5626 - DNA, 5820 bp, Homo sapiens
cggagggaaaccgggccgacgacaagggtggctatttccgggctcttcgcgcccggcccaagcgtccctgggtggggcagcccaaacggggagaggggccccgtgggccgagggcccgaggccgcagcgagcttagcgtttggccaaatctggctcgcgcgccttcccactgtcctgttagggctgtgtgacctcccggagccctacgtccccgcccaaacagctcccagcgcccctgctggcacccggggcgccctcaccccagctcctgcacccggcgcgccgcgcgcagaccggacggaggggaaagttggcaagagcgcggcgcccgcgggagaaagcgttaatgggcggccgggtgggagcagcgcgctcgctcgcccacgtcacgccggtgcgggctcggctgacgaccgcggcgcctggggacgccggcgcgctccgctcgccaggtgctccgcctggaaatgtctccattagttgtcgccggctccccgctggagcgcgcgcgccgagcttccgcgcggagccctcgcgggctgccgggagcggcccagcgccaccgcaggtaggtgaggtcccccgctcccgcccccgccccggggttccgagacccctccccccttccgaggaggcggaggctccgcgcggccgccgaggggagcgggcggcggcggctgcggcgactccccggtgcgtcccgggctgcgagctgctccccgcggccccggcagccacacggcgcgggcgggagcttccccagctcaggtagggagtgggctccgccgcacaaactttgcgaggattgctcttgcgcttaaggggacaaagtttgctacccgtcgctaggctctccagaggccgctgcgtttgctgcaagttgcgggaagcagggtgcgcgggccggcgcggggcggggggtggggggctcggagtggccaggcctgagtcctggacgcccggacggcgctccgtccagcctcaggccgtacccagggagcaagcggcgggggcgcagcgggagagaggagggagagggccgcgggcccccatggagggcggttgggaatccagagattcaccgcttgtccctgtggctccttctcctaccactggctccgagggggcctcggggctgtgaggaaatgacctgccaacctcgaggttcgccagtgcggcgtcagcgaccgtgaggcctctcaaacccacaccccagccgggtgtcccgagcggtgggcgggcacaggcgcccccaaggtctctggccccaggtctcagaaagaaaggcccttgcctggtgccccgggctcccggcttcgcctttggctggagttaacttctctgggctggaaggagctccctccggacgagctcttggtgcggggaactggtggcccccagggtaactcctgaagcaccagggctaggctggccgaagaagggtcagggcccggcctgtctccccggaggccttccatggttccgacggccaacggtaaccccgtcaaaataggcgacccgcctgcgcttcgcgttaggggctgaccatcccctgcctcccctgcggcctgctccggccctggtcctccgctcttcggagcgctccaggccagcgggagcacctcatctccccgaagctgagccggtgctgtgtactccgggagccggctgacttctggcccacctgctcacgggtgtatttagtaccgggggtccctagagggaggaaggctcagcactccgagtctatgcagacgcgttcagctgatacctgagatgctgagcgtcctatcgttggtgaaagggacactgggtgcctccgctccaggcttggccttttggtgaaggcacttggaaaatattccagtattatctatgggagaagggtggcccagtgagaatccccggtttgggcaggcgggcctaggccaggctacagggtttcagtgagatgtcccggtggtcgccaatccacaggctggattgaccctgtgtcctggaatgagtagtggggcctgggtgaggccgggcgggtcaggaggcctcctgggcagttgcgagcttcccgaggcagggtgactgtgactgggcccggaccccaggcgctggggcctgctggcgggcaggaagtggagcgtgtgtgtgcggcggcctgggaaagccgattcagaggccaggtttctgggtcacggagaaagggtcgcccgctggtggggactggagcgtcgatttatgcacacaggctggaaaggcaaaagagaacaggagaaggtggcggtggtggtcaaaggaagcccccgaaagggcccccacgtactggctgccctgggaagtggaggctgcttctcccagactctgctcagaagatgaatggccgcctgttctggggcttcggctccagttaagccccgccgggtctggaaggaaggaaatgcaccagcctcaggtctgggtgggctgagctgttgcactagagcccagaggtgcagggcataggtggctgggcccctgggccctggctctccccctcagccggcggagtgctcacagtcgccgaggccaggtccccgagtataggtgaggaaaggacaagccacagctgaatgcctcccctctgggggtctctactccccatcccagcccttggcccggctgggctcacacccctccttcagccgggcctcattacctggagagagcgagtagtttgtaaacaataaataatgggaagtagaaggatgctcgggaaaaaccagaaaactgcaaggagtggggaggagggagggtgggagaggggaggaaggagggtgggggaggggaggagcaggaggagagggaaaggggttgagagattcatttctagcgagaaaccccggtggctagtttcttattatttacaggaaggtgatattagcgattcaggtgagaaagaaagaaacgcggcctgccgcgaaatcaatacagaattcagaaacaattattaatgtcatttgactcgtgttctttatatatttctcgcggctaccgacgctaaactgtctgaataatttgcatggagcggctattcattatttccgatggtttccctctgcaagcagctcggacgtggcccgctccggtccaacgcgatcggagaactcgtattttcatctgtaaattaaagcaattacgcagcagatattatatgatgtgtactgtggtctccagatagtcatcaatcaccttcaaccgagctgtcaaaagagcaggcagatttcgtttctgggaggcaggcttgcagctggggagagggcgaggacgtcatcattaattagagggtgaccctggggcgattcacaggtctgaacccaggaatctttctgagcaagtctgcacaacgctgccttgcacggcttccttcccaacttaccacgggaggccggcccagggggcgagggcaaccggggcgagtcccggtcccggagggcgatggcgcagaaggcggggaacgggttcgggatggcccgggcgcccccttgccgcccccttgccgcctgctcactggcctccgctttgaacttgggcaaggtcccagggagggtactggccgagggagtcctggggtgggcgctcggtcccctcttccgattgctccgtgcgccccagacagaaagctgggcaaaatggacaggggagggcgcctccgccaggcacccaacgccccctccctcgcagccagccctgcggggcgccgggagggacgagcttagcgggaggggccggggcctgggttgaggaacctgctcttccgagcgcgcagggccgcccggcagtccccggcttagccgcgaggggcagggggaagccggcggagcacggccggcggaaaggggatcggggaggaaagtcggggaggcgaggtgggggcggtgggctgagcgggaacttaaaagaccgcggtggagaagatggggcgttctccgcgacactcggctgcccagaggtgcaaagccggtgggcgcacgcccggggcggccctacagccctcgggccgccagtctcagggtgtcgggctccaactaaggccccgaagcccccacgcacctgagggcattttgaccagctcttgcgggctgtcttgcggccgcagtgggttctgaaagtccattccggcgtagggtggaaaccggcgggaggcgttgctgattctcgattaaacaatagtgacgagacgcgtgcggggcgcctgcgagccccttcctgccactcggagcagagcgcgccagcgcgaggccgggccggccgcctgcgcagcgccgggctaattttaactgttgattacatcttcagcgtgtcctttcataggtctcatttgtaattgagacgaatgattacagtggggcgggaaggagcagctgctcattaattaatttctaattaaaagtgcctctcgttctcgggtgactaaagagaaacaccgttcgctgggcgatattgactcggatggaatttatttgctaacgcccggaggaatggcccctccgtccaccgcgcggccgggactgtcctggcccctcccggcctgagccgccggcgagtgaccggcgagtctgcggccaggccgggctgcgcgaggtggggctgacgtcagagcctcctccgcttcaagccgcgcacatctgacttgacgggttcgcgcgactcgtttttttttttttctttttcgtaaaatatgtatttctgtcgccgctgcgaggccgctcggtcccagagccccctcgagcctccggaatgcgaagttaaaggaatcgcggcggccaccgctgctcactttgttacccggttagaaaagtttgcggagcgcggggatggactaaccggctctcctgcttcgccctcccagcgcctagaagcctgcagctccggagcagtggccgcgccacgccggccccagcgcgcagaaccctgcaggccccgcccgtccgccccgggccgcgcccgccatgtcctacccgcagtttggatacccctactcctcggctccccaggtaagcggagccccgccccgcccaggccaccgcaggtgccggtagggcggatggggcggggacggggggtggggagtgtccgacctacgactgcctgcggcttccgagctagcaaggcctgggtcgcgcgcccctcacgcccaacccctgctccccaaacccccggggaaaggccgaggcgctaagaaaatccgacgggccgggcccgggttccctgatgtttgaaccacaaggctcaggctgtgccccaggggagtcctaggaccccaaggaacccctggggaaggaggcttggcgcgcaaatggcgtcagaggccttggaaaccctccggggaagggtgtaggtgctcggctgggccccacgtggcggaggaggccagacgcgcacaagctagtggaaaggggcgagcatcctggtgtggacggcgggaggcccgggggtactcggggcacgccctcgtgggcggcgcgcgggattggcaaggcccagggccccagcctccagcccggcttcccgccagtcctcgcggcctctctctgcagttcttgatggccaccaactccctgagcacgtgctgcgagtccggaggccgcacgctggcggactccgggcccgccgcctcggcccaggcgccggtctactgcccggtctacgagagccggctgctggccaccgcgcgccacgagctcaactcggccgcggcgctgggcgtctatgggggtccctatggcggatcgcagggctatggcaactacgtgacctacggctcggaggcgtccgccttctactcgc

SEQ ID NO: 5627 - DNA, 1233 bp, Homo sapiens
cgccggctgcgcagcccagcacaggccacaggccggggggtgggcccgggccctgcggagtgggcgggtctgagcgggttggaacgtcccgccggcttcaccgcaggccggcatctcagcctcaggccccacagcgggtctcccgtctccaccctcgcgggctctgcagggctggggctgctcctgagtttctggtaaggccttcgggagtcccagctctgcggagaccaaagcccccacatcctcggcagagcccgggcgagtgccccgcgggtggcggcggctgtggggccgtctgggattctccgcagcactgaccctgcaacctcctgtgtctgcgcttcgtggtgaggggcggcgggatgcgcgcgatccctttttgactcagccaaacggaaaagctcgcgcgtcccggctggaaggtggaggtcaggcaggacccggcaaaggcacattccaaacgaagcagaccccattcctcacctgcagagggaaggcggtgtggacggacagaaacggccctcacagccacagaaccaccgcggccacagcagcgcggcgtccggcagggagcggaccgtggtggaggcctctgagccgagcaggccacgcagacccgggaggcgctgaagcgggcgcagctgcgccctggagcaggcagaccaggccacggcggagggagaggcccggggacgcggcgcagcccctgcggagaggcacgggggcggcggggacgccctcccactggctgaaatgccagggaccggcctgggcgtggagcagccggggcgagcccgcctccaggcaccgccggctgccctaggcagggcctgcaggagtggcccggagccgggcaccgaggcaccgaggcggggacctggaggggtaggggtcggggcagggcctgccaatcaagtctacgggggtcgccgggtggtggaggtgggatgggggaaggaggctgagcaccagcctcgggcgatccaagattcctccggcctaatcccaggagggaggcagcgttggcgggtgaagccgtcaccctcccccgggaggccgcccagcagctgcccctccacgctccggggccactgcgccgggccttggtcaccacctgggccctggcccacgctcagacgaggggcagcgcgacttccccgtagccccaccccagcggctgtcgccgcagagcatgaagaggcctggctcctgcagaaacgcagcccagcgcga

SEQ ID NO: 5628 - DNA, 2865 bp, Homo sapiens
cgcctcctgccctacccgggtggatgcccgcggctctggggctctccctatgccctgactctggggagccccggctggcattggctcgcgaaggtgacctgcggacagaccagtcagagatcacgttggctggtcgcggcgcgggccacaaagctcagcggaggtggggtaggggaccaagctgtcccggcgagggaagaaactgttgcttccaaatcattgcggctggaggagccgatctgcgccccagcgtgttaggacaagggcggcgcgaggggcccaggggccaaatggggcgctgggcaggaggggctgtctcctgcaggggaggaggaatggtcccctgccagggacctggggaaaggtaatagtcaggaggggaccgggccgcaagaagcccatcctggattgcagcacgggcagccagcgcgaattcagtcaggaggtccacggggaccggtaaacgagaaggggatgcggtgaggacgccggactggcgtttctgccgcgctgacacctcgactgctccctccccgcaccgcgtcccccagcctgagacggggaagccacccagggcaccgcgctcccaaacagcggggaaaaggcgctctgggcggcggctgagtgaccgagggaccggtccggagccaggagctgggaggcgcggggatgtggtggggaggaggggagtgggggcagtgagggggctcaaatcctgcggggacgcccgcttaccctgccgttgcggtcagtctcctgcgcctcctcgacgctcaccccgcgccgcaccagcgtccgcagcagccccacgttgttggcgcaggcggcgcgcaggagggtcgccgtctccgggacgctttccgggacgccctccgggacgctctccgcgctctcgacgccgtgctcctcctcgtcctcgaaagggtagaaagagtcgtccgaggcgatgctgcgggtgtctggcagactcgagaagtcctcaaactcttcgtagtcagcggggtcctcctcgacctgcgcgccccggggtggggacggcggtggtggggtcatgcagcgcgccccgccgccctccggcccggtcccggccagcagcaccatgccggcggccggggcgcgggccgggggccggggcgcgggcaggaagagcgggacgcggggcgcgcgccgaggtccccgcttctcgcttctgcgtccccagagaagccgtggcccgcgcgctccagctcggcggaaaccggcaccaggcggctgcgctcaaagaaaaaagtctccggaggctgagcgagcccctggggtgggcgggaccgcgggggctttccgaggcggggcggggcggggcgcggggacacgccttcccccggggccttcccctcgcgccccttcctggccagagttcagagccaggcaggcgctctctcgagcgcggggactgggcacctggcagcgttgccccagagctggggacagctggcgcgggagaagcagaagcaatcactaaagaagccgaacccgagtcgcgggcggcaagcggccccgcccctccctccgccggcccgcgggatgggggcggaggtggcggcggggggacgccggggcggagccggcctccagcttcgggaacctcggacccctggagccggcctccgccgagggcgtcgggcccccggacctgggtggggccggtttctcccgccgcttcagaggagcagagcgggttttctcccttcgggggatcccgggcttcggggctgactccacccggccgcggccgcttggaggccggggaatccccggggcgcttggcgggcagaggagccgggcgcgggagcggagccgtccacctgggacctgtgcccggggagcgctgcgggccgggccactctgaactgggggcggtcggctgctgtgggggagtcccagcccggaagggaggacaatcctcagagtcccccgtctcgcggaaccggggccggccgtggcttgagggttggtcagatcctgggatggggggcggggtgttccggaacctcagggagcatctgagtgggaacggacgacgaggaactccccgtccccatgcctggcctgtgtcacgtgcggggatctgcggactcacccccggaggctgcgactgggcgctgaccccacgtctggctgcccaaaagagcagggccgcgggcgacagccgcagtccaggcccacagcccctctggcccggccttgccctctccccgtcagtcctggcgccggggatgggcggggaggaggagggcgtgtgaggatttgccacagggagcccttgacttcggggtaggaggcgtcgtgagccaatcttgggggaaggtctctgcgcaaaggcgcggaggtgcgctcgcgcccgtcgcaggtcaaagactgcggaggccaccagccctgtgtccccctagcctccttccttcctttttttcccccgatcttgacagcgtgtccaccagctgccagccggtgggaggccctcgcggccccaaggtgaacacagctaggctggcgcagccgctggggaccaggcttgaggcccacgtgccgctgggcaagctgaggggcacgagggcaccgaatccgaaacagccgtgggaggtgtaggatgaggacacgtttaaactgcgaagccgctcgagccctcgtgtcacaccgcactggcccgacccgctgtcctggtcgcctggtcttccagtgtctccagcaggagccaaagggcctgctggcggcccccgacccggcatctgcagggccccggagggtggggcgcgcgggagcaccgatttctggtgaagacgccctcgcacctgggcggctctgagcgagcagcgaactgagactcgc

SEQ ID NO: 5629 - DNA, 1154 bp, Homo sapiens
cgtgcgttcccaaggatgctcggccctctcccaacccgcggcctcctcccctctctcccgcggctgccgctgctgccgcgaaaaccaggagaagtggaacgcgcgcggcgaagcgccgctctcgcggcggcactgggcatgctccgcacccggggccggtttcggcggcggggcggacgctccctcactagccgggcgcccgggccggccgccgaggtttaggtggaggctgaggctgccgcgcgccgcgggaggagcctcgccctcggcggctgaggcggcggcggcacaggtggcgcgggccgcgcgcggggcgcagctcgggagcgctcggcgccgggcgccgcggcggccccaggctcgcgcccgcggcgacagccggctgagcggagctgcgggcgcggcggctgctctctcagcccggccggctggcggcggcgcccggagccccgaggagcccgcaggagcccgtggagcccgcggagccgggcagggggcgctgcgctcgccgagctcggaggggccgccgggccgggcgctgcgcactcgcgtcgggagccgcctctcgcccgcggcgctcgcccctgccgcccgccagcatcccttgtcccgcggccgcgctcagacaacaaaagcggaagatgctgcagttgggcaaggtcaggaccttgccctgaagccgggcggcgccgcgcacgcctcttcccggactgaggagctgtcgccggcggagggtgcatgtttgcgaggaagccgccgggcgccgcgcctttgggtgagttgcggggctgggcggccggggccgggcgcagcctcctcccggcgccgtcctcctcctcttgccgctggtgggggtggtcctgggctcccggccggcaggcggcggcggcggctgctgcggggtttctgcctgcctcggggaggaccgcgatcgcgccaggtccccctcggaagccgctgtgcctggaagggggtccggggttagtgcctttcttggagcggttaccaagtggctgccctgcgtgctccccctccctgccacccatctccccgggaggaagcgtatttagggcaacaccgacaatgctgctccccgccaccctgagaacatactcggtgcattcatgacgtccctaatatacgggaggagacgg

SEQ ID NO: 5630 - DNA, 1154 bp, Homo sapiens; identical to SEQ ID NO: 5629

SEQ ID NO: 5631 - DNA, 396 bp, Homo sapiens
cggcggtctttcgccctccccccactctccccgcccccacccccatcccttggccgctcgaacccccgaccgggagcccagagccctgccagcgccgcactgtgcgccgcgcaagtcgctcgatctccccagcggtaccggctctaagcagtaaacatctgtgcgcttctgagccagggacgcgcgtggggggtgggcgtgcacgcgggtgggccagcgcagagtgggagcttgtgggtgctttccgtcgggatttccaactcagctgcctccgagagcctaagctgagcgccgcacgtgctcgtgccatctgctgtactggacgcagtctaatagcgcagagaggtttccatccggcatccagttcgatgtgggccgtttttcccttcccagcgg

SEQ ID NO: 5632 - DNA, 438 bp, Homo sapiens
cgaggagcaggggctgcgggccgggcttttgttgctcgcggtccccgggggccgcgccgcgccgggccacgtgggggctctcgccttccgagcgggcgtcggtgggaaacctgcgcggcgagagacagggggatggggcgcttttgacgcgactgtggggtgcgggtagtcctggaggaggatgtccggccaagctcaccctgcccaggtgccggatccccagcccaggctgcggcctgctctgggctcgtgaggcgaggccgcagcgccccgacgccgggtgggcgtgtgggtggagtggagacttgggtccctcggcgcatgggagtcccgccgcctgcggtagggaaccgcctcccacccctggcccggcccgggccgggagccgtgtcccgcgttgactcggtgtaactctccagctcatttctctccacgcga

SEQ ID NO: 5633 - DNA, 438 bp, Homo sapiens; identical to SEQ ID NO: 5632

SEQ ID NO: 5634 - DNA, 411 bp, Homo sapiens
cgcgctccggctctcggggagccgccttccagacctgtctacccgggagccccctccccgcgcacttcccagacttctcctgagacccgagagcgctggttttcccccactcgcgatagtcctgggatgacagtgcgggccccctcactcgcagctcccaccacctggcggccaggggttcgcggcccgggcgggcggcgccagtgccctctggagctgggcggggagggcggggcgggcggagcgggcatggtggggtgtcgggggccgcaggcgtagcgctctcgccctggccatggagcggccggcgcccggcgaggtggtcatgagccaagccatccagccggcgcacgccactgcgcgcggcgagctgagcgcggggcagctgctcaagtggatcgacaccaccgc

SEQ ID NO: 5635 - DNA, 1137 bp, Homo sapiens
cgcgcctgccaggctcagactcacacgcacgccgcctctgtttgtacacagtgcgctcccggcggcccgctcgctcccctccagctcacgcttcattgttctccaagtcagaagccccgcagccgccgcgcggagaacagcgacagccgagcgcccggtccgcctgtctgccggtgggtctgcctgcccgcgcagcagacccggggcggccgcgggagcccgcgccccgcccgccgcgcctctgccgggacccacccgcagcggagggctgagcccgccggcggctccccggagctcacccacctccgcgcgccggagcgcaggcaaaaggggaggaaaggctcctctctttagtcaccactctcgccctctccaagaatttgtttaacaaagcgctgaggaaagagaacgtcttcttgaattctttagtaggggcggagtctgctgctgccctgcgctgccacctcggctacactgccctccgcgacgacccctgaccagccggggtcacgtccgggagacgggatcatgaagcgctcggtagccgtctggctcttggtcgggctcagcctcggtgtcccccagttcggcaaaggtaaggcgtcgggacccggacagctgggtgagggatgggctgggagtcccctgagaaacgccgcgcagggggccggaggcggtccctccggcgtgccaagggtggcgagcgccgctggcggcgcggaggaggcgtcgagtcctgggtgccccgagaaagtgcttgtaaagtctgagcagagtgcgcggggccgagcggggagaagggtgcggggtaccggggtgagatacaggaaagaggaggacggtggggagcggtagaagacagcgtccccaggaccagcgactctgtggctcactcggccactgggtctcggcgcaaaccctccctaggcagtgcgggcgatgctgactgcagacgtcgggcagggctttcgtgcgggcgggagcgggggaagccagtgcgcccgggcgtcagctagttgatgcgggaagaggctggggagctgcagggccgtccgcccccgggtgcggtgctctggcgcagggcctgggctgagccgttcgcaaacccagacccggcgctgggcgttttggccgcgg

SEQ ID NO: 5636 - DNA, 2383 bp, Homo sapiens
cggactccccaggaccgcggcgccggctggctgcctcggccccccgcggccgcgtgagctccctcttggtggtggagggcgcatttcaatctggaaactcccagcccctaatttggtcccgcagactgacgccgctcccggtggggcggtgggggtaggagggcaaaggggaggtctcctccttcttggattgaggctgcaaccaacagccccgtgagcctctattcctggctgactgcgaatccccccatcccaggtcaggggccgggaccctacagaaagacccgttctcatcctcaaccttgcggcctctgtccggcggggaagttcagctgcgggtcagttcagctgcgggtccggccaagcctggcgcgcttaggcaccctagtccctggtccgcggccgggcgaggacggagggggaggggaaggggctgctgcctcctttcccaaatccggtccctaatcgccccatcccccgccgtctactcgctttgtacaggcagtcaaaacagagctagcggccaattgacggggacgggaagcaaagccgcctagcgcctcgccccctccagccggccccccgggcccctcctctcggcgcccggaccttggccctccctctcctttcccacttctctctttgccctaacttcgcccccatcccccgctcatttcctctcgcacccgggctcgccaatccctctttccaagtccctcttccagcccggccttcctctcgggttcgccccccttctccccaatctccgtcctcttccctcccttcgccctcccccccttccttcctcttcccctcacccaaccctggttcccctcgttcctcagtcccgatctctcccttactctgtccccgcccactctgcgccggcctctcagtccgggttgagccccacgtgtggacggccgcgcccccactgacagccgccgcccgccggcccgccccgcgccccgccgggcctctaaaacccccgcgccgcgccctccaccgccgcatcttctccagcgcccagcctcccgccctctctcttgctggccgcacgccccggccccgcgcacctccgcccggctccgcagccgctacccgcgcttcgttgccctgtgggactccgagcgagcccggagggaaccctcctcttcttctgggggcgacttttgtttgcttgcctgtttctttctggtgacttttgcagctttccaatatccgtcttcggagcgcacgggaatccgccgagctctgcgtgcaggcccttttttcttttgaggttcacattttttgaaattttacgccagggcttttgtaatttcctcccccgcccgctgacggtcctggagtcgctcggggctttaggccggttatgcaacgtgtaccgctcggggctgccggctgcacctccgccgcgcctcgccgctcactgcgctagacccggcgccccgcgtctcgcttcgcgggcagtcagggggccggcgctctgtcgaggtctccagctagagcagggagcccgagcccgagggagtccccggagccgacgaagggcttattagaccctgactcttttctgaggcgcgcagattttgtctttgatcactccctctccgcgggtctacggccgcgcgctttcggcgccggcgatggggagaagacggaggctgtgtctccagctctacttcctgtggctgggctgtgtggtgctctgggcgcagggcacggccggccagcctcagcctcctccgcccaagccgccccggccccagccgccgccgcaacaggttcggtccgctacagcaggctctgaaggcgggtttctagcgcccgagtatcgcgaggagggtgccgcagtggccagccgcgtccgccggcgaggacagcaggacgtgctccgagggtaagtgggcaagcggctccgcacctagggctccggcttgggggaggggggaatcctcagtttggcggctttctggcccactccgtcccagaccctttagctggagcctagagctgcagccccctttgccagaatatccaaagacccccaggagcgcgtcccccttttccttcccaaccccgcagctcagcgggcggaaagccctctctccgggggttgggcggcgggtggttagggggtccaggggtgccgatcgcagagcgtgtgcagagctcgcgctgcgggaacaggttctgaatgtccggcggcaggcgggcctgggtccgcctgctgcaggggccagagaagcctgcttgctccccacgtcggggccgccgctcgtgagccttttgtttgaggacgtgtgcagggttcacagctcaccttctcatcgtcaacccgagcgctccaccttgcgacgcgctttccttgacacgtcgg

SEQ ID NO: 5637 - DNA, 2367 bp, Homo sapiens
cgggccggcttcccgcttcggaggttggggagggggtcgtgggtctctgcgttcccaggccaagcggccctggaggcacggactagcaggacgccgaggtggcgcgggtcgcggcctctcccgcagcagctgtcggcgagaaccaggcagggaggcgccgctgctgactgcatctcatgaaagattcaggcccggctgccgcgctgccatctcccggcaccttgcgccggaaacggtcgctctggagcccgtggccgtcggcgggcaggcttagccgctccagtccctgagaaaggcaggccacagcccgacctgccctgtggtcccatcccataatcccaacagcaagcaggctcaggctgggcacttcggggtaccaggagtaggttcggccaactggtttccaccatgaggcttcgcgcacagggttatctggccacgaggcaacgctggggagccctgtggcctgagggtgggcaaaggacaggctcccagttcccttgcgtccagcccgtctcccagcggcagccagccaggaacggcctgcggggccacaggggtggaggcgtcaccgttcgcaggcccgcagcaggatggtcgctgggggatgtgcaggcataggggttggacaaggggccccagaagtgtctgtcctgaggggttggtgtgccctttcctcaccagcccagcccctgaggagagggaagaaggcaattcccccaaccagggcaggtcgggcggttgccccaccctaacaccccctacccccaaacacagaaaacctggggtctgtcctcaaacctccctggctgccacgctctgggcagcggactctccctgccaacacgcaagaccagctccctcccgcaggctgagcagaaagaagaaaggtccaatctcaaaaccccaaactcgaccaccagcccccgtctaaacggaagtagggccagcccctcacgagtcaggtgggaaactgggcccagggagagaaagtgccccagggccaggctgggacccgctctggcttcgtccgcatgcggcagggcccctccacggaggtcccagggcgcgctccccggcctcgaggcccggccgccagccgcgcggaccccagcctacgccccgagggaggccaggacccctagccggcgggactgcgcgccgcccctctccccgcaggtcccggcgaacacctagcttcccctccccccacccttcccgcctcccggccagtgtccccgccttccccgcgggcgacgggcggcggcggcgggaggagcgggccgagccgaggaagccccggcctcgcgcgctgggatgtagcgaaccagcaggggccgaagaaccgtgcagtgccagagccagagctggatccggggccccagccggagccgaaacctgagccagagtccgcggcgggcgagcccggagcccacgagccgcagacgcagcgctgcccaggtggggtaagagacgctgggctaggggcgcagggtctccgcggtggaggggcgcagggaggtggcggccgagtcctgcgcagtttgctcctggcgtgtgtgggtccacccggcggcgcgggacagcgcaaggcgcggaaggtcaggagccttcgaggcagcgcgaggagctcgttcctgcgcccagggcacagtcatagccgccgtcaccgggtgctacctcacccaaccggcgggatcaaccctctgctttggctccgggcacctcaagagggtagcagcctcgggggcacgggccacggccccgcgaagggcacaacctgagaagcccgtggcagcccctcgcagcgtcgggtgacacagggctcccccacccccaggagaagtgggcaggagagagggccgcccgctgctccccgctgcgtccagggatggagggccccaccacccatggaattgctggcccctctgcgtggcccgggacttcagccgtggcttcgcgtcaagagggtatttttcctaaacgaaaccgcttcgttcgttcgttcgttcgttcgttcgggcagcaatgccgcagaaaagcagcagacgtcggtccgcgccctggctctcttcgccccggaccccgacgtcccgccgcagcgctcggaggtgcccccagcccaaggcagcctgctctcgccggcacaggtcgggctttttcttcccaggagagaaaccccaattcccttcgtaacgtccaataaagacattcccgcggcttctcccaggtttggttgttgacgcagggtcccggagcacgcagtcgcttctcaagaaccgggtctcggatttctgaaattgaccagcttcgtaaattggagcctattctcccgcggcaaaggcagggccccaaagccgggatcgc

SEQ ID NO: 5638 - DNA, 1235 bp, Homo sapiens
cgaagtccagccgacccttgattgtcagcatcccggttacaaggtctaaggcgaatagttgccgcacgccggcgcggttgtggctgccgaaggagtaaataatttcaccgttggggccttcatccagatccgttgcaaggacttgtaccacgcgcgtgccggagggtgcatcctccaggacgcgcgcccggtacaaggactggttgaagacaggcgcattgtcattcgcgtccagcaccttgatgtgaataggcaggctggcggagagagctggggtccctccgtccaacgccgtcagcactaactggagactaggctcccgttctcggtccagggcgcgctccaacaccagctccgcgtacttggtgctgtcctcccgcgtctgcacgcgaagcgcaaagtattcatttcggctcagctcataggtttgtaaagagttgcttcccacatcgggatcgtgcgcgctctcgagcggaaagcgcgtccccggagccacggcctcgctaatctccaatttcatttcctgggtagggaaagcaggattgttgtcgttgatgtcctggatcaccacttccacgctgaacagctccagcgggttctccactaccaactccagagttacagtgcaagagggcagtgtcccacacagctcctctcgatccagacggtcgttcacaaacatctctccggtctcccggttcacctcaaagaatcttcggctagctccagacaccacccggaacctgcgggctgagaggctaccgagatccaaaccaaggttcgcgaccacgttgcccacagcgaaacccttctctctttcctccgggatctcatagtgaatgaccgtggaagccttgttcaaggcaccaagcagaagcaaaactcccactaccctcccggtgcttaccagtccgctcctccaggcctctgggaccatctcactcaaaagcagttcctctcagcggggtccagatcgtccctgagatttcgctgagaaactttcagcgggttagcgcttgggcgctgggcgccgagtccgacatggctttctggatgccgttgatttgctcgccggctgttcagtctctgcctcatcccggggcgcagaaaggggacgggcaggggcccgatctccagcgtcttcattggccgacagcggcacacagagtcccagccaataactgcacgaagaatgagctagcgccgggctctctgagcaggacacgcgctagcgc

SEQ ID NO: 5639 - DNA, 3043 bp, Homo sapiens
cgactcaggagagctcgacacgccggatagctgcggccagccgtggccatcctggccccccgcctccgccttccccactcccgcgtgcagccgggacacgggaaaggaaagctttggaagtcaagcgccggccaaaagatgacctgcccgcgtgtctcctcgccccctcccccagccgtgtcacatggcggccccaaccaggcgggcagtgcgccccgccgcggagacccagggccgcgtcgcctgggcagtgggtgatgaaacttcccaggcgcattaccgcagagggcgcgggcggggcgcggggcgggggtgggggatcgagagctggtaccggggctcacctgttctccaggaggagggtggggacggggggaggggcgagtgcgcgccaacgccgggtgcgtgccctggggcgcttgggcgcggcgctcgtgtccccgccctcccccagccctgcgagccccccgagctgcgccgtggggtgacgggaccgagagcagttcctgtccccggccccggcgcgggggagacgtgagcgtgcacacgtacacacacagcaggggaagaggcgctccaagcggcgcccaactttctccttccctccacgggccgggtgagaaagtagccgggggctatcccgacccggcggttcttggggagggggccgaacaagaaaagggaggagatggagataacttccccggatttagcttttttgtctttgtttttgttctcaccacttccatcggatgactggagagtaaaagggaacccggagcggggtggcgagcagcgctttgagaaaatgcaggagtgtgtttggagacgcgtaaagttgcctttcaagctctggcctccgggcacgcgatgctccgcggcgggctgactcagggctgccttgggcctccctgccaccctcctggaaatgatgcaagtcctgactgtcacctggatccctgcagcccagcctggaatgcgtctggattaggggaaagacgagaaacgacactccaggtgttgcacggcccaccaaagcgggaagatagggcagttgctcagaccaaatactgtatctagtgcttctgctcctatcttcaatcgtggggttctttttaatgcaaagtgtcacaaggccaggaattcccatgtgtgctcagttggcccacagcatcattgtgcctaggaaactgcttcaatttatcaagtcctctgggctgggaatctcactgaattccaaacggcggaaagaggaaactttcccaacccgatgtgggtgtgacgcgagccaggggccccagggacactgtcccagagcacaccgtccccctttaacagcaactggagcttggattcgctcttatattgtacagtcctttcgaccattgccctggagcacccgcacacgcgcacgcatctccggccgcgctcacacacactcatacacacgcacgcaaacgcgtggccgccgccaggtcggcaactttgtccggcgctcccagcggcgctcggcttcctcctgtagtagttgagcgcaggccccgcctcccggccgtgttgtcaaaagggccggggtctcggattggtccagccgccgggacaacacctgctcgactccttcattcaagtgacaccagagcttccagggatatttgaggcaccatccctgccattgccgggcactcgcggcgctgctaacggcctggtcacatgctctccggagagctacgggagggcgctgggtaacctctatccgagccgcggccgcgaggaggagggaaaaggcgagcaaaaaggaagagtgggaggaggaggggaagcggcgaaggaggaagaggaggaggaggaagaggggagcacaaaggatccaggtctcccgacgggaggttaataccaagaaccatgtgtgccgagcggctgggccagttcatgaccctggctttggtgttggccacctttgacccggcgcgggggaccgacgccaccaacccacccgagggtccccaagacaggagctcccagcagaaaggccgcctgtccctgcagaatacaggtaagtgcatgtgcccccgcagccgggagctactgggagaggacaccgtgcacccacgcggcgcgccccaggcgtttcgccgggagccaggcgcccacccagggccacgcaaactcttgggatggcacgggacgtgcaaagggaagcgcgaggcaaggcgaggtccgcgccgggctccgagggcccggaatctgcacgtgctagcagggtgatgaaatggctggggcaggacttgttgctgtcctccccagggtcgaggggaaatgaagcagcgtctgacgctgccagcgccagcccccgcccccgaatcccgggtccggtgcaaagcgcgcttcatcccggccggcacgcgggaggcccagagggtccccggagctgggctgcgccctgcgcccggagaacttctcttcctggcctgccggcctcagtaagggtgccgcgtcttccccctcctcaaaagatgcccgacatcccagaactttgccggcgagacaaatggcattgcgaactttccccctgggggcactgctttcggaagggagcgtgagggcagcgcaaagcgtacctccgcggtgctgccgccatccccagctcctggccaggtcagcaagccaagaaatggtgacacgacccgaaccgtgcgcctcctctgctctaccggctcttggctcaccggcaagctgcaaagcagagccaggcgtgcagggcacggggctggcccttttcccagctcggaaagagaaagaaaatctgcctacagctccttcgctccacgacccctcccccgactttggggggccgtgtgaacgcggcagcggcggcgtgcgtgcgctcaccgcacgagctggaatgcacgagtgcccattagggacgccccaagtgagtgaatggcggccctgtgcggtcctgccccggcggcgcgtggggtcttacggatcctgtcgcctccacatgctggggccggcacccccaccaccccgagaccctcgc

SEQ ID NO: 5640 - DNA, 864 bp, Homo sapiens
cgcgatccaacccccaatccgcgatccaacccccaatccgtgatccaactcaaaatccccgatccaaatcccaatccgcgataccaagtctgcgatctagcccagaatccgcgatcccgcctggtccacccttcagcagcgacactggcggcctccgacctctcagacctagtgagcctcgcaaagccgcccggctcccggaagccgcaggtgcaggcgccgctgggctcgcgggttctcctggctggcccgggctgccccaggaccacggacggaaaatcgcaggcgcgcggcccaccccgccttaaggggagggcccgcctggccgtgtagcccgccccgctcctccttccgaagagagatctggtgctggcatgggcaccccgcggccaccggagtggcttcccggatgagcctggcttcggcgctgacgctctggccctgggggctgcctggctggtgtcaggtagcggaagacgcctggagagtcactcgctccttcccccacccgcccccaccgctgctcgtgccaggacgcgcagtttgcagttgcagctcaggcactggcgcgggatggcggagcttcccttggatggcgtcagggtcaccgagtgcacagcctacctggtctgagggtctgctcctcctggacacctctccggatcctgatccctggcgctgggcaatccacaggatgagactcatcggctgctggcgaagccgaccgcctgactttgctgcctgggcggctggccccgggatccgcgctgctggggacgcgggcctggtctgcggtgtccagccacttgctgcgggcgcgccacgtctaggctggtggctgcagccgcagctccgcgcctgcgg

SEQ ID NO: 5641 - DNA, 2071 bp, Homo sapiens
cgttcggccggcgccgctcctcggaggttgtgcccctggggtggctggcggcggggctcccccggcccggcccgcggcgcttctctgccgccgcctcggggtgtctctgcttcgctgcgagcccggcaccgcggcgacggcggcgcgaagagggaagcgggcggcggcggcggccgcgccaagatgcgccgggtcaccgcaggctgaggcgcccgccgtccccgccctccccctcgctcgcctccctccctcccgcctgcctccctcgctcgctcgctccttccctctccccgccttccctccgcgctcccccgcccgcccctccgcgcctcgcctcctccgccccgcgccctgcggtgctgcagctgcgggcggctccagctgcccccagatgtgggctgggcggctcgcggggaactttcgcgccggctgcgagtgcggggccccggctgcagtccggctgccatggatccgccggcgggagccgctcgccgcctgctctgccccgcgctgctgctgctgctgctgctgctgccgccgccgctcctgccgccgccgccgccgcccgcgaacgccaggctcgccgccgccgccgaccccccaggtaggtgcggcccggcccctactccccgggacccccgccggcctggccctgtcccgcgtgccccgccgccccctccccaggcgtcgtccagcctgacttgggcaaactccgcgcgccccgcccggggccaagttggccaacttcggggccgggttggtcgcgcagggggcgccccgcaccgcccccgagcgccttgggccgggggagcctcggagcactggcggctcctgagtcgcggagggtggggacggagggccgggaaaagccccgcggccaagagcgcagagtcagccccagcgggtccgaggggggagccagggcgaggcggcgccggggctcgcgtccggggacgctccggaggagccggctgccgagcgcgtagccttgggccctaaggattggttggggcgccccgcagggaatccccggagatcggagggaccctgttccacccctcccagtcctcgggcgctcggggagacggggccggcagcgggctgagcgggagctggacaggcaggacaggccgctcgtgctcggggaagccgagactccgccgctccggaggctggcggtgagggcactcgggcggcaggggcccgccgaggggtcgtggcacacgggtaagggggccaacccggaatggcttccgagcagctccacgtcctgccaaggacggtaggtgcaagggtcgggggactctctgacggggtcgtcccttcgggcacggggaggttcccaccgagccccaaccctgaacggggcagggggcagagctcttggcaggcaaggtctccggaggagggaacggctggggagtggcggagccccggagtggtggccctgttaacgccccttcccggttgcaggaaagccggggaggtgcaggctggcttctggggtcgcctggcggaatgccccttcccttcgcagtggggcggggtctgggggggcgtggcttgccggcgggtctctgaggcactggggctccgtggtctccgccgatctaacgccccttcccgttgcaggcgggcccctggggcacggagcggagcgcatcctggcggtgcccgtgcgcactgacgcccagggccgcttggtgtcccacgtggtgtcggcagctacgtccagagcaggggtacgagcccgcagggccgccccggtccggaccccgagcttccccggaggcaacgaggaggagcctggcagtcacctcttctacaatgtcacggtctttggccgagacctgcacctgcggctgcggcccaacgcccgcctcgtggcgcccggggccactatggagtggcagggcgagaagggcaccacccgcgtggagcccctgctcgggagctgtctctacgtcggagacgtggccggcctagccgaagcctcctctgtggcgctcagcaactgcgatgggctggtgagtacgcacttctctagctcctttctctccgctgctctcgc

SEQ ID NO: 5642 - DNA, 1170 bp, Homo sapiens
cgagcccgcgccaagagctacgccgagacgcgccgtcggtggggccacgcgagatgcaaccggagagtttaaaactagcccaggaccaaccccccagggatccgctcaactctccccgcagaagagtttaagtggggcagtggccgccacaggctgaggatgatttccggacgcgccccaggcgcgaccgcactactcgtcctcagttcaaagcctgagtgacttggcaccacttccccaattgttttttatttccttcgcatccctgttgtgtctaccgctttcacgtatttgagagcctaaatcatgttaagacgacttggagaaacgcccgatttgcctcccaagccacgcaaggatccacccagacgcacgcccgcgcggagacgcacgctggcacacgcgctcacacacgcgagcacacacacgcgcacactacccggttcgtgcgcgcgggtcgctgttcctgttgcattatgcaaaggtggctgggaaagcgcgttgacttacatttacatagcccatcttctccccacagtatgtgactaatacgtatcccggggaggagggagcgcggctgggggtgctaatcggaagggaacagacagtgagtgccatcttgctgggaggttccagaagcaaagcgccaacgacgacagtagcggtggcctcagctccaccagtaactgccgctggcaggagcaccacacgctctaggagtttcccgggtatcaagtatgggtccagcccgtcccagttatcctcttcccctatggcttcattcccgttgtcagtaccccgacctcagcttgcaaccttgatcttgggcttgattataaatgacgaaagaccgcggcagccttcaaagtgcgggagcgagccccgtactggtcagcgcggcggagggatctttccaggaggccccaagcccccaagcctgtggagagacttggtaacagctggcaaggcctgctccagccaccctcgctggctccttgcccctgcattcagcgcctgagggcgttattcgccctctccctgcgtcccacgcaagcggctcaaggaactcactcgatccggattccgcctcgtatgctctccaagccttcgccacctccgcaggcgctctagaaaggcgtgatggccccagctcagtgcccgccagcccga

SEQ ID NO: 5643 - DNA, 2168 bp, Homo sapiens
cgcgccacaaacggggacttaacccactgcccgatctctgtcagaggcgacccatttgcgcttctgctatcgcacctccgcccgcgttcctgcgccccaggttccccgctgcctccccgccccctgcagcgcgggagcgttgcttcgcctggcctgctggcctcctctagaccttggccaccttctccgtggcaggaagggctacatgcactgacagattttccgttggtggtggctgggtggtggcgaggcgtgtttccgggcgcgcttaaaacctagcagctctctccaagtagcagcttcccctactccgcccctaggactgaggacctagccctcgatgccccctcacttctccccgtcctaccccgccatcacctcctaacctctccagtatactctcaagcctcacacgggcgcctgtcctccctttgcattccctagctcccgggcgccccgttcggttgaagtttacgtatcttgggacctaattgctcccaattatccgcgcagcctaagtcccgcgtctgcctggctctcgccccgggagcctgaagctaccgggcagttcattgggtgtcctcggggaaaaggttcaagctgtagagatgagagaagtggggctgggggaggggagaggctccagaaggaagaccacgaacacgtgcgaagaaataaaagccaccacgtgtgcacgcgcgcgggggcccaagggcgcgagcgcggagcacgccccagggggccagggacagtggtcccctgcagcgggcatagcagggggcgcgggtactcacacgaaagcgtggtagatgaacgcccagccgcggggtctctccagcacgttgtacaggtagttctgcacccgccggtacttgacgttgcgccggcagctctggctactcgtgtaagagagcggcttccccagcaggctcatccgggccccctgcttgccccggcggctctccctcaggccaccgccgccgccaccgagcgtggccgcgcgggtgcccagcagtagcaggccgtcgcccctggcggctgccgagttcagcagcaccctgccccggccggactccacatccttcatgccgctgcccaagcgccccccgcccgccgccgccgccgctgcgccgctcttcacccagagcccggcggcgccgccctcctctcctcccgcgtggtggcggggcatggcatcaccacgggcaccgcgagggggccgccagcgcctgcggcgggggcagcggcctcatgtgcgccggcgggtttcaaggaggaagccggcggccgacggggcgcccgccagccagagacctctgagccgggggcggggaagcaggcagccagcaaaccgcccgggcttcggggcgggaaaggaggggctgcagaggaggccgaggagtcccaatttctaacagcctttagcttcgaattctaaatccggacctgtttggggcgtcactttgagagggtttctcttgctccctcattcccgcgactaccactccctccttcccaaactgcccccggggatagagtgggggagtgcggggcgctccgaggcgcgctcccacgcgcgcacacccagccccaggcttccccttccctctctccactccccacgccctgcagcgaaacggccccagaagcccctctccgaggcgcgagttcggtttggttctggcaggggctttgcagctgtccggaaggtgaagtcagccttgtgtcctgaggagaaactggagatgcaggtcgctgtgccctcccgctgctacgtcgctgcgccggatcctgccatccttccgcaaggggtgagagcgggaacagccctgccctgccttccaggtattatctagcctggaggctggagcgcaaggtaacgctccgggaagtggcactcgggtccccgcacacgggcgagtcctcagcagttcagtggacagacccgcaggacgcggctgccaagtccgcgaggcaaggaccaggcatcttcccgcgcctcactccagcctgcggactgtgactttccatcccagtatcagacaagctcgcgagtaactgaacatcctttccagtccatgggtggggtgtggaaagggcgtaaaactccaaagtggctcctccgcggtgagcgagctgccccggggctctgcctgactgcagcgcga

SEQ ID NO: 5644 - DNA, 2053 bp, Homo sapiens
cgggaagacctggaggtcggtaaaacggagcggtgcgggatgatgtctgggaacaccggcaaggtgtcataaaatgaacgccaaggcggccacaagaggacggccgggaaccgaacccagcgcccagcacggggcccttgtggccgacgtgacgtggctccgtcaggtggaaaccgtgcgatcctctcccgatccaactcacgagagataaagatgtctaaataaccacgaccgccgccgcacaccctgcagggccccgggggcggaggggaggggagcgcctcctcggcagaagcggcggcccaggcttgtttggaggttcgcaattcaccatgataaatgtaaagaccaattaaggtttgatccgtgcacacaggaggcagacggcggctgatagtggaaacaattaacgagcatgtcccctaattcctgccgcggctgctgagcacaccgcggctccccaggcgcccgccgctgccgcccccgagtcccagagcccccagtccggccctggagtggggcgtcctcctccagcgaaaaggtgcgaggagcggggccccgggtggccggggagggggcgcgccgggccgggaggcgcggagccagccgcctacggagcccaactgtttgcatcggggaccggcgggcggggcgcgcccgagtggtctcgccgggaaagggcggcgggcgctggagaaggcgcctggcgcgaagctgggcggcgccccgagggcggaggacaggtggccgcgcgaccgcagccaggtagcgaacggctcgggggctgcgcagcgcggtcccaaagctcagcccggccccgggcccagctcgctgccgcctgccacgggagcggccttgcgcggagggagggggcgcgagaccgcacccccgggcccggcgcgcctcggcctctgggctcccgctccccttccccttccggctcagcccgctgccccagacgtgacccccgcggaaggtgttggcgatgcgcgctgcccgggagcgtgtgattaatggccccgaggtcgtgggcggcgcatgcaccagccccttcttggcctggtcagggtgtgagggtatccgggagcacagcgaggtcatggcagcgggggcctccgggagcgcggcggcggaggaggaggaggaagaggagaagtaggtgacgcgggccgaagaggcttgtcccctctggccccagggctggcgccgcggcgggtcccccgccccaagcaaagtttggggctacgggcgctgcgctcaggtccctccccgcgcagttccctcggcggggtctgtgccgccgccgctgccagggcaggacaaaggctcattaacacgtgatgggaccgcgcttcataaatgggactggagcgagagggagccagagacagcgcgagcggagggagcggcagggactgcgcgagcgggacgaggcgacgggcgcccgggctggcggagacgggcggccccacgccgggccaggcggggctcgcgggaggacccagtgaagagcctgggaaggggcgaggctcgccggcggtcggagcagcggggcgccagtcccggtcgctgtcgcgggcgggcgctggagaccgggacgccggcgctcggacggactgacttgctgaccgcccgccggaggcacaccccactccaccccaccccgcctcgccagcagcccggcgccggcgccgcctcccgcacgctactccctctgccaccccttccttctccacttcttttccgcctccgcctcttcttgtctcccgcggcgccagcgccttcccttggcccgggcgggggcctcggctccctgcagagctctccgtagtcagtgggggatatttcgttctagcggacaaccagcccctgagctgggcgagaggtgccaagggagcttctgtcccgaggaccaggggatgcgaagggtaagacctggcagagttgcgtttggaaatactttttccgcctcccgccccctcgggtacgaccagtgtggtccccaagtgtccttcgtggagttcttattccgtgtgagcgaatcgtgcgtcgg

SEQ ID NO: 5645 - DNA, 1679 bp, Homo sapiens
cgccccttcccgggaagactcgttacaagtcgcgctccccgccgcccccaacctcggggtcgctctggtcgtctgtgaagcagacgtccacgtcactgtcgtcgctcttgggatccccaggctccgggggatagccgggctcggcacccgggccgtcgcccgctttggcgagcagactctggccagggtggcgggacttgacatgtcgctccaggtcccggcggcgcacaagtaccttgccgcagaactcgcagcggtagggcgtattgccctcggcgtgcagccggatgtgcttgttgagattgctggggtcgccgaagggccgcagacagactttgcacttgagtggcttgtagcccgtgtgcgtccgcatgtggatcttgagcccatacttgcgcgagtacagcttgccacagtagaggcacaggtggccggtcttgggcttacctgcgccgctgcctccgctgccgccgcccccggtgcctcccgccgccgcgacggccggtggcaacgtccccgagtccaggcgtccgcgacccttcccggcagccatctcggacagctgctgattgtgcatggcgatctctcggtcgatgctggccagcgaccccagctcggcggggcttagggcggccgctgcaggcccgctgaagtaggagatggactccggatacttcagcagcccgccgaagtgcaatttgagcgggtaataagcggtggtggccggtgagccgtagagcagctccccgttgtagactgtaaaggccggcatgacggcgggcaggtggctgcactcaccacccggataggctttgagaccgcccgggtcgaggggcggcagcgcgcagcgctcgaggggcaaccccggcgcagggggcagctgcgcataacgcgctcctggcagcgcggcggctgcgggcggggcgcgctccacgtgcttgaaggcggacgcctcttccggggggacggagagcagagggaagccgcgcagggccccagagcagggcaggccaggcggcggcggcggcggcgggtccccagcgagcaggcacttgggatggtggtggtggtgcgcgtggtggtgatggtggtgacccgcgccgcccgccgccgagttctccccgctcccggggcgcccgcacgcccggcccccgcccagcagcctgcccaaagcgaggccggctccttgcttgctgctgctctcctcccggtaggggtcgccgtgagcggccgccgccgccctcgctaggccggcgggcttgaaagctgagcgcacgccggggtagaaagccaggctgccgacccccgccgaggagccgcccacgatgccgaggaagtgcccttgtcctcgggcggctccgctcatgtccagggcacggtccagctgctccttgcccttcttgggctgcccccacttgcctggggtcggcgaggtggccgagggcgcggaagaggcctcgcgcttgatgccctcccgcgcaccgcaggcctgaactggtggcgggcccagggggtggggtcgcaaagttcctgcctgggaaggcgcggcgaaatcgggcgccgggggttttggggagagaccgaggccatcagccgctgggacggcgccttggcgagccgcgtgttcgtggtgcaggaaggcgccgcctccaccgccgctgaacacgcagtggaaacgc

SEQ ID NO: 5646 - DNA, 1474 bp, Homo sapiens
cgcgtgtcagaagtccctcccgcgcggcctcttccccctcttcctccgcagcaggaggcctgacccccgcgtcctgcacccgtgtggaccaaacgttcagcctcccccgccacaatcggacgggaactcgcgcgctttccgggctattccctgtttgtgctgagttatgggcgaatctcccaaaaaggagatatacgagtgggtcgtccaactttgaggggaaacgaggattctctttctcattttctctcctgatttctctccctacccggaccgcacttctcgaattatccccgtaaggaggaacgacgaatgccgccggtcccacgagactgccgccccccactcatgcccaaacaaggatagaatcttgtagcgaggcgacaagaaaataaataagcgggcgtttcaaaccgagtcctcgggtgtgcagacccgcagcggagtcgcgggagcgaggtgggaaatcctggccgcggcgccgggctccgcccgccggggggcgcggggcggcgggcgcatgcgcgtgcgcggtgcggccccagccctggctgccgccgcctgccgccgccgtcgcgatgcctattttagtcaaagcggctgcgggcttggggacccggcccgggcagcggagcttccggacccgccgacccgccgaggagcgcgcgtcgggctcccgtcgagcagctgagcccgtgtgccccgcgtcccgcgccccgaagctgccgctccgaactttggtcggcgctgcccaggctccccgccagggaccagccgggtaaggatgggaggcgcagctgcagccggctttccccccgcgccgggttgtgtgcggcctcgcgctcccctggctaaatcgggaagcgaaagttggatctcagcccctcggggagcaactttgtcggccctggcggcagctgcttgttctacgcgcccgggcagccgggggcgccgccctctgtccctcctcgctggccgcgccctcgaggggctcccggcccttggaggccgcccttctccccgggtctgggcgctgcggccacagagaccctcaacggtcagcggccgccgctcaggtcaggcagccccagcgtccccgggccctcggccccaccgagtgccggctcccgcgctctgcggcggcaagccccttggtgagctccgtctctgctctctccgccgagtctccggggttcctcctcgccccctgtagggccgcctcgagccgcgcagagcctgcgtgcagccgggcgcgcggtgtcgcccactccgtccccgctcggagagtagggtgggccacggcgctcactcctcacccccgcgtcccgagagcgcctggccgaggaggaccgttgccacggaccctcctcctttaaggagcgaggtcagagggccccgggagagcgccgatggctggggacccgaggtccgcgccacccacccgcaacctccttccccgagcctttgggaacgg

SEQ ID NO: 5647 - DNA, 675 bp, Homo sapiens
cggctccggcaatccccgcatcccggctgcgccggtcgtggtcggacgcccgagacgcgcggaggcacagcagaccttggcgtacaggccatgccgccgcaaacggggggcgcgcactccttcccaaagtccccagaggagacacgtacctggtggtagggggtgtaggcggctgcgaagtagggctgcggaggaccatagacttggtacataacatccagacagctcatgactctccgcagcggagacggttaagtgttttttcattaactctccttccccggagctcaggggtgctgcatgggcggcgcttggacccgcgctctggagtcatcaggcggagcaaagccagcgcgctccgcggctcggaatccagctggctcgctaccctcccactcctgcgattttactcccgaccgcgctccagggcagaagcgcctgagctcccgctagtgggcatttaaagcccatgcccggcgggcgtgctgacgccactcgggggctgcggagcgggagggggcggtggggggcggggaccggggggccaatggggagcgagggacgcttgttggaggggcagcgagtgtgtttcccggggcccacctctgacaagcatgcggccaagggtgccggagactatgcggttcccagcggatccgaggcttcgcaccgcga

SEQ ID NO: 5648 - DNA, 1133 bp, Homo sapiens
cgtcggccaccgtcgagcccccactttatccaatcagatcgcggggaaggacacgcaaacctgccgagggctcgggggctccgggctgctgctgctgccagcgtcctgggaagtgacaggcattaggacctgctggcgcggcggcggcggcggcggcagctccagccgcgcccgccacacataccttcactcgctcggtgcacacgccgcgccgcgggcagtgccgcctgcggaggcgcgctcggggcccgcaggggcagcagcggcagcctggcagcgccgccgcgccctcgggcatctggcccgcgaagtttcgcccctgccgctctccgcgccgctcgcctcacgccccccagcgcggccgccgcccgacgcgcgctcgccctgcgctcgccgcgcgccggctccgggggcggcagaagcgcgcgagggccgctgcccgcctccctgcgcagcccgcggctcctaggcaccctgcgttgctgggcccggcgggcgggggtggggcggggagcggggcgcgggccgagcgggggcgtcccggctccgcggtccccggcggctgctgcagcggctgctgcgcgcaatgatgcgggtccgcgccgcgtcccagcagcggcgctgcccctcccttcgcccagatgtgtgaatcctcctcctacaacaaatccttcatcctgctccctgccgccccctcccagggggccaactttgaggaccgcaggggctgccgcccaggcggccgcaggcggcggtgtctaggcggaaaggagcggcgcgaaagcggcggcggcggggaccggggcctcggggcgaggagtctgggcggcatgaccgcggtttgctgagctgaagtcggtcgtgctcccagagccactccgcgggagcgaaccgagtgtgtgtgtgcgcgcgcgctcgggggagaagggaccaagaggagggttagggaaggaagctggggtcatggaacaggggtgcaaccgaggcatccagagcggccggaaagcccgagtggcggagaggccagaggtggcgagaaggggcgcggcggcaccggacgcaccgcccagcacctggctcccctgggctcccgaggatctgaagggtcggagcgcggagagctacggagccga

SEQ ID NO: 5649 - DNA, 1808 bp, Homo sapiens
cgggcgggggacgtccggcagctctgcaaacgcgcagacacgcgaaccccatcgcctcgcgcgccctttggctccgctggtgcgtgtcggggatgcggccgcgcaggcgctcgctccctggcttcctggccgggtagcgggcgttcggctaccggagtccagcctaagggcccagccgaggtctccccgcgcgaggcggttgcgctaggtgagcgggtaccgcggccgcgcctcccttgtcatttactcagcggtcagaggcatcctgcgtctgggagtcccaagtgccttcggctgggtgcccctgtccgatcctcaaaaggaaagcacaaatcccgggtgcgagtctaacccaggaccgaactttcccgcgaacctgaagttaccatggggcgggagccaccttagcgccgcgtccgcccgcccctcgcaccggctaggatgctgcggaaggcaggggcgccgagaggcaagggtgaaagacgccgtccatacccccaaagcccgaacctgcatctcctctgcgaggcgcagggcgggaggaccgctgcagttgggagccggctccggacaggcaaagcgacccgacaggtgaacgcggcgggagggagcaaacgcgtaaaaaaccctgcacttacttcttcgctggcgccttccccgggaggcgttttggctgccgatgtattccataaagttcaaaatgataaaaagccaagaaatcagtcgcaagtgcatagtaacccagtaatgcttcccttcctttctcctctttcttttgattgttaattatatttaatgtttttaaaatatatgtaggtgttaggcgtatatagacagtgcccgagcagcgggacttctcctctcacatccgataggcgtgctgtgatggcaagcgaagtggggcgggtggacagggaaaccaactattgtactttcaaattatccaagcactgaactgcggcggcttcgctggggtggctggcatcgccgcgaaccggggttccaggagccgccggggcggccgcaggtagcatgttgtgcggcaactgccgcaggcgggatccgggcgggcgagcggcggcggcggcggctgcagcggcggccccttgggctcagaagctgcggcggctgcggctgcagcggcgggggcccctggagcgcaggggagcgggcgccgtcggcacagcggccatggccaaggggcggcggagagaccccgagctgcttctggcgtgcgcgagcaggagacgctccagtgttgggctgggctcccgggagcaccacataggggaggaggaggaggagggcagggaggggggagggagaggagggcagggagggggagaggaggggggatggctgtggggggcgggggggagctcgggggcggggaaggaaactgctggagcaacaaccctgagcgacctcaataactttcaatttcaagagggaaagagggagctggaaaagtacaggcgttgcgctttggcagagggacgggaagaggcgcctaaggggtcccgggtctacagcgcagcatctctggacactgcagtgacggccggagaattccagccagaagaatggggaaagcagtgcgtgcgaagagcccctccagaagggcagctctggcggggagacttgggcgcactggggctggcaggcagtgttgaggccgaagaccccccacccatcccagttcggctcctctccgcggcctcaagctaggcgcacccggctgtcggtggccgtgcgcccctgcgcccttgtgccccagcgcccccaccccatccccagcgccggcgcgc

SEQ ID NO: 5650 - DNA, 1323 bp, Homo sapiens
cggtttcggctgcggtggccgcccacccacctccccactcccgtcagcaccctttccttcccctcacctgtcctgagcaccgggccctgggggtcgggtcgcctctccctgttctcagtcctggtctcactccaggagctgtcgggacgtcgggcgcctctggaggcggacgaagaaggcggcagggtcgggggcgtcagcgggaatctcggccgccgcgggcagccgcggtctccctccccatcccagggctcgggcggccaccgcgggcggatgagtcaggcgagggggcgggtggcaaggggtgcaagcggacggagggtgggggcgcccctatgcccgcgccgggggggcaccggaggcctcggggcaggggatgcgccgctgccggtgctcacagagggccgccgccatccgggcgcagagtccaggcgcgcctgccctcggagggcaccgggcgcagcaagccgggcaggggagagggagtcgccgctcaggcggcgccgccaccgcgtccaagaaagacaaaagggaccgggaacgggaggggaaaagttttctgctcggctccagatggatcccagccccaaacctcacgccataaagccccgaagaggcgggttgggggcgggggccggggcggacttccaggggcgtggctgcgcgcctgcgaccccggaccgtgccaatctcgccgccgccccaaaacctgtgggaaaccccagtcctgccacccactcctcctggaggacgcagacaggatctgctctgcaggagcccaggccggccgatccgcgtcccggccacaaagttgcacttcgagagcccaaatcacccgcagacaaaacccatctttgggaacaaagtacccgcttgcaggcgctcttcccgggctggaaggctggcgtgcggaaacggacacacccacccgtggggcccgcctctagctaccgcgggaccaccggttaccgagccagggacccggctcccccagttctccggagcggctggggagctccagccgactcgcagtattcccggagcaggcaccgcaggaccctggctccacgcccctcggacgctttctcctcagatgccgcccggcgggccggggtccccctggcgggctgcgcgggcgctgcgcgagctaaaccaaacctggccggaaaagacgcggccaaggcccgctcggtccacgcttcccgccggcccggcaaggggttccggagaacggcttgggggggcgagaaccatgggcgggggaaatggaagacagagggaactgaagcacgggggtcttcgatgagcagtgcggatgttcga

SEQ ID NO: 5651 - DNA, 1501 bp, Homo sapiens
cgctactcgagccaatgaacgcgactgctctgacaaggcgcctctaatttcaccgaccctggcaaactgcaggagacattcagtccacgccacataaaaactattaaagtgggatcgccgcagttgaaaagcccgatcagtgcctggagattagaacgcgagcctttaaagtacacacgcacccggcaccgggaaagcccaggcgcctgtgaccctccgaaggactctgggtcagcatcctcgcgcctggaccatctagggggtcatcagaaagtaatacacgtcataagaaagatgtgggggagaccccgatgctcgcgcctctgccaggtggaggcggggtgcaggtagaagccgcgcgctggactgctggatgaactccgttacgcgcaggctccgcgccgaccccggaagggacaggcaggctcggaagggacccttggggcttggggacgtcttctagggcagagagcaccgctgcggtccgagcggcccgggccctcaggcgtggggcacccggcctccaagcgccccccggggacgcaggcgcccacgcaccgtccagctgcgcgtcctcagtacccagcgctcggcgtccccggcggagcctcgcgcactttcccggaaagtttgggggttctctcaactcaggctcccccgggagccctggggcgggggttggaagaaggggtcactcacctcgtcgcccggtccgcctcgggttcccgaagtgtctgtcccagccgcggttcagtgcgtccgtaattaagtatttattctcgttccttccagtgtcgaagtttccccttcgcgctgtgcctctggtgaaaacaggacatccccttcggccaccccacaacaaatagcgtacacaagcgggggagaagcggggcggagggagaagccggctccgagggggaggaggaaaggagaggagccaaaactccggactgcgacaggggggaaaggagaagaaaagaaaatgagagagcgcgcccagccgccgcagtcgtcactccccggcttttcccgcagctctttccccctctctaaggcagcgacaacttcacgtggacaggatggaagttttgcgcggaagccgggaacggccggagcgtgcgccgcgctgccggcagcctcgcacttgcgcagggaggtggggcgggggcgacgtcgccaccggctactgcgggctcgtgaggccgccgggggcctcgggggaggccgccagggacgcggggggcggcggcgcgcgggggacccactccgtttttatttgacctcgggtgactgcctattgtcatggtttgcgatctcgcgtggggaccgcccagggcctcggggccctggatgtcccgggtggcgccgccgtaatctccgtgccctccgcgccgcccccaccccgcccccacccgggccgactcgagcggctgcagcctccaggctgaggggagggacccgcgaccgcgctctcctccctgggccggagagccactgtcga

SEQ ID NO: 5652 - DNA, 1744 bp, Homo sapiens
cgtcctcgcggttgccctcctcccagggccgccggtggtccaggatctggccatcggggaggggcgtggtcttgccgaagtcgatgagccacacgccggcgcgatggcagtgatcgtgcacaaagaggagcgagctgccgatcacctgcgagccccgcaccgtcaggccgcggccctgcccagagacgcccttgccgggttcccgccctagccctcgcggcccgggcacccgggcagccgccgcttacctcgtgcctcctgaagaactcggatacctccagggtgtcccggatctgctgcaggcggttcagataccgcctctgcagagggtggggtgggagaggagggcaaattaactaaacgccaaatgagcccctgctaacgatgaggagccgggacccacgctgtgcttggcaaatgccgccaggaggaggacccagggccccgcccagcgtggcccagaagggaaggagcgtagagcagttgcgagccagcgcggtgagggccatggtggggacacagccgagggcactgggccagatgacaggggcagtcctcggcttcaggctccccaacacctcagggtttgggatcccgctctcaccagcacttcctcatctccttgcacaaactcttcaaagacgcgaagcacctgctctcggcttcgcgtagtcttgaagtcggtgctgcaggagccgtccgctttctggatgtgggacaggagtgtcaggggccccgggcccgccagtggggaagaggacagcgtagagcagcggtacctcccagttgcaggggacggcgaggcggtgggagagggcggaggggcaggcggggcgggagcgggggatcgggaaagacagcgcgcagtggggctgcggcggtgccagcgaagcgcgcctgcctcaccttgatgccctcgatgcggaagccgagggtggtgctggagctgatgccttcccgccactgcatgtagcgcggcttggtgacggcgcgctgcgcgtgctcctcctccgtgggagcttcaggatccaccgccagcattttcttgtacatgtccttccgcagcttgggccgctcacgggccttggtcagctcctcctctaggtaagtcctgtgggggcgcaggcagcggccagggcatgagggggcgcacacggagaccccttcgagcactcgccccgggtccccctcaagcagctgtcccggccccggacccctacttgatccccccaaccgacctggcagggcacgcatacctgacgcccattttgcagtcgagcacacaaggtccgtcgaagccatcgagcaggtcctgcagctgcaggtagctttcgccgtcgcgctccaccacgccgtggaaggcaggcacgcagccgcgcagcgcgtcagccatcagccgcgccaggcagtagcgctccggctccgagcagcgcttcaggatcagcccgctggtgcccgccgccttaaaactccctgaggaccggcatccgtcagcgccgcccagccccttcccgtcgcgggcacccgcccacccgccccactgctcaccagtgtgccctgccagctgcacccaggcgtagcgcttcttgaaagggcttatgaccggcagattgaccatggtccggatcttctgccagtggtttttctgaaagcgacagggtcaaggtctgataatcggcgtctcggcaatgcataagccctccctccactgaaacagggtctcgccacgcccccgacccaccgg

SEQ ID NO: 5653 - DNA, 1801 bp, Homo sapiens
cgcgcagcccaggacagcagcgcgcgggctacgggcgagtggagttgcaggggcccgggcggagagccgctgtcacccagggaagctctcgggactccgggcctcccgcgaagctccggacgggcgtcaccgaagccgagagtcccggccgagcccctccgcacggtgggcgccgcgcccaggcgagcgcgcgaggtcgggcggggccgggggccgcccggggagggggcggggccgggactctcgcggccgcgcgcaggggctgggaagctgcccctccggccgcgccgggcgaggggctgcgccggcccgcgaggcgcatgcgcgctgccgagcggctctcgctccctccccgcccaccgctccctcctccccctccccctcctctgcatcctcgccgctctccctctctcctcgcccgctgggtgctgaagttgggcggatggcagcaaaccggctccgctagaggaccgagccgcccagccccgctcccccggacccatcggcgcgctgcccacacctccaggcgaccgggtaagacgctgcctccaaaacaagcggtgctaagtaaatgacatcaaaatgtctgctttgcaccaatggatggatttttttcaaggtaggggggaggtgaaggaaggagggggcggagagcgcgaccgcccatgccccggcgggggcggctgcgcggcgctggggtctcagctgtggccgcggcgccctgagcgggagcgggggccgcgccgcgggtccgggaagttgaatcccgcgtcgctgcctggacgcggtccgctcgccgccctcagctgctgcagggaaccgggcgagtgtcctgcccgccggggaacgctcggccaggtcccagagttcccgcggagagcggggcgcctgctgggggcggccgggagggccgggccaggggcgcgggagaccccgcggggacgcgaggtgttgcgggttttgtgcggttggttgggaacgaggagaatgtgccatcaacagtgtccaatcgactgatcaccttgggtgctgtgtttcctcccttatctctctttacctttgggaaaatgcactgctcaggtggggaaggtgttcgaagaagaggttgcgaaaatgaatcctttgaccagcagtaaaataccggaggggtgtgtgtgtgtgtgtgtgtgtgtgtatgtgtatgtatgtatagggggtggggggtctcttttgttccttcccctccccttagtcaaaggaaagggagtcctggcgtgtgcggcgcggggtggattccacagccaccgagggggcgaggacgaggaacgcccaccaaccgcgagtcgctgcccgggtgggcgcatcggagcctcctttgctgtaggtgatggtggtctttccgtgatcgatggaatcatagtttaatctctgcctccccgccagcctccctgctgtccctcatcgagtgctgcggcagaggctgggtgcagacacggccgctttctcctcttctctctgcctccctgtctccctgaataaatgccggaggactaggggatggcggagggacagagctggactcggaagccgcgggtgggagctgctcctcgcgagcccgaggctgctggcaccttgtcgcgggcagcccgcgccagcctcgggagtccctgggctccgggagagcgagccggggtcgcctggccacaaagatgcccgcgcgcccgccctgcgtacgggacccgccctgcgccctgagccctgcgcctcgcccggagcccgggacgtcggttcacgtgggagaacccctgtcgcccggggacga

SEQ ID NO: 5654 - DNA, 1801 bp, Homo sapiens; identical to SEQ ID NO: 5653

SEQ ID NO: 5655 - DNA, 1684 bp, Homo sapiens
cgttccccccgggcgcgcgggcctcctgccgcctggagccgagctggcactggagcgcttctcctctggagcgcagaggcacccgacgccctgcggcagctcgcagcctttcccccacgaccttctagaacagccctgctctgcctccctccggtctcccgagtgcgcccgtcatcctgcctcgcgagaggtgaacgcggagaaagtaggatgaccacctacgctcccgagaaattctgggcaaagaaaggcattaccccagtccgcacgctgaaagtcgcctttcttttccttttttccccgctgtgcctgaatctcccgggacacttagacggctggagcctcccgactccaaggcgggcgacggcaaagttaaacgccagcgcgctgcggtccccgggcaccgaggcgtccccgctcccgccacccacacagggcgccaagtgccccgacccgcgagtgacgaggacgcacaggctagtgacacgacccgtagccagcactgagcgggacgacggggcccgagcgcaggagggtgcgcggggagctgaggagcgccgggggcccgggcgcggcgcgtacctgaggccgccgccgaggaggcgacggggagcagcgcggccaagagcagcagcgccgcccaggacagccggcgcggcgcgcgcagggtcgccccggcctcgggggccatcgagagcccggggtgggccggggctgggtgcttgcggctggcaggggggcgctggccggagtctggggagtgccgaggcgccgccgtcgggtccccgccgccgtccgtctgttctgcgcgctctgcgcggtgcccgccgcgcccctgccccgcggcgatcgctcccggccgcacaccggcagccgcgctccgccactgaggccgccgacctcccgccgagccttttagctgcgctcgggcgccccctgccggtgtgcggggccggggccagggccggcgggggcgacccgggcgacaggggcgacgggggcggcggggcccgggctggaggcgggcggggcgcgggacgaaggggccggagcgccccggactgacttagcggttctgaacttggggcggtcgctgtgccgggccaagtggctgaggaagttcctcccctcgtctaaccctctcattttctggctggggaagtcgcccatcgcgccgaggagtgccctttgtccccttacagaaacacctctgcgccccaagtggggactcgggccgggacccctcacccggtccgcagcgctgtagttcctgtggctagcccagtccttccacgtccctacccgcacccggcgcgcccacgtcaggggttttcagcgtccttagaccctgctccgtctggctgtcatttctagggcgcgcacgatgcgggtcgaaaaggaacccagttttcagtgtgccttgttgcccaggccaaggactcagcggacctcgcctctcccttttctgtaattgtaacactgccccaggtctccctattcctccttctccctattcctccttccagcctggaagcctcgcggccctccagatggactcggagcgcccctggaggctacagtgacctaagctctaggaaggccgggtcctggacgccgcgtgctgctgtccgccgccgaccggtgtcctcgcagagataacctggctgaactcaccgcccagcgc

SEQ ID NO: 5656 - DNA, 6657 bp, Homo sapiens
cgtgcgtgactggacggtccccgcgcggagcgaggaggctcgcagcgtcggggggagggcggcccagcagggagggcgatgcgagcctggggaggggtcagcgactcggccaggaggtgaggacagccccctaatttccgggaagggaagggcagggggccgcgtctggggggcgccgggcagggtgcggacggcgaagggggacggaagggagagaggcgctggggaagggacctctcggaggcacggggcagcgtgcgggctgcggcagcgaccccgacccgggcccccgggctttgtcgggctgagcctgcgcccgctccgccgccgccaagttcctccaactttgcccgctgcgctcggatcgcgcgccaggcctgggggcgcagcaggggctgggggcgcacgctgcgcactcggggacgcccggggttcgaggtggcggggggcttggccgcgccgctccccgggggtggtccgggtcccaagtcccccaggttcagcgcccggccgcgctcgccgcttacctgcccgcccggcctcggttccggggctgcgcccgcagccgccgccgtccttcaagctctaacttcgctcccgggattgaaattcctccccagcttcgcccatcgatctgcgcgcgcggccccgcccctcgccgcgcggccgggggggaattcaagctcgccctgccccctcccgccccccttccctccctccctccctccttctctccctccctcgctccctcgcccgcctgcgcgctcccttccaccccctcttcctccgccgcgagtccggctcggagcctctggccctccccttctctccctggcctcccgagccccctgctctcctcggctccccgcggcaacccgctccttccctctcccggcgacgcgcaggggctggggaaggaggggaggtcctagaaagcgcagggggcgtcctcgcggtccgtccccggccctccccgcccacatctaaaaggtggagggggtgggtgggtgggtggggggagtgggggcgacagctgttggctgaacaagctacccgcgactcccaccacctcaagcaaagccaaggcgttctcaggtcctcccgtcggtccgccccttatccgggagggcagggacctaggggcggagaacgcagggcgcaggccgggcctcctctgcccagccctggccccgcttccttccttcattcaccccaacctctgtgaggacttcagggggttctggagcactcttcggctcagtttcaccctgacaacctgcctgtgcggaagcccccgtccgcatgttacaggaagggaaactgagtcaagagaggcccagaatctggccctacacagcgcgtcgaaggcagagccccaggggcagcctggacccccggcaggagcctcgggactccacgctcgggccgggcaggccccggcggtgcctggacaagcccgcgttcgcagaacggccggcgcctggggaccctctccagtccccgcgcagcccgcgcgtccccgccggcgccccctccccgcttcctgtcccccgcccgcctctggttcccggcctcagtacccccggcacgctctccgctcgccgccagcagctgggcaattcaacgagcatacaaaagagttgactcaattcaaaggcagcaaatcaagataaatcctatagtgtgtggggaccggagagggaatgtgaatgaacgcccacgacgccgttcagtcctgtatggaccggcctagcccggctgcagggcctgacacgcccgggtcctagggttctccaggagccagaatcggagagtgggctctgagctgccttggctcccaggcccccagcactggcccgaatttagtaatttagagcttgtggcctccttcggctggctgggtggggctcccgtgataggggtgcagagccttgaaggggagtgctaggacgaaagccagtgcgcccccacgatttcatgcaaatactggggggcaggggccctggaaacccagcacagccccaggggccggcaggaagggcaccggtggtttggaacacctaagctgtggcctttctccctctgccccgacctggaccacggtcagagccaggccgcaggccaagagcaggtccttgtttacccaccagatagatactgcaagcctgggatgtgccaggcctgggcctgtggaacgaggccggcggtgagcggggcaccctctcctccctgcctgtctgtgaggtctccccagctgcagctccactagggagaagctggtcggcccccagagcttccttggtcacgcttggaaggtcccagtaagctaccctccagcttctggcctggccagccttgtgcagaagatgaccaccgggctccgggccccagcctatccactccgcctgccaaacataaaccccaagagaggtactggatccccatttccagcaggttcccccaggcctgtgctggccaagtgcagccgaagctctggaatgagcctcctttgccttcgcaggtgtcccccgtgtgccctgcgctgtgctgggcgcctgcccggaggagccgcgccaggacgtcctgctacttcccaggagcaggcatgatgagtccatttcctcggggtgcaaactgaggccgagggcctcttcagagcgcccttgaccggtactgcctgaccccagaggtcagttctgcggtcactcggggtctgagatccacggagaacctcagaggtcaacttgaggggcgggtaggggtacgcgcgcggggccgtgggaggcgagatcccgcaacctgaggagccaggaccccagcagagagcgaaacctggagctgggggaggggacggcagaggactggaggccgggctgcacggcaggggtcgagtcctcgcggccgccccccccccccaccccgagcggaggctgcgccgtccggctgcgaccgagtccccggagtcccggccgggtcgcccctcccccgtggccgcgccgattggcggcctgctgttacccggacgccggcgccgccgccgcgaggacatctgtccggggcccaacgccgcgctccacgccccctgcccctcccccagacccagaaccggggagaggacgcggcggtgaagctgggaggttggaacctggagggcggcggagtcccggagttaacggggcggggggcggggccggcgctggccctggggacaaagatccccacgctgcctgagggctgggctctgcagacaccgaggcaggaagaaggactccgtattccccgtcccccagatcctcaaatccactcaggctcagacctgagtgtccaggtggggtgggggagaccgaaccctcctgggccctcgaggcgcgcgaaggcgacgctgaaggggggacgccgggacgctgcttcctccctgcacacgccgcccgagctgcatccctaaacgctccaggagcttcgcgggtcccccctgccctccacaacccccgaagctgcccccagcgacctctccccgccctcagatggggccgcaggggcgggcgaatgtgttgcgctcgccgtgggttgggaggaagggcgcggattgtaggaagtccctgctcctccctgggcagcctggccccggggactcgcgctcagcccgcggcggaggactcggtcgggaatggtgctgagattgcgcgggtacggcccagggccgtgaccgggtggccaccgtgcagtttgggaagagaaaaagttcgggggggggccgacaccccgagatcgaagagggaaaatgggaggaaagcaggcggcagggagggaagagcggcggaagagggaccaggagagctgggggtccgctctgggccccggggtcccgccccactcggcagcccagcccagcccagccccgccgcgccagcttcccggaccgggagaggctagggtcaccgacgcctattaatagccgcgagcgggtccttcccgggagctccgcagcggtcggcagagcccagccaccggctggggtgggggcgggggtcccgtaacaccccctccggaggttcaagcggcgcggggcggggcgctgcgcccccccacgccggctttgcgaagtcgaggcacccacagcccactccctccccacctccgactccgagaccaggtttcagatgaagaggggttcgtctgtggttcaacttggggcgccgcggctaccccagcgcactcgaaggcgcgcccagccccctccccctctttctgcccagccggctttttgctctcagcgcgctccggaaagtttcggggtccccgcggcgcctccctagccctaggggtccggagtcctggcccttccagccgcggcgtcggggagggaagtttgtccggcccaggctcggcggccgctaacttcgggtgcgcccgcctccgaacctgggtgggtggatggggacgcccgggagccgcgggccccgagcgccgcatccagagccccgcgggcggggagactcggccctggcgcggacgccgaggtcagggcaccagggatggggtggcccgggctgcgagagccgctggggaccctgcgctgccccccgccgccccccccagagagcatcctcttccctgcctcccctaggggcggggaccctccgatcccgcagcggcgacagaggggtcccccggccccggacagccccctgcccctcaggccccttcttacctgggccggggtgcgggccccgggctggaggcactgtcgcgggcgagcagagcgcgcgcaccccggttccccgagcgcggcggcggcggcggcggcttcccctccttcctcctcctcttcctcctccgggctcgctggctccagacagccctcctccccctcccgccctgccggcccctcccggagcccgcccggctggactcggcctgcgacccggagcccagcggagccggcgggagccaggctgcggcgctcactgcgtcaagcgcggggcgagcgcggggcggcggcggcggggaccgcgcgctcggagcccggggctggccgggcaggcgggggagcggcggctccggctccgactcgggctcgggcgcgggcgcagtggtggcggccgcggcagcgccgaggttgtagcacattctttctgagcgtgatggaaggtttcatgtgggagagcgcgcggggagggatggggagggggcgggggccgcggcgggggcgaccggaggggcggggggcggggtcgctgcccgcacgtcggtgggctggggggtggccggaggggggctccggaggggaagttggagccagccgcgggggcggcgtgggaagccgagtggcggcctcgccccctcctcctggcccgccccgctcgccccctgcccccgccccaggccacccagaggctcccaggcttcggtttggaagagaagcgtccgaaggtctgggggtcgggaccctggtggcgctgggaggtgggcccctgggtggggacacggctgtgctcacaggcgcccggcaacctcgtggaagttgaccccaagtcagaccctctgtgagcgcgcgcgtccgcgagggccaaagcacagcccgcaggacgcgcgtttgcggggcggggggagagcggggcacttgggggcggggaggtggagcgagagggtcgtcgggcccctggcggccccgcgtccccagagactcgccctcccctaaggtcgccgacccctccctcccttccctccccgttgcgcgtcgccccccgcctttcggccgggaggagggggaggcgtgggagcggcccggcgccttccgattcccggaaggttcggtttagcggatttccctctcccttcatgtgcctccggaatcccagcggatccgaaatcgcgccctcgggctctgagccgaggggtcccccgtcgctccctggtggtcccgagccctcgccgagcggtctcacggcttcccagggcgtctcccgctcccacccgccccttccccagcctgcggctttcgtgtgggctaaaaattccaaaccaggctcaagagcgccctcgcccggctaagcccccgcgcgccgcttcacaaaccggccgcgtgcggagctgcggagcccgggacccccagcgcgcgctgggcgcgacactctggaccccgctgccagcgccgcgcccctccggccggggagccccacaccgtcaagagggcagggagaggggaggggaggggactactggaggggagggggctgctccccgggtgtctttcccggaggaggtcccgggacaggggtgggggtggcgcgggaggccgcagacagcgcgccccgaggatggccgggccggggatgggcgcgcggggctcctgtccggacgtgggtccaacggcctctccgcagcccagaaactccgtccagcccgcgggacggccgcccgccctccgaccccgagcctctaccacacttgttcctgcaggacggggttggggggactgagaccgtgattgaggccggggcatggaggaagtgccgccgcctgctcccgggattgctggacacgaagggtggaggccaaggacggagcccctgcctgcggctgtccagcccttagtccctgcgcgggggcgcccagacctccagggaacagggagacagagcgggccgagcccgg

SEQ ID NO: 5657 - DNA, 546 bp, Homo sapiens
cggaggcggcggggtcgcgggagggagggggccgggcttaggcgattggcagcgcgagcccgggagcccccccgtgcccccgcccgccccgcccccgccaccatctgctcgggatttggcgtcggcggctccgggcgcctccagctccggctcgggctccggctccggctccgggcgccgaccaggtccccttggcccccgccgcgcgccctccaacctgctgctgccgccgccgcgccccccaggctctgccagctacccgcgctctgagcccggggccagattcccatggaagcgccgcgatgttcgccccccggctgctggatttccagaagacgaaatacgcgaggtgagcggcggccgcggaggtccgcggggagggagggaggggcgcgcggcggcgggggccgcggaggccaccttggttctcgggccccgccgcccggagcgctagaggggatcggcggacccctgacccccgcccgagaaaaccaggacccaggcagcctcgtcttctcgctgggatggagtaaccggggcgcccgc

SEQ ID NO: 5658 - DNA, 288 bp, Homo sapiens
cgcgcggcgcactgcgggccgggaacgtgctgcgcgctgacaccgggtcagctccctgtgatgggacttcctttccaaaaacgtaggcgttttcccgggtcgcagtcgcagtcgggagactgagggttagggcgcggccgcggggtctcctgggccggggcgcggcccacgtctcaggcctctgcggctctgaccagaagccgctgcgcctttggccgcttcccacccgtcccgtccccgcaatcccaggcccagggttacagcggctcagctctcttcctctcgcga

SEQ ID NO: 5659 - DNA, 947 bp, Homo sapiens
cgtgaggccgcggtgtcagtccacactccactgtgggtggcgggttcggccccgcgaggaggcgccgctctcaaaccccacggtcccgcgcagcgaagaggcgaggcggccgcggaaggcaggcgcagcccactcttcccgagaggccccgacatctcccgggtgagtcccgaaaagcgcgcggggactccggctgagcgctgggccgtcagcaacccggctcccagagagtcacacgaaggaggggaagcggctctctctggggcttctgggaggtctggcccgggcccctcccgcagcctccggcggccagtcccgcggctctggggcgcccggaccgagcaaaggtcccggcgggcgggccctctctccgccctccccaagcgcccgccccccgccggcccagcgcaggctcctccgactccgccagcgcagggggcgcggctgccggggacccagcagcgggcgcgcgggtaagtgcgcggcgggcgcgggctgcgggatccgctccgggctccactccggatcctctttggtctgtttgggtgtcccgggccgggggcagccgaggccgcgcggcgctttctctctgggccaccctcccctcgctccttcctaggggagacgaatcgattggctgcccggccgccggaacggcaggtcccgtcgctcccctcgcctcccgcattcccggcccggtcccctcccatcaccgcgtcccgccccaactcgcagtcagcatccccttcccatcctctccccgtccccgctgccacttccttccttggatgttggaagcgcagctggtattttcgttctcccaaccccccaaaccccccctccccattcgttcatcctttgtgttccggtctcttctctgggtgctgcggaggctctcccggctcgggggcgtgtgtgcagggaggcggaccgcggaacagatacgg

SEQ ID NO: 5660 - DNA, 1313 bp, Homo sapiens
cgagaatctgccgcagggggagactccgccgccaggtcttgggaattgcctgggcgccgccaaagctcgagccggagctgtcatttggggcagcggccgggaagaggtaacgatgccagcaagaaagcagcggaggcaggaggcggccggaggagtggactggagcggacggagcctcgccgctctccagcccggagcgcctggagcgaaagccaagcgccctccgagggcgacctcccctccccgggcgcgcgcccacccgctgcagccggcagcccggcgggagaggtggcagctgcagctccgcaccggggagagcgagccccctgcgcgcgcgcccacccgccccctaggtgacccggcgtcctcgccgcgcccgctggaagtttgcaaactttctccgggggttccgccgccacgctgggaagctggggacgcggggggaggttcctggctcgccgtctccgctgccgcttgaccgcacttctggagggctccgcaccttgccaggtctctggaggcaaacacacacccccgattcataactggtccccgcgtcaggggactcgcgcgctcccacacacgcacgcacgccgggcggactcggcgccggctccacgttagcatccctccaggcgcgcggcgcggcggccaccgagcgctccggcactcacgcggcgcggggtctctagggtggcctcaggacacagccgaattccacagtctaccagcactcggggccggacttccctctggtccgccaaaatgtttacaaacacagatcaccctccagaaaaaaatgcatcgcatcttccctactccttgccctgtgacctgcccactggaccaagtaacctcgcggctgctgccgagaaccaacccctgcaaacaagtacactcccgagatggctcctgcggcaagtgcaacaaaagtggctaaatgcaaaagccccagaagtggccgagccgtatttttaggaacttaccaaacaagtgtggagaaggcaagagcggagcccgggtgaagggaccacgttggactgagcaaagattacaatacattctatttagagtgcattacatcacccccccggtgacgtcacgtgggattcctgaacttctaaatcattgcggtccgctggggagggacggagcgaggggcggggccggcgcgtcgagggggcaggccccgccccggtcccgccccgaccccgccccgcccgcgcggaccctggtgcacccgcccgggagcggcagcggcgggggcgactgcgcaagcaacagcttgcagagcccagcgccgtgtgacacgg

SEQ ID NO: 5661 - DNA, 848 bp, Homo sapiens
cgcgaagcctcgcggcttctgcgtgccctggccccgggaggataaggatttcccttccctcctacttgcgcgcggagccgagctcttgttgaggtgagggttccggaagcccacgcagctccgcaggtcggtggtggccgcggctgccctgcgggggtgagtgtgcccggccggggtcggagcccagcgtgtgcccggcagacggcggtgcccgcgcgcccctccctccgcgcccgcggtgacagcccagacaccagcccgggcgctgacagacgacttttctcacttgtcagttttctcgcttgtcagcagagctgctggtaagtgagagaaaacagaggggcgcgaaggcaggcgcggccagggagtgagcggggcgctgggcgcggggcggagccgggtgcgcggcgtccgggtcaggccccaccgcccgcgccggctcccgctttgctcagccgccgcttttctctcccttctcactttctctcctccccacccagccctccttttcacctccaaaccctttagctgcgcgctgatcgcttctgtggctttgtttgggggtagggggagaatacgaatagacccgaggtgctttctcttggagctggagtccaatcccaatccctatctctatccctatccctgtgcttatccctgggcattagcccgggaccatggctggttcccgcagctgcctccggagcgcacctggggccatggtttgccgcgatcggagtccgctctaagtcggagtctgggggcgcagaagggggagcgcgccgagaaagtgccgggcaaacgcgcgccgcgcctggctgggcatcgcgagctgggcgaggagacgg

SEQ ID NO: 5662 - DNA, 2406 bp, Homo sapiens
cgggggaggggtatacgcagtttccgtgcggaaagatggtgtctttccttcacagggctgcgcgggcacccatccccgctgcaaagcgcccgggccaggcgcggcttgctccgggtcggggcgagctcgctgccctctgcggcagacagcgatgcgcgctccccgccccagctcccggctcgcccggcggcccgcgcgccctcccggtgcagcatgcgggcgctgtgacgttctcggataaatgccgtgtaactgtgtaggcgaatgagagctaaaaataagaacggaaaatctatcattaaggtatcattgcgccagcgcagctatttgaaggctcccatggtccccggcgcctgcgtttgaagcccgccttcaggctttggggggtatttgcagaaaactcccagcagcggctcgccaaccagacctcagggtgcacggggggtggcgccggtaattatggcaactctcaaaataaaataatataaaataaagtaaccaacgttcaccaaccaccaccccatctcaccccctgtactgtcctcaggtagctggggaagccgccgggagtgcagccggatgctggaattcaatgtgacccggctgactatgcaaagactaggactggacgcttttgcagctctatttcgccacccaccttcctccttccacctcgtattagaaataaagtggggggggggggcgagcctttggaggagaaaatgacaactggcacttaaccccaggtctacagtgcgccgcggtggggcgcaaagacgcaaactcccgggatggcgagccttcggggtttcattgggttaaacgaaaattgatctgatttgctttttaacatccgagggagagaaggggagatgaggggagggagggcagggtttgagtgtgtgcgtgtgcgtgtgcgtgtgtgtgtgtctggggagggggaggaggcaccaagttgcagcctgcgcgcggctctgcgcctcggcggggctgcgtgcgtgtgtccctgtccgcgctgctgaaacgggctcttcgagggatcggcgtcacatgactccgcctgcccctcgccagcgcgcagatcgccagtccctcagtttgcccggcaccggaggagggtcgggcggcatcttccgggtactggggctctgcggagcggagaagaggttccagcggggaatggtatatctggattcaagaagccgcggctcggcgccagatcctggagtgtagatatttggggggaggggagagctagagggagcgagcgagcgagcgccagagagaggcagcgcgcagcgcgcacggacggggggctgctgcgcggagaagatgtaagcgcgtggggtctcgctggcctctgagcaccatgcagaaggggatccggctgaatgatggccacgtcgcgtccctgggactgctggcgcgcaaggacggcacgcgcaaaggctacctgagcaagcggagttcggacaacacaaaatggcaaaccaagtggttcgcgctgctgcagaacctgctcttctacttcgagagcgactcgagctcgcggccctcggggctttacctgctggagggctgcgtctgcgaccgcgcgccctcccccaagccggcgctgtcggccaaggagccgctggagaaacaggtgaggcgagcgtcgcgtcctgacctccctgcgtcccggccgcggccctgggggctcagggccttcggctggctgatggcgcttgaactttggcccctctactcttggcgccctaggcgctctctgcaccctcagcgagaggggaggcttgctcccagccaggcgagtgactgcggcgggcagagggggcagggattgagggcggggagtagatgtgggctgcggctgcccttcgccggacgagccccgtgggaggcgggtacagaggggccgacacctggagatgcagaggaagatggggtcctaaggaccagagacgatgagtctggacacacgtccagccaaaaatggtgctcccaacccccactcccaccgcccagccctaatagccccgatcgtctgttctacaccgggaacgtgtaattccccgcgcttaggcatgggaagggcaagacggaggcgtccgagcgctgccagcccttgcctcgccgcagctgagggcggagagcggtctgcgctagctcctcggagttgggctggggttatggggctacacgggtcggttcggtaccatcgagcggtggtgggctcccagctggcggccgccggagcaacaagcccaaagattcccaaggaccgctctgatgcgccggggctagggccagggctgctgcggaggcagcgggacgaagtgggcgcttctctcctcccccgccccctgcgccgccgccgccgccgcagtcgcggctatagcgctgcgc

SEQ ID NO: 5663 - DNA, 1218 bp, Homo sapiens
cggactcacgccggctctgccacgtgttgcccgcagtctccgcccgttccctccgcgttggcaacgggcactgactgcccgatacctcagcgatcgtagagactttcctaatgccgggcgcaccaccggcgggccagcggttccgttggcttccctgacacacttcctacagtcatttctttcagctgagatcttcccctttaatacctcgttaattaacgtgtaaccttttggttaaaatgtcagagctaagactaaacctgaagaaaagaatgaaaccacaggaagttcttcagacttagtcgccagcaaggttatggcccgaagcggtgcaggggcggcgcgccgggaagctactggcagagctgtgcgcactggggggtgctgcaagcgctggggagagtgtggagaggctgcgtggagctgcgcgctcggggtgggagctgcactcccaatgaagcgcgtgaagggcaagcggtgatgggttctgcgccagtggggctgggagcgtgttgggggctgtacgtggggctgcgcgcaaggtgagaactgcgcatgtgggcttggggactgcgcgcaccgaaggctgcaggcgctggggagggtgttgggggctgtgcgtggggctgccctcaccggaagctgcacgctcggggaagcgcagaggcggggtgctgcgcgcgctggggagcacgtggggggacacgcagggggacacgcagggactgcccgcgcgaatggcttcgaacgcatgcgctccaccctacatttcacagtcgccatgacgaccgggaggtccgctcgtcaacggctagtcaacggctgcggggacaagtccgttgaggctgccaggcgagtcaggcctttctggacctcgcctgactcggatgggctgtgcctgaaattgacccagctccactagggattatgaagaaacaaggagtaaacccaaagccgctgcaatcttcccgccccagcccgtctaagcggccgtacggggcctcccccgcccgggagctggaggtggaaaagtcggccctaggcggcgggaaactgccagggggcgccaggaggtcctccccggggaggatcccaaatctgaaaaagcgaaaaggcttggagctaaaggtggtggccaagacccttctcgaccccttccagttcgtccgtaattccctggcgcagctccgggaagaggtgcacgaactgcaggcgcgg

SEQ ID NO: 5664 - DNA, 1848 bp, Homo sapiens
cgcagcacgagtgccagggcgcgcatttggggggtgtcctggcggtgtggagagagaagagagagggcgcgggtgacatcacgcccgggcccccttcccctcgccgggtgggtggggcttcggcgcgccgggagggcgcggggtcaagtagggggaagaggaggagcaggcatgaatgtgtctgtgtgaagaccggggaggggcggaggaggaggaggaggaggagaaggaggaggaggaggaggaggcggcggcggcggcggcggcggcggcggagggcggggagggagcgcgcgcgtggctcgcggcgcccgggctcccccccagcccccgaccccggcccgcgacgcgccgcctcccagccgccgccgcccgcctcgcagctgggacccactccgggcttggggacccggcgggcgggagaagcgggggctcccggcgcggcctggaaggagcgagaaagcaaaagtaaggcgagcagcactccaagttttcccaacttcgccccctgcggcggcaggcgtcctgctgctcagcgcgtcccctccgagcccgagagtggctgaaagaaaagggactgggcgggggccggggcggaggaagagagagtgcgagggagcgaggagagtccggcaacatctgttaaaacttgggggaggaggagcgcggggaggaggaggaagaggaggagagaagggaaggagggagcgcgcgggaggggagcgcggagccgagggacaacttttccaccccgtgagtagtgcaggcggtgccaggtcggggcggggggcttctccacccagcacggggcaccaggccgggatgggacctttttccagaaagtcgattggatgccaggagaggcgtacggctgggggtttctttctttctctttcccctccctcccgcggttgaaccaaatcagaactgtcactcagggcttgtgagtcagaagggatcggattacacgatccccgaaactgatgccggagctgcacgagcgggagggagcgggcaggggcagcgccaccggcgcgctcgcacactcgcactcgcgcacacccgccgctcccactcacccgcgccgctctcccgccttccccgcgcgccccgcggccgcccgcgccgcaccatgcccgcggcgggcgcaccccgcgcccagcccggccgctcgcggtagccgtagccgcccgcggccgcgcggagcggggagccgccagcctgcgccccgtccgcgggtctatgggaagttcggggacttgacagccgctgccgccgcaggtacgtcccgctcgaagttctttgtttcgcggaccccgcagcccgctcctgcggccgcgcccgcgcctccggggccagaggtggtccccagcgtggggacgggatggagtgaaaatggctgtcaaaaggcgcccagatttagagagccgccggtgaggcgtccgagcaaggcttgcattcgctccctcctcctggaaggtcctttccgaagagtccgacccgcggaccggccggagacggattggagaatttcacctcccggaggggggacgaagtttgccgcagtggtggcggcgcccctcgcctccgcccccatccaaagggttcagaagaactccgcgagccccgcacgcgcctggctccttcctttgcgcggtggcgctctacggctcgggcttcgggcgcgcacggcgctcgggatgggcggaaggaggcgggaggcatggtgggtgcgcgcggggacctccgccgcgggggccgccgccgctggggcttctccagcccgggctatgcttcggagggcgggggtgtggtgtgagcggatggagagaggcgcgccttcgtcgt

SEQ ID NO: 5665 - DNA, 2119 bp, Homo sapiens
cgcgggaggcagacagcgtccccgtccttgcaaccatctcgcccgcccgactgggaagacagtgacaaagttcgggcgcagaaaaggcagggtcagggcaaccgccgagtggcagcggcagggactagactgtgtttgaccttggcaaaccccactctttctgggccggaggcatgtccacagaagggtggccagcaaggctggaagagccgaagtcctttcccaccacccatataccaccctcgggtccgcagggttgggaggcgagcccagcacgcgctctaggtgcgcaggggaagagcccagcgctgcgcgcagagccggccttggagcttgccctgggggtctgctctcctcgcccactttcagtccctctgtggggatgggtgcggcaaaagaccggcggacccctctggccgccgtctggccgctcatcagctccctgaccttggccaaacctttctctctccacacctgtctcccctctccacacttcacgccaggggcgcttcgtggattgtaactctgaagagagccctggccggagggtgccagccccgactgcgtccccaactcgtaggagtgaccttgaacacacccccactcggagcctcagtgtccccacccgccgcataggaaaaagcgcgcccgactccgggcattcccagcatcgtcccagcaagtgtgtccgagaccagatgaggggtgcgcggctgcacttaccgtcctccagagacgtgggcgcttggcggggaccaaggtggctgtgaccagcaagtgcgacgcagccaccacgagcccaaagcctatggccagcaggctgcgcacgggcagcaaggcataggacacgaaggtgaccaaaaggagctgccaaaccccttgttcggcggtcgctggccccccagcggccccggcggaaccccgggcggggccgcccagcgcgaaaggacagcagagcagcgcgaaggtgaggctgaagagcagcgccagctggccgacctgctgcagctggggcacctgcagggaccggacgttggttaccacgagcagcgccaggaagaggacgcagtgcaccgggtgtgagcccttggccaggccgggcgcgggccccggcgcgcccagcagctcggccagcgccagcgcgcccgccagcaggctgagaacggccagcgccttcagcgtggccgcctgctccagccgcagcgtgtagccgcggaacagcgcctccagctctgggcaagcgaactcctcgtcgcacgcccggagcccgcgccggcggcttgtcccggccgcccgctcggcgcccccgggctcgcccgcgccgcctccgccgccgcctccgccgcgcggcgcccccgccatctcagcgccatgcagcggccgcggccgcgggcgcgcccctcgccggcccggggcgccggggcgcgggcggcggcgccggggcgggcgggcggcgggcggcgaggcgccggggcgcggggcgcggggcgggcggagttggggcgccggctgccccgcgcgcgcgcccggagcgcgtcccctcccgcccgccgcgcctgcgcactggagcccgcccgcgccccgaccgtggtcctcggcggcgaccgcgctgcgacagccgagccccgggagccgcgaacctgggcgcgcacagcccgcgccccaactccgcgtcctgcgttcccgcccgccggaggagccgcgtgacctcgagtaccttccttgtcccctccgagcctcagtttccccaccgtgcacagtggaacccaccctcttggcgtcacctggggagtcgaaaatactgaaatcctgcgaaattccctgttgcggggcagttaatcttggaaaatatgtgccttcccccactcaataaaaccaggccactagatttgagaggggcccgcgtctgactgcgaacccagggccctcgcccctacgagacggagaatcgacgtccaagaatccccggggtcaggaggaaggtggaggcctggggcgtacgtcccttccatgcgcatgagggaccccccgcccctcggcaattcttccctaagctctagggtcgcggagaccctgtgggcgggtgcgggctgcgggagctgtgctggggaggcggcgg

SEQ ID NO: 5666 - DNA, 562 bp, Homo sapiens
cgggccgccaggagggggagggggacgcgcgccgccgggcccgccaccctgcacccggggccgctggtcggtcggggcaccctcacgctcgccccgctggcgagactggagggactcgggacatcgtaaagcactttccccagtgtctgggagcgcccgctgtacgctcagcttcacgtccctggaactggggccccttggctcccgggttcaggctccggccccaggatgcgagtgcccacccgagggggtgggaaaagttgatcctccgcaagggaggggaaggtgcaattcattttcccagacaaccaatggaatacctctcgtctctcttccctcccacctgctcacggcagaagttaggatggcgccttccatgttggcctgggtgcacacacaagtgcgtgcggaagggtggctgcaggcggaggtgacagcgaagcaatcccgcagcccgctcgacggctctttgcgtctcagacctctccctggcgtgtaagacaccgtgtgtctccgtaaaacgggaatgccacatctgacagcgcaccccttcgccctacgg

SEQ ID NO: 5667 - DNA, 1404 bp, Homo sapiens
cgcctgtcctagcgcggctctcgggggaggcagcagcgccccctgcctcccggcctggcccctgcggccgcagcttcccggctctgccagggctgccggcggctccgcttgctcagccagggctgcggctcagaggaacgcgcgccggtgccccgggttgccgcgccgctggacctcagcctgcatcccgttcccctctccctgaaaaggcaccaggaaaagagagagggagagaagagttcacagcaggtaagtctggtttgggtcacctgctactccagtgggagggtgtgctggagaccgcggtgctaagcggggatagccgggatttgggggtggctgtgggtccgaagtggaggacgagcatggtttgggagataaggaaccgtcctgagacagagaaggctcccgggagcggacagagagtgggcgaaatcggtgcgcagtaatcgcggcgccagcttcagcgcggcccctggggcgcagtcccaccccgcctcagcagctgcggagccttctgacgagcctccgcctggcagcactgcacaaagttttcctcctgagacgcgtccaggaactttgctctctccctggcttcctggttcccccaccacccctcctggtctgggcagcagagagcgtctatgaatgtgtccccggcttccgcaggctgcaggttcatttggagacgctttagtcgggaacatccggggagtacttgaccaaagggcatctgcgccctcgctcgctcctttccttgttggtctgggagaagggaaaggggcaaggaagaaggaagggaagcgtggtggtttttgttgtagcgttttggaagaggaatgggcgacgcctttttcttcgccggggaatcgcgacgttccgtctgatggaagtgtgcatccttttagatttagagggaaagttggagtcaaacagcagccacaaagctggctgtctgaaatgtggttaaggcaaaacactcgggggatctctttgtagtagtgggcttggctcgctttggaaaggccggatttgactcgtgctgggcatttaaccaggagtgcggtccccagggtgtttcctcccggcttctgcccaacgagcctggagttaatgcgttaatgggctaccctggtagcgcacgggccgttttcggcactgtttctccttctctgatgactcgagttcaacctcctgggctgagttgctttgcctccgtcacagtgcaaggagggaagttgacaggaggaggagacgccgcgctgtggcagggagctttgggatccaggggactggaagagagccgcgcgccagcagctggggccgctggtgtccgggattccgagttatggggacaggagttaaatagccgaactttcagcgatttcgcctcgagcgaagcgg

SEQ ID NO: 5668 - DNA, 819 bp, Homo sapiens
cgcgggggcggcggggtgacagtccccgtgcatgaatcagccacccctcaggctccgccccggcgggggtcggccggacgctcgccccgcataaagcgggcacccgggccgcctggagcagaaagccgcgcacctcctcccgccaggcgctttctcggacgccttgcccagcgggccgcccgaccccctgcaccatggaccccgctcgccccctggggctgtcgattctgctgcttttcctgacggaggctgcactgggcgatgctgctcaggagccaacaggtatctggccgctccaggagcttctctccccaaccggcggagagggcgcagcgggccatggggccccgtgtaggcgccctccaagcctcgctttctccaggtccctgccgcgcgctccgctggcaggggggactcgctcccaagtttgcactttctctgcagaggcccctccgctcggaaggggacagaactccccgggatgttctttcctcctaggagctacgcctgaccactttccctctcttttgctctccttctgccccttcttcaggaaataacgcggagatctgtctcctgcccctagactacggaccctgccgggccctacttctccgttactactacgacaggtacacgcagagctgccgccagttcctgtacgggggctgcgagggcaacgccaacaatttctacacctgggaggcttgcgacgatgcttgctggaggatagaaagtaagtgccctgcgcgcacccaggactctcgcgctccttgcgccggcggctggtagcagcttcgccagtttcccacgtctcgc

SEQ ID NO: 5669 - DNA, 1128 bp, Homo sapiens
cgcgagggcccctagcggttcgcggcctcgggcggattcccagaacgagtgcgggccgcccggactggcagactgcgagccccgaggggcgcgggacgcagccggctcagacaaagaaaccggcgccagcggccgtccctgccgcccctctccttccctcacgcatcctcccaggaaaaacagggcacactgacggccaaaggggctggccttccccttcagacagctggacgggaggtgccctctgcggggctttgacgtccctcgcagaagagtcgcgggctcagcggtcctcgacagcgtccccgtcccgctccccggcgggcgcccctccctgtcctcccgggtgcgaaccgggcgctggccggggactccggggacgcgtgcgcccctcgccgcgcgaggtgccgccgagccagcccgagagggcggggggcgggcggggcggcgcgcgggggcgggggagcggccgggacacgtgtggcggcggcgggggggacgcggcgcccggggctttaagaaggtgtggagcggggcgggcgctttcccaggcctggccgaggggcgtcgcgcagaggcggcggcggcgcacggaggcggcagacgacgcgctctcggcgcccgcagccccggtcccgcgctcccgcggcccaaagtaactttgggagccgccgtctcccgcggaacttctcggcgggggcccgctcccaggcccgctcccgagcccgttccgctcccgtccgccttcttctcgccttctctccgcgtggctcctccgtcccggcgtctccaaaactgaatgagcgagcggcgcgtagggcgcgcggcggcggcggcggcggcggcggcatggagcgcagtggctgggcccggcagactttcctcctagcgctgttgctgggggcgacgctgagggcgcgcgcggcggctggctattacccccgcttttcgcccttctttttcctgtgcacccaccacggggagctggaaggggatggggagcagggcgaggtgctcatttccctgcatattgcgggcaaccccacctactacgttccgggacaagaataccatggtaggtaccgcagcacctccgcgctcgccgccgccgggtgcgcccgccagcgc

SEQ ID NO: 5670 - DNA, 1128 bp, Homo sapiens; identical to SEQ ID NO: 5669

SEQ ID NO: 5671 - DNA, 1128 bp, Homo sapiens; identical to SEQ ID NO: 5669

SEQ ID NO: 5672 - DNA, 1921 bp, Homo sapiens
cgggcgctgccccctgcggccccctccgccgaggcctgtgcgtggcggggttcccaggagcggcagtccgtgcggcctgggggcggccccctccccgcatcgcagcggggcgtgcaaagcgtctgcggctgtagtgtgggcgctcacttcacgtgctcggcggcgtgcgaggagcagtaatacttcttgtgggcgatgaaggtggacaggctgctgaacttgatgttgcaaagacggcagtaccggtggttgccgttgggcagcggcgccggcgtgcccttgctgggagtctggacgcccttgtccgagtaggaggggggcgccggcgggggcggcacggcctcgggcgcggcggccggggacgggggcgggccgggcggcggctcctggggctccgggccgaggccgtcccgggggccacgggacccgggctgcggggaggcggcgggggcgggagcgggcgaggggccgcggtcggccggcgtccgggcctcgacccccgggccggccaggggcgcgccgagcagcaggccgtgcgccaggcggaaatgctccagcaggtccccgcgcaccgggccgttcggggggcagtaggggcaggcggcggcgggcaggccgagcgcgccgggcggtggcgcagcggggcacgagtacttcttgtgcgccaggtaggcctcgaggctgtggaagctcacgcggcaggccgtgcactcgtggtagtcggccagcgccggtgccggggctccggggagcgggcgccgcggcttcttgctcaggtcgatggggccgtcggccgcggggccgggcgagcgcgcaggggcgaggccggggccgcttccgcttccgcttccgggccgcggcgactcgggcgcgggggcgtggccgggcggcggggggggcggggcgccggccgcgtgcagctcgtagagcttgcggcgtctgcgcgtgcgcacaggcgcggcgggagagggggccgggggcgcggccggcccagggggtcccgggggcgcggccggtcggcgcggcggcgggtcgtggcgcgaggcgcagtagtaccgcttgtgcacggtgtaggtctcgtggcggctgaagcggatgttgcaggcctcgcacagcgtgcggctggggtcgtcctccgcgtcgtccacggagctacccgggctctggctgccctcgctgccccggccgcccgcgccgtcctcgggcgtggccgcgcccccagccccctcctcgcgcgctccggggcccggggacgagcgcggcgcgtcgggttcggcgggctggccggggggcgcgcgggccgggccggggggcgccttgggcctgcgcgcggcaggcgcgtcctcgggcgcacggcggcctgaacagtagaggcgcttgtgcacgtagtagttgttgacgttgctgaaggtgatctcgcactcgaagcacgtagcgcccttgggggccccggggaagagcccggtctgcgcgccgccggcgcccgcgcccgcgccctgctgcagccggctgtgcaccagctcggacatcttggccaggatctccgaggcggggggcgccgcgtcgggcccgaacacgtactgcggaaggaacagggccccggccaggcccagctcgccgggcaccgggctggagcccggcgtggggctggacagctcggccttgaccctggccggggcggggctgcgcggcgacggcgtccgcgacggggcctggggcccaggctctccggggcccaggatgggggccgcctccggctcctccaccgcctccaccttgatgctcctgggggccgccgggggctcgctgctgcctccattctgggccagaggctccgctctggcctctccgttggtggcctcggccagggcctttctgtccagtcctggcgatggggtgggcgccaggcccaggtccgcgg

SEQ ID NO: 5673 - DNA, 2872 bp, Homo sapiens
cgggtgtcagggcgcgttgcggcctcgcgggtgggcagaggcgcgcagaaaacgcgcgggtggcgcgcgcggccacccagtgggtcccgcccgcgccgccggcgccgccgccgccgccgcacgtgcgccgccgcgagcgcgaagggcgttcggacccgcgctctgcccgcccgcctgcccgccggggccactgtggacttccaggtaacagccaagtgagaagccctccctatcaccgaaaggtgtctgcgctcctcccacgtcccctcaccaagtgccgcgaggtgcgatttcaccccaaacccacccacaaacagccaggcgacctctctaaagcggaataaaagtaaaaccaggccagacaccgggggaagccggtcgtgctaacgcgtggacagggaaaggaacgcgatcaaggcagcagtcatccctgtgcacggttatcccgaagcgtcagtagggcccaggagtttcttgactccagaaacaggagtgtcccctttccatctctctccttcctggagaagtacttctgagatgaacgctgaagtgcccaacttagacgcgagaagcgtgcacttgcccaactgagtaaataaaggtcagcagttggatcaataaagtgtgtgcttctaaccgccagatgtttttactgttgtttctcctcccgaggttgggggtgggggtgcggggaggaaggggaaaagacaacaaacaattaaaaagaagagagtaaacaaacacacatctggtgtttcgacacacattctcctccagccgaggtctctccggacgaagcaacattttgcattatccaaactaaaaatcatccgtgagccaacagcaaatctcccctctccacccctttttcccccatcacaaagcaaaatgaaagagaacaacaagtggtgatgctgggtccggaatgcgaccccaacgccgagcccaaatttgacacatgtcacactcgccccggcaagcagggcgctgcctttggggcgaaactttgtcgccaccgcgggaggagcgcggagcagagtaaagtcgcagctcggcccagcgtggaggtggctgggacagggtggggtgcggaggtgtagcgcgccagagtgagggccaagaaacttaccgcgaccggggacgccgtgggcagcgtcccgggaggtggcacccgcggcggcgaggcagaagcccccaaacaacacacccacgcgcgagtccgggcagctgctgccgcgagtggggggcgcgcccggggagggggggggccgaggaagccgcagccagcggacgcggccgccgcataaataaccggggcgggcgttcgcgggcgggctgcgggtggcgcggggctagagctagggcgaagcggcggccgcggagctgcacgcgccggcgtgtctcgcgctttctcggaggctcgcgctgtctcgcgcagccgctccccccacccggatctgtgtgtgtgtgtgtgtgtgtgtgtgtgtctgtgtgtctgtgtgtgtgaatgtgcgctggcaggcgcgcgcacccggccgcgcgcgcgtgttgttggcaatgcgaactgtacacacactgctcgcggggctgcctctcctcggaggggcggggtgggggacaggacgccgcagaggattctgaagtaccgccggaccacttgtttgttttgttttactttgcgttgttattgtcgttgttgttgttgataggtttggaaccagctggttaggatgcctttctcccccgtccacctatctccccccgttccctaacttctttaaggagggggaaacgcggggaagaatattgttcggatttgcagcggagcctcctggctgacgtcaggtccacctgctatgtaaacaacccgctggagaacttgtttgtgctacgccagaccttcccccacccccacccttctccccacctcctgctccgccttctccagctcgccccagacggcgagtcagggaagggggtggggagggaggcgagaacaaaaccgtatgctgtattggcaaagccgagttgtgtctgctgcttcttggcagtccccaaagtacgtcctctcagcagacggagctgctggcaaatgaaacaggggattccacttgaagtgcagaaagcctcgaagggatccaaagccctcggtggcagggagttaaaagtacatggtagtcggaaagggagacccgagcgtgcgttaaagcgctgattggcctttcttttcacggtgtgcgcctctgcggcctggggtggagagaggccgagtgtctttctcttcattgttgccctggttcctgtctcacttgggccaaggagttctcgggcttcctcgtggtcgcgcagcccaggtcaccggggcgcggcttggaaggaaggggccgccaagctgggacttagagagtctgaggttttcgggaagggtcctatcagtgactgaggggagcaaaagtaaccggaaagaaaggaaagaagaaacggtcagagcctgctccgcgcgcacttcaaagccgaggcgcccgcgtgggggatgcacgggcccagccgccagccctgggtcccggcttctatccaccgggtgtgacccggctgggcggcctgcttgggacccagggcggtgacaggggaaaggccgagggaggagagagcgggccccggaggggacgcacgaccggaatcttggcgaggggcttcctccggagccccagcccagaggggggccagcgctccctccccgccgtctccctccggtccctcccctgcccgcgggccgggcgactcttcgccggccgccttttccgcgcgccgcagactgagcccgctgctttgctcgcaagtcagtcgcaaagcgtggcgttccgagaggcgc

SEQ ID NO: 5674 - DNA, 2906 bp, Homo sapiens
cgcgccccgctctccctggctcgcccgggcctagggcgccgcctgcagttgcgcgcggccgcctctagatggaactttctcaccaacgcaaggcccggccggagcagctacccgggagctgggcggcgaggggctactttctctcattccggcgggtgcaggatcggggggcctgggcagtaactagtggggaggagcgctggactgtgcacgtcgagcccggcaggtttccgcatgcggcatgcgaagggaatcccgaggtttccctgcagaacccgagcacggctcccccggagtttcctgccccgcgtctgcggctccttgaatcatctcaataaaatgaccgtcccggtagccacccatgccccttcctgcgcagtgcccgcagcggaccgcgctgtgtggtacctcgagccctggggactctgttgcacgcgtccctcagaccctcgggggcggggagtggggagacaatcgccagagccgcggggcgggacaaatggcggaaccgccgcgcggcgccaggcaaactttgcaagggaaccgcgcggcttgccggctctactttaagcattcccgaaaagaaagcatgtggcgggacacttgtcatctaccatgtgttattctcggtgacgctttctggagctgtgttcaccggggacccgggctcgcgggtgctgcccgctgtgctcgggcgggcgtcgcgcctccccgcgccggtcccgggctcgccaggcagccggagccgctgggctcctccacaaccatattccttcttctaccgctcccgcttcttcccaccctctcactctgtagttgggtcctcccctttttcttgggggcggggaaggggggatgatttttaaaaatcagaactattgacatttctggtctcctcgtcgcttcaggctgaagagcggagggggatccgcgggccgagggtccccctccctgcccgcgccagggccgctgggtgacaccgaaatccagaggctcccgcccctcgggggttcctcctcccgcttcccgaggtgactggttggcgcgaagcgattggcgatcccgggcgcgatcctggccgcggctccccgcgccgcgccgggtgaatggccgcgggcggaggatcgggaggcgccgggcgcagaccaatcgcggccgccggtgggagtatttgttattcacatggaagagacttggcgcctgctaggccagctcagccccctcagcccagagatcagccacaagtgcggccgctgtgctcgcctcacgcggcggcggcggcggcggcggcggcgctgacatggagctgcgggcccccggcgggcttcctcaccgcgccctctgcggggagcagggtaagactcgccgcccggcagcagaaagcggctccgaggaaagcaagtgccgaaccacgggacaaaaagcccctggcccccaaacttccccaaaacgccctgcttgttggaaaaggagaatccccccgttttattcccctttccgttttcttctctaaaacctttcagcggacagccaggtgcaccattccttctcatatcactctagtgatttgtttttcctgagcacaagtagatggccctgcatgtccgtagtctgtgagagaaatagcgggcggaggtgacgggaatggggggagaaggagagtgggcaccagggggcgaggggctggccgggcattggagcttgattgggtgtctgttgattttacgttgcaaagaacaaggcagccacccctcttgtctgcccatgattacattacagtaaagaggttcagaaaagagggagactttacccggaactcccaaggcttggagatgtgatcccccaaaagtttagtcggcgaatgggagactgaagggtgacgggaagggggcaggcgcgctcggcgctctgactgggcgtgcggcggcaggattttaaagcgctctgcctcggatcgtctgccctgggtgacctcccggacctgccctggtggaatccggacttgccccgccgagatgacgaggtaccttcgtttcgcgaacctaacaggagggatttctgaagttagcggcttccgggatgagtcggggtaacccccgccctctgagcgtgggctggatggatgtctaaccaggatctagggaggatgggggtcgcgggggaagccgggcgcttcggggtcctcgacacccacatccccgcacggcgcacgctctgcctcgagtttgcgttctccgagttagcacggcgagcttgggatttccgtgcccctcttttgtggctttcgagaaacgccggagttccgtgtcctgctgggggttggggggatggagaaaaggtctcggggatcttgtttaaaaagcaaaggcaaacgcaccccaacagctcctcggtagctcccgcggctggcgcggccccagtttcgggcggccccgcgcggggcgtgggcgcgggcgctcgggcggccaggtgcggcgggggcggaggctgcatccccagcgcgccggaatgccccggggcgcgggaaaggcaaaagcagcctggcgctctccccacggccccagtctctatctacccagaacccggcttcaacagcccaaggaactgagaagaaaaaggaacctgcgctgggaaacaggggctcctggcgggctgagtggtcgctgttatggtagagatagaaacggagaggtagagatggaccgctcagccatgccaagcgcgaagcccatccgcccagccagaaagctcggatatcccttgagcttcgtacagttggtgaaaaaataacagaatcaccaaaaaagaaaaaaaaattcccttcgtctgacacgcgctcccttggtgcaaatgaaatgcggagggacacgcgagtcacccagttgcgcaaaaccgcacccccgcgg

SEQ ID NO: 5675 - DNA, 2906 bp, Homo sapiens; identical to SEQ ID NO: 5674

SEQ ID NO: 5676 - DNA, 1696 bp, Homo sapiens
cgaaggaggggctggcggcagtgcagcagcgaagcccgggctctcggtcctgggagcctcgtggccccggccgccgtcccccgagtccccaccacgcagttccgaactccgaacgcgagtccgcgccccgtcagcagtcagcgggggtgaggatgacgcgggccgggcgagaggcaggccaaatgcagcagccccgccgcgggccgccgggcccctgagccccgctcttcagagccagggggccccgggtgcgggccggagggcgggggccggcgcgggctctcccgccgcagccccgcgccgctccagcctatcagcggccacccaactgctccctccgaccggcccaaaatagctgcgaacgcctgcgacttgcgcgcggcccctcacttgacgctcactccggctcgctcgcccgctcgccctggccccgctccgctcgtctagagggggcggggaggaagcggcccggggaggggggaggggggagggggagagaggaagagaggaggaaggaaggaggaaagaggaagacgggcggccggaggcgcggggctgcgcggcgccggccggcgcggcgctggaaggcgccggcgttaaccccgcgaggcaggcgacggagggggagcggcgctaatacataagagcactgcatcacgctaatcttctcccagaacagtatgcgtcagcagtacattcacgttctgactgaaggacaaaaggatgagagagcagtctgcgtggctgccgcctgcaacaccgcgagcccggcgcgaggaggagacggtgggcgccgcgcgcaggggccccgctgctgctgctgccgccgctagccagcggggactatgttcctgggctccggagcgtttcccgcagccgcgacccccgctgctcacgccgctgcagcagtccgctggcggcgcggccactgagggcgccgggagccgaagccgcgaactcgctccctccgcacaaagccggagccggcggcgcgccgggggccgggcagcggcgggcggcgacgggcggttgcgcgccgccgggggctgcggccgccgccgccgccggacccgcgcccgcccccggactctctgaaggggcctgcggtgcgggcgcgaccgcgggcgccgcgcgctcctccggccggcggaccgggtccgagcgcagccgccacgccgctggtcctcgggggccggacggagcgccgccccgcgtgccggcagccggcggactggagaactgaccccccgtttttgtctcttccaccctccgagaagaggcgaggagaaagggggtgtgtgtctggggagggcgaaggcgccgcgaacacctcctcttaactctcgccgctccgcgagctcacgaccgcaatcagctgccgccggcccggagcggccgacgccgggagagggagcgcagcatccagcgagtgcggcctgggcggcttcggggcgcccccgcactccctccggcggcggcccgcagagcgggccggggccgccggagcgcactttggcgatgaagcgccttcccccgcggctggagcgagccggtgccagggtccaaggacaaagccgggaagcgctggtggcgccgctccttgggcggaggggggggcatgcacctgcatagcccgccgggccttggctctcccaggcgcgcctcaactccgcggcttcgccggctccggctccgg

SEQ ID NO: 5677 - DNA, 2054 bp, Homo sapiens
cgacggccagcgcccagagctgcaaattccgaggcggctgagcgcctccctctgagcgcgcgccgtgcgctccggtcacccatgtatgcccctctctccgccccacatcgccaccgccagggtagctccgtgcgggccgaggggacccaggggggtgtcggcaaacgttggtgcggaggagagccggcaagccgggcggcggcgggtgggagcatgtagggaggcgccccctgccccctctgccggccgctctccctcgctctagatgtcagccgcgagctccgagccagcgagagcgagccagagagggagcggcggcgggcggcgggcggcagggaggagaggaggcgaggcgagggagggaggaagggaagcagggagggcgggagggaggagaggaggacccagagagcgccaggcagctggagtttttgcagcgcttggccgggcttcaatgcacagcagcagcgagccgcggcggcagcaggcagcccgggagctccggcggcggccgagccagcggcggccccgctccctgccccctgcaaactttgcgagcagcccgcccggggggccgggggcgcgcccgggaggcccggctcggcccgcggccgagctctccgccgccgcagcgccagccgccgcagccaccaccgccgcagccccgcgcctccccggggagcagccggcggctcccgcggccccccagccccggccccagggcactgcccggcgagtgtctcggcaagggtgggggctgccgcggcgcggccggccgcgggctgccggggggcggccgccgctacccagagaggcgcgcagaggcgccgagagcgctccccggcgggtcccccgcgcactcgccgcgcccgggcagcggcccgaccgggcgagcatgggcggcgcggagtgacgccgctgtgcccgcttggcatcaaggacattcagcccgcgggggtggggacgaaggggggcagcccggcgtcgccaccgcagcccccgagagccgccgccgctgctcgggctccggggctgggtggaggaaaggggtgttcggaatcgatccccattttccgacctttttgttggacattacgcccaccttggacgccgcaagagaagctgtcaagccccgcaggctctgattcggcgccctccgcgttcctcggctgctcccggcttccctgtgcctcggtggagtatttgcgttcggggctggggctggaggaggcagccacacgcgcgcacacgcacacgttcagaggagggcgagaggcagcggcataggctccatctgcagtgtcaatgcggcgctcccgctgaaggagggaaacgcggcgcgtccaggtaaggagccggcccgccggggagtggggccgggcgggcggcgagggcagcaaggtcggacagacctgggccgacccgggagtcctcagtgtcccggagccagcccgcggcacacgcacacgcacacacgcaggcacacacacagatccacaccggcacacacggcgctcgcgcacctgcccacgtcccacctggacgcccgcggaggtgcagcggccggagcagggatttcccgggtgtgttctcctctcacgctcctggactcagacttctctttcccgggactttcggggtgggattctgtgtattcccggctctgcctcccacccggggaggttgagggagcaatttttcagctcccagcccctttcgtccctagctgggctttaaaatgggagaagtcctgagaggtttccggagacctacccagtgtcatcgcggccccgtggcctttggacaccctgggatttcaacgggagacagacccacagatattcggacgcatatttggagagagtggtggcccagcgcccggggaggaggccagataggcggttggggctgcagttctgtagggcggcgcatatgaaacagacactgcgtttccccagtaagaggcagcacaaacgcctttctgaagcgtggcactgcttccccgggaatgcgccgagatttcaggcagaaagcggcttaaagcatcgccgcgt

SEQ ID NO: 5678 - DNA, 1258 bp, Homo sapiens
cgaacaacgcagcggcgccaggcgccagggtcctcacttctgcctcctggatttcctccgcctttctgcttcaccgagggccctgtgatccgattccatcgaattaaccgctgtttaccgagggtctgctgcgcctaaggaaggcaccgggcgacgagcaaggcggggacgcagtttggggacgcaggggtccgggccccagtccagagacaggaggtcggcgcttcgacttggcacccgccgacgaattcactccaaggttcccactggcggagctcctgctacctcccccctcccctaaatgcagctcccgctaccttcccgcgcccaggggctgctgcctgagcccagctctgctcactggagggcggcggtggagagggtgctggcccagcgtcggcagctgggctcaggaccaaggtgggcgcccgccggtcctggtccccccagcctcacggtgcaggacccagggcgcggccactcgagttccccggacgctctccttcctgatgctcgctgtccctgccctggcgtccccagcccggggtcgcagcctgtcctcctctctctccccctccgccgcagcccgtcgcctccgggcagagttcatgttcagcttgggctttcgctcgggatttaggaagaggccggcggggctggagggtgcgggccggcgcgggagggcgcgggaggcggggagcggcggcctctgattggccggggcgggggagtgagcggagtttcccacaatgccccggtgcggtgcagccgcggatggatgctgcgggaaggggctgccatttgctgcccctgccagcggcgcgcggacctgcccgcgctcctgcagccgccgccgccgccgccgccagcccgcccggcccctgcagcggcgccgcctgcgctccctccgcggccgccggagcgggcgccatgaaccccagctcctcggcgggagaggagaaaggggcgacgggcggcagcagcagcagcggaagcggcgccgggagctgctgcctgggcgccgagggcggcgcggacccgcggggcgcagggtcagccgcggcggcgggggccgctgccctggacgagcccgcggccgccggccagaaggagaaggacgaagcgctggaggagaagctgaggaacttaactttccggaagcaggtctcgtacaggtaggtgcggggagccggcagccgagacaggtgcgccgcggcgggagacccactcttctacccagcaaggggcgcttccgcgg

SEQ ID NO: 5679 - DNA, 628 bp, Homo sapiens
cgcggtggcccccggttccctcccaccccaccccacgaaccggcgtctggccgccctgaaatgaatgactccgccgcgtcccggcgccgcgctcccagcgctcccctccgggacagcggccaaggtgactctgaccgcctccgggtcgcgggtcgggcctgggcaggggtccctgggccaggagagggaggccgctccgcgcttaccctccaaggccgccttccagctggtgctgccctcgtagcccgacccggatcgccgcagcagcccctcggggccgcgggcctcagcctctgcgggcgaacgcggcctgggggcggcgggggcgggcgcggggcgcgcggcgaggggcggcggcggccgggcccgcgaggggggctcccgggccggctccatgcggggcgctccgccgcgccgcgcccgcgctcctgcaccggggtgcggggcccagcccgacgcgcactcggcgctccgcgcgccctgcgggccccccaggccggcctcgggtgggctaggaccgcggcgctggcaggccggggctgagcccggctccccgcgctggagcctctgcgccgggtgccgccgcggtgcgctcagcgcctgccccgccgagccgcagcctccacgc

SEQ ID NO: 5680 - DNA, 1075 bp, Homo sapiens
cggaggctcgcccccgctaggggtcccgggggtgcgtgatcatgaaccccagagggctgggctttgatttgagtgccgatccgttaatgaggacgggaggataaggttgccgacgcagcggaaggtaggggggaagcgactcgaggacctgacgattatccccaggcaggggcttcccaagcaggcacggaaaccaacttcaccaaaccgcggagtggggactgggcccgggcggtgttcagcagggcaggggcagggccagctggcgcgcaggcatctgcagggtggagcagaataaccgtggggacccgtttctctggaggggcactgtccacttcccatatgagcctcaggatacccccgtggggcggagtctcggagacgccccaggtcacgctctcgccgccccatccctgcttgcggggggccgagcagggagggaggcccagcgcgcgctgtgtgtccgcagtgttcacgggcagcggggacgcttgcgcccgggccttcgacgcgcagtctggagagctgcggagggtgttccggggccacacattcatcatcaactgcatccaggtaggtccctctgcccttctcggggccgccgcccgtgggagggaaggtgccccgccccgatccatccacgcgggcagcggtgtcccccccgcctaccgcgtcaccggtgacgcccgcccctgcgcccgcaggtgcacggccaggtgctctacaccgcctcgcacgacggcgccctgcgcctctgggacgtgcgcgggctccgaggtgccccgcggccccctccgcccatgcgcagcctctcgcggctcttcagcaacaaggtgggctgcgccgccgcgcccctgcagccggcctgatcccgcggggcccctgcagacgccagcccagacacccagcggctcccagagcgccccgccctgctacccgcggtggtggcgcccgatggccggcgaggggcgaggagcgaggaagcccgggcgggaggagagcccgtcgcaggcgtctggtttttctttggtggccaggaggcgctgggagcgggagtgctcgccctggggaccgc

SEQ ID NO: 5681 - DNA, 5566 bp, Homo sapiens
cgaatcagtcctgccgctggactcctggccgctgcccgggccggcgtcagcttcacacaatgtcgcgtgagtctttgtgcgtgtgcgcgggggaggttcgagatgttttcctcccggtaagttcccgcgccagcaccgccccccagctccgcgggcctccccgcggcgagccgggacgcgtggtccccgcgggctcacctgaagaaggccggtccgagtagcgcgtacagtagacccacgccggccagagcatgggctgcgcgcccaggttggcgccggcttgcgagctgtccgagtccgagctcaccgacaggtcgccgccgcccaagccgcgggccttgagcgacccgtccagggggccgccggggtcgccgcctttcttggcgccaccgtgcagcgagagcgtcttggagccgccttccccgtcacccggagagtcgctgccggcggctgggagcggcccgcccgcgccgggcgcacatggcgggttctgccggggctctcgggagcccgagcccaagagctgctccgagccgcccgcgccgccgcctccctccgcaccgctcgcgccgccttcgccgccggctccgccgccccttcctcctcccgcgcccgcacagcaggtccccgcgtcctttcgccggccgaactcgggccgcaggatgttgtcgatgaagaagttggtgatgcggtgcgggtgctggtggttgccgggcgcctgcaggaccgcgggcagcatcagagcccgccggcgcccggtgtccgcttcgcccgggctgctaccgccgccgccgcccgagccgccgccggggctggattccggctgccgctgtccctccaccgccgccgctgcttcgccaggcttggggtcattctcctccatgctgttcacagtaaatcccacactggttctccggggacgcccttccaaatcagccttcggccctcccgcggcgcacacggagacccccgcgcccccaccccgccgagtcttccgagggcgtgcgcggcggccgcggccagggctgaggtcctacaagtcgccggccgcgctcggcgcggagccacctttgaatccacgaactgggttagaaacaccacgagccgccccgctcgcccagacgatgagagattcaacagagccaagtcctcgacttcgccgcgcagccggggtctagacagtcgcagtggtccggcggggacgcgggccgcctcccgggctccccgctcctctccgcgtccggccgcctcgggctccggcgccgccgcctgggccgcccggggcgagagctgcgcgcatgcaggcagcgcgttccccggcgctcacgcccgcccgggccggctccggccgccgccgccgcccggccgtccccgcccgcacgccctagccggccctcgagggtgccgggcgcccgcggtcagcgcgcccgccaccgcccgcacgcacatggaggccccctcctcgcggccgccgccccgctgcgggccggggcgccccaccggcgtgcggccgcgcccccgccgagccccgcagagctccgcggcccgagtcgcatgggtgagagacgcgaggccagggcccggccgggccgggctgggccgcccgcgctccccggccgtccgccgccctcgccgcctcggcctccgcgcgggctcggaaatttccaggccactcggcgcaacctgagacactttcactctggatttttgttcttatttttaacagagccccctcgagtgacgtcgcaggccggtctcctggacacgtgcctcgggccaatggccgcggcgccgcgcgcccacgtgacgctccggccgccgctgggtgacaggagcagcccgccgcccctcctccccttaaagcggccgcgtcccccgctccgggtgcgggagcccaggaacccggagagacccccgaccgcgtctcctgcgctcgcccgcgctttccctgtcgcttcgcggttcaggggtgtgagtcacccggcgacagccccgccaggtcaccccggggcgcgtaggtggacacgcacaggaagatcgctatttttaagatttccatattgtttaccgtggggcgaaatcccacaattccttgcacaaaatgcataaataatattaaatgagctgccgagatacaaagggacttttgtggtccgctttccttgctgatggagaggaatagtgtcactcccatttgactcggtaacccggcagcttcctgtcttaaacgcagagctggcgcgcaggacactcctcctgcagacacttattgtaagtgtgcgtgtgtgtgcgtgtgcagggaggcgcgtgcatacggccgcattccacccggggacagcgaccctcatgaaacatgcttagcgatccgaaagagcgggggaatgcagtatgcggctccatttgcgaagggagaaatccaggagcctcggaggttctaaaggaatcctttttgccaaggagaggaggggtgactgttcagctaagacttcaaaaccaagtcgcccgcccccctctaacttctctactctgattgaggagctcccagaccggtcatctcgttttctttgttttaaaatcctttaaactaattttgccggagagcagggcccatttgaaacgagaattaggaatccaacggcaagggtgggagccccagttggtttctcccctcctctctcttcatcttttctagactttccttccagctgttgtcagaatgtccaactggaagttctgtttcctcttctcttccccctcctccctcgggctccttcccatttgctcttgtctacccaccaaacacccgttgttaccccaggctcgcctgtccatcatttaaaatgcatttttatggaaatgtgtgaattcctggaaacatccgatagggcagctctgggggtgcgggagcatttgcacgccatgagtaccctcagtgcgggggaggcggggaggccgcagcctggcacggacaccctagggctgattggccctgggcagctgcaccgtgctcagcaacccagacccccgcagaggcagccagcaggttgctgccaggccctgagtgaacttggggagtctggcaagcatctccgaggcagcgtggcctgccaggccacctggggcctgaaggttgcaccctggccttgcgaagctccttccccagtgtccatcccacgtgctgtccttcccctgcaggcttcagagtgctggctgggctgggatgagaaacgacagttcccacagctgctcccaggaaaattacccccccacccaggacgggaatggtgggggaggaggtgctgggctggcctcctggccactggacgtggctctggtcagagtgtgccctctgtccggtgtgtctagggcagggtggggaagcctcttctcgctggggctggattcctccactttttcttcattggaggagtccttaccaaatgttctggctaggcacacatctgccaggggtcctccccgagtctcaaaaaatcaaaccccacagtctacctgccccccgggaaaatagggctggtgagagtttgtgggaagtcttattgacgcttacttggttttttggggggagaattttctgcaactctggaaactctgatgatcaccagtcaggaaagggagggtccaacgactctgggtctcctgaacatgatattggggggaggaggggccctgagctctttggttcctgcaaaaccatcccaggttaatggctccacctgtcccatgaaagccaattaggcggcttcctgagaagtattttctgaattcttgggactctttgcctctgactgcctcagtataaatggccccaagacgctgggcttcagccctgtgctttcctgcgacccagaccccaattcgtggctgcaacagagactctgggaagcagagcgtcacctccagggcgcctggcgggccggtgggcagagacctgccctcgcagggtctgcgggctgggccctggggttggctggaggaagaggaattcgtgggtcgctctcctggaaaggaggaaggtgagaggtggagggaggaataggagaaagagaaataaatgaagagagagataactagagggtaccgggccccccagagtggacccaaacacgaaacaactctgggaaagcggtaagaggggtcaccgttcaaagggccggggaagctgggatggggctgcagaaagttgagctgcccaggggctgggcggtgctgagttctatacacacggaactccgcaaggtgtttcaggaagcttcgagaagcgcgcatgaggaccggcctcggccgcctgccccagctgggacggcgcctcgcgctttctggggatgcggggcagtggcgtgtctctcctctgcgatgccagccccggctgccgcgctcccgcgagcccagagcctccgctttctcccccgaacgaccgccgccctcaaggtcggcctttctgtgcggatcagacgagccctctccggacattagtttctcccgggatggaaagtggggcactgacccgggaaccccgttttccctctagcttcacccaggaatcggagagcgcccgcgaccacccgcttgcggaggacggtcctccatatttctcaggctcgctgcacaaagaggggcctcggagagggcgagcaggaaagcagcttccagacgccgtgcgcttcaggacacggacgctagttttgcaaacaaaacctcagtgaagcgccccggagacaccgggcgcccggatgccgagccaggctcccgtttttatctgaaaacgaggccagagaagggtgacttttccggcccctctgcgtcccctccactcgcctcgcttctctagcttgacgtggtgacacttggaaaaatggactcaatgaaagccgttcgctcgcggcggtctcgttactcgcggggcagagacgcccaacaatccctgagagcgagatctccacctcagccaaagcaggcctggccagccctgcgccctcggctgggagccgagccccgcagccaagccccaggcgccgggcggggaattggggccgataggagagcaacaccttccccggggcgagcagagagccaccgtcggctcctggggctgacgttccgacccggcctgtagacaaaggccgaaacgaaggggcgcggggagcaggggtggggcgggcggggccaacgggcggacattgcgtgtctgcgctctcctctgggcgaaggaggaccggcctacaggcccaccgggcgagctcggggacggggtctgggaggctgggtctagggtctgagacttcttcagaataacccccggaaggagggggttaaatgcggcagcggcgggcctgaaaagggccaggagcgtcgtaggaactggggtgcacaggccctcgcgtgcccagcgcttcgcctttccccgccccaggcctgccaggggcgcgcgtggcgcgggcagagcctggtgggtgggttggcgcggacagaagctctgccggggagcggggaggggggggcagtcgcattgcacgtcctggttctgccccgatcgctggagaagcgc

SEQ ID NO: 5682 - DNA, 5566 bp, Homo sapiens; identical to SEQ ID NO: 5681

SEQ ID NO: 5683 - DNA, 1164 bp, Homo sapiens
cgaacgcctggaccccagcgagcgggcggttccctggcggcggtgaccaccgttgtgctcgctgcctccacgcggcgcccgtcaaccccacgtgctcgcagccgcgcggcggggccgggcgcccggagctgacctcagcccccaggacagaaagggtggccaaacgcagacctggcaaccccccgagtcggcgaccacagattgctggtggctgcgccacggtttcgggagggtcagcccctcgctgggttctcagggcactaagaaaagaggggcatgcgagcctggaagctggagagagtccggggctccccagagcgggtgggacgccgcgtccccaggactccgcgccacgcgtactttctccaccccgacacccactgccactcccacagcggagcgaggggccccgccgagggcgagcgtaccccgtgcggctgagatgcccggaacgcctccccgcgccccggcttccccagaaggggccacagtcggcccgcgagtccccgggcgggggctgagccgcagtgccaaccaaggcgaggtcaccttggcccgcgcgcctttcattccagggcccctccggcagagaggtgactgcaggtcaccgccagccgggcccttactccccgcctccgccgtcccggcccccacaccccggaacctccccggcggagcctgcgagcccgggaacgcggtcccagccagagtggaagggatagcgcgggaacccggcagagagaaaaagcgggaactgggcgccgccgcttcacgatcgggaggagattccctcccggcccctcctggatcccactccggggaccgtttcggggctagagcccaggctgggagagtccctgggcgcatccaccgccccttccaacttccttcttctcatcctcagttcgggtggcagtggccacccgccgggtctgcaggtggaggggagtttgcgcgcaaaacttacggtcggcggcggccacccctccgcgggaggcggtcagactctggagccacacggccagagtcagcacgagcagggctttgctctccatctcggggcgcgtccctctggaggagctgcaaggcgcggaccgactgatgagccggctgagccggaggctggagagggctggagccgcggtttggcgctgagcaagtcgc

SEQ ID NO: 5684 - DNA, 1495 bp, Homo sapiens
cggcgcgcactctacatcgcttgccctgtgccccaaaacgccgaagctaacttcccacgcggcctcttgctcgaccacccacttctgcgctgccaggcacaccgaggggaccggctctccctccaggcggcccattccagcgtttcccgctagagggcacacggcccccgtgcaaagcgcttatggcgcggggcacgcgcgcacgcagcctcgactcctatagcccaggtcccactcccgggctgggctcagccgctaaggcgctggggaggggccgtgccagggagcgaagcgctcccgggactctgggagggtgcggccgggactgctgtcccttgccctgagctctgggcgtaggcgcccggtaggactcggcgcccaggtgagcggcggcccccaggaggggaagcaccgcgcgactcaacgggcgctcagagcgcagggcgaagaggacgggcgagggagagggggagggagaggccacggcatccgaggaggaggaggagtaggaggagcaggaggaggatcgtggggcccgggccgcgctgcgcacccacctgggctctggctgcccgccgcggactccggcttcttgccggagcctcgctccttcttcttgcccttccctttgcctctgccttctttgcgctcggacatctcgccggagacggagcgctctacgcggacggctctcggcgcaggcgagtttggtccaagggctcggatcgggtttgggaaaagtttgtccctcgagggggagagcgagcggccgcgctgaggcgctcgcgctgcgcgggggcgtctcccgttgcctgcagggagcgcggcgcggacgcggcgggcggtccggccacctggaacgggcgctcgccctggctctcggggctgctcctgtcgccccgggaagtcgtcgatgggtcccaccgctggcggctcgcgtcctggcctctgcccggcgccctcgcaacccgatcggggagaggttatcaccgtcctgctcacgctcccatcgtccggcagccgccgccgctcagctcctggcctccgcgcgagcccggagttccaacaagtttcggggaactcctcgccggctctttttcaattgccccgcagccacccacctcccgcccgcaggttggaggcaggcgcctccttcgcaccctcccctggcctcgccccctccctcttccccaccacacccccaccccgaggcgcggacacgccaccgggaggagcctgggctcggcgctcccgggcgcagccccttttcctcccgcgctggccgggcggggggtggcggcgcggctgccgggaacccccgacaggggtcgctggacgctgcgcggagaccgaggccagcgccccggagacccgggaacccaggcggagacccgaggctctcgctgcccgctcccctccgcagccaggcagcgcctgggagggctgctccgtcccattccacgcggaaaaggacggcgcagagaaaagtttgcga

SEQ ID NO: 5685 - DNA, 352 bp, Homo sapiens
cgccgccgctggtgggtggcggcggtccgggtgctttctggattgcgcagtaaagaggcatcttgggagatggggccaaggttttagggggtgccactcgcgaacggttcatccgctagactaggggggctctttggctgtgcgtctggccagaactggccttgacgatggaagtttctggaaccaaagcgttgctttctctcccttgtgttatagctggagctgcgggagcgcctgccctgcccggagcccgcggtcccctctcggctgccccgcggtggcgtcacgcgcccctcccggagcaagcccggtgcgcagggccgggggcgtgggcggctgctgccagaggcgc

SEQ ID NO: 5686 - DNA, 1141 bp, Homo sapiens
cggggaccaggcggtgtgccgctcgggcagttagtgggccgggcgagcctgcggggctggaggggacgcggggctgggaggctggggagctgggggctgactccgggcgggcggggcggggcagggacctgccggcctggggcgggcgcaccagacgagctctccgcccgcaggcccccagcgcccagccgcgtcccggctgcgtcccgccggtcccgccccgccccgccccgcagagccgccgccagtagtgggagacgtgcgctgagaggcgggggctgcgctcggcggaacagcagccctcgggcggagagcggggccggggtccgagagcaggtgatgccaagagctgagcgggactcgtgagcgcgcggttcagcacctaccagggcgtcccgtaaaaaacctcgccttcgcctgtctctgggaaccataggtaagctttgggctttcgaggtgcagttctaggtagagctccgtgctgggaggtgggaagggggcttgaccctggggactcaggcagtctggggacagttccaccaggggccggtgcctagaattggtgagggaggcacctcaggggctgggggagaaggagcgagcgctcttcgcccctctctggcacccagcggcgcgcctgctggccggaaaggcagcgagaagtccgttctccctgtcctgcccccggcgacttgcggcccgggtgggagtccgcaggctccgggtccccagcgccgctggccagggcgcgggcaaagtttgcctctccgcgtccagccggttctttcgctcccgcagcgccgcaggtgccgcctgtcctcgccttcctgctgcaatcgccccaccatggactccccgatccagatcttccgcggggagccgggccctacctgcgccccgagcgcctgcctgccccccaacagcagcgcctggtttcccggctgggccgagcccgacagcaacggcagcgccggctcggaggacgcgcagctggagcccgcgcacatctccccggccatcccggtcatcatcacggcggtctactccgtagtgttcgtcgtgggcttggtgggcaactcgctggtcatgttcgtgatcatccggtgagcgcggggacagcgcagcgctgggggctgggcgg

SEQ ID NO: 5687 - DNA, 3297 bp, Homo sapiens
cgagacggacaggaatcgaggagattcccctgtagcgctctccaccttccggacagaaatcctgtagaccacgttcacttctccactccgtgcatcgcccgtggcccgtgggcagcagctgctcccctgggatccccctcgcctgtccgcgagctctcgcacggccgcgtccctgctgctggggtcgctcgctggccctggctgctcgccaggattttcctttgatgctgtcaagtccgggaagctcacgatgcacctcagtgcccgcgcgccgcctctcccaaagccccttccccactcactcccccacaagcgtggagggagatggggtaggtcgcggcgcctatagaccccctcccggcgcccactctctctcttccacttctctagcagcggtagggccgcagcgcacgcaaacctttccccaaaacgcccaccccactctcagctagccgcttctctcagggctcctccgcccgagctgggtgtggggatcgccgcgcacacagagacgggaaagccaccccggtcccggagcgccgcttccctagaggcccctggcccgtccgctcccccagcgctggaggacagccgcgcacacagaccctcccctccaacgcccaccgcggtccccagctgcagcctgcacctccacttcccgcccccagtctcccgccctccgccccctgctttccagtctccgcagtccgggcgcccagacttgtttcgacttcccagggcagctccgagggtgcggaagatcaagtgcccgggtttgttccaggaaaatcccggcggcgcctgcacgttaactgccctggcgcaggcgaagggtggagggcacttctctgttcattcggttttcaagagcgtgaacagaggctccgagtgaacgcccatacctagtcggtcttctagggtccacgcgtggggcgtccacttcctcaccctgcccctcggtgcccctgccctggttgcacttctcctaaaaggaggcgctacgattccaggaggctctgtctccttacccttcccagcggcgctcaaaccaccagccccgggcgcccaaccccttccttgtcctctccctatcccgtgagaaagccgacgcttccacccgcctggtctttccgaaatacgcttcgggtggtcaatgcgatttctagggtctaaagactagactcccgcgttccccaccaagacaccgacgcgaagccgcagaggtggaatcgcggacgccctggcaggcccgggacatattgatcctggtggcgcgatgcccctcttcgcacgcggacgcactcgcagccccactcccccaaactcgcactgcgggaaggaacccccgactcgcaccggctcccgccccgcagcaacggcgacaccctgaggtccggacgagcggcgcgcccctcccagcctcggccactttccagcacgaagcctcagggcgagcccgagacgaagaaagagagttcgaggaactgggatactcacgagcccaccgtccaccctgccggccggggaggaagccccggccggctcgcctccgtccgccgtgcgcatgcgtcccgcgggtgccttctcaatattgcagcgcggagggctgccctctctacgtcggcgattgctcaccgcgcctttcgcctttctccggctctcggtctttgctctagccctcttctcccggcctcttcctccccttgctctgcctcctccccgccccctcactccttttacccggccgggcaatcccacgtctcgcctccctccagcggcggcgcactccaccgccgcgggtgctaggggtacccccgaggccccacgcggggcgcgacctccaccccggccgcagccccactgctccagccccgcattagcaagtcccaagagtgtggatgcgaagccaggcgcgcgtagagggcgtccgcgaagccctctgtgtcatcgcctcccctcggcgcgcggggccgagcgagactagagtgtgctggactgcgtgctcggacctcgtgaatgaagggagcgggaggaaggagcgggggtgggcggcaggcatggagggggcgcttggtccccagagcttcgcgtctgtggactgcgcgtctctggagggcagccccctaccttctccccggcccggggcgcctctctgagctctgtccccgccccaccccggcgcagcctaggcctccggtcttcccgccctggaaagcggccctcgccccctcccagctagccagagcgcggaggccccacccagcaaccgagcgggggataagggggggaactaacccctgactccagatcccgctgagaccctcggcagtcgccctccgcgtccccttctccagggactccggagtccggggaaaggagtagaccagggggcagcgggagggggaacccagccgcccagctctccggactcgcagcaccgcgtgtccccgtagcccgcagcgtcccttcgggagtgggacccggtggggccgcggggttagttccctggagcccggagggctaagctgaagctggaaactgacctgacacaaaaataacatcacgtcatttcctcccttgcctgccgagagggcaggggagtgggagagcgagcgctgggagcaggcggaggcgcgtttgggggaggctcggagtaggcggaggagagcgacacgctgagagtttgaaaggcagcctcggggaagagcgagggctccctcccgttttcttggaccatggaaaggaaatggcccaggaaaaagtagcttggagtgtcttcccgcggggaggggcggtgtcccgggagccgccaatgtcccgtcctaggacttgcccagccacgtcccggccttcccgaccttgccaccctccctactgctagccccagcggagcgggtcagttggggttaggaagaatcgggagaggctggtgtcctggggaggctgggtgtggggcgtagtggagaccacggtactcaccggcataggcgagctctgcccagcggtggcgtcttcttccctgggcttggctaccggatgggggggcctcagcggacgaccccccgagggtcggccgggcagtgccagcgccgccccgagcaggagcgagaggcggcccggcagctcctcgtgccccctcgagagccgggcggccggcagggcgggaagcaggggggagaagtccaggcgcctccggggagcctcgggagggggtcgccggagaaggtgagagaagaaccttgcgaggctggaaagcgggctagaaaggaggccgaacagcttcggggcggcgggcga

SEQ ID NO: 5688 - DNA, 2213 bp, Homo sapiens
cgaaggcgacgggtccaggacctgcagaaaccgctgcggtttggggcggtcggggacccacggcttcctggggcggctctgaacaggccttggggcgcagcgtccgctttctaaagaagcctgggatcgggtcctgcctcgctgcaagtcacgcttcccgtgagtccacaagtgcaaaaccagaaaagaatgtttcgcccaaataattaaagagcggtggcccccgcgggggcagcggaggcggtcagcagggtccccgtccccggggagaagtgcccacgatccaagggctgtctgctctaggaacttcttaaagaattacagacactgagagcattcggggtctggtaggaagtgcagtgtatctcccagctttagggtaactaggacagcatgaatcttttaccttgtggtagaataaacggctagcgcctcgatgtggcgcgctcgacttttcctcacagagcctaaaagtcacgctcaaccaaactgcagcgttcccgcctcagctgggcaccggcctggaagcggcctggaatcagactggactcgaggaggtaagacctcggcagcgcgaggttaaccacaggcctcacccgcggcctccagcccggccccaccgcagccggcggcagacaccccaaactctccacacgccgccctcagcgaggcgcctcggggaaagcagcgtgaggcagtgagccgaggggcggggccaggaggacgccccgcccccgagcccgccccgccggagggtttgattaatgaccctctaagccgcctcagcccccggcgtagcctctccggtgggccaggtcctccgcccgacctgccttagccggtcggagcacacacgcctggccgcggggcgcccgcataaaagtcacagccagcggaggttggaaacagccgtcgacttgggcatcggccggacgaggatggagtgaccagcgcggccctggccacacaggccctgctccacgcccctcgcccgccctcacgacggagcggagctccactcagccgctccaggaaaggtgaggggcccgtcagacgcgtactgcgcagctctcgggctcggaacggtggcgggtgccgtaccccgaggtgaggctaagggtcccccgctcctcgggcagaaatcccccctggcgtgaaaggccgagggcggctggtgagccgtggttttccgcggcgtcggcgagaaggagccgcgccacctctcgtgcgtgccgggttggataaagtcacccaagcgcgaacgagtgctgatcctgagctgtgcttccgagatctttcttcccgggtagagtagaccttttgcttaatttgcccctgaaaagcaaagccggcactgcgcctcttcttatccttctaggaagcccaagaactccggagttccgcaactctccccagacgtccggaagcaaatcgcgtcccaggcaaaacgagctcgcttgagagcgcccttagccccgttgggctgctggtgggcgcacggggagaaccagggggctgcgcctctcgggttaagcccgaccgccccccggcctcaccgcaccttcggtcctttgcagcgcgcgcggcgcgggaagctgccatggaccgcggccgcccagcgggcagccccctcagcgccagcgccgagcccgcgcccctggccgccgccatccgcgactcgcgtcccgggcggaccgggccggggccggcgggccctgggggcggctcgcgttccgggagcgggcggccggcggcggcgaatgcggcgcgggagcgcagccgggtgcagaccctgcggcacgctttcctggagctgcagcgcacgctgccgtccgtgccgcccgacaccaagctgtccaagctggacgtgctgctgctggccaccacctacatcgcgcatctcacccgcagcctgcaggacgacgccgaggcgccggcggacgccgggttgggcgccctgcgcggcgatggctacctgcacccggtcaaggtaagcgggcggggcgcaccgcggggctggggccgagaccaggacaccttgatctgccctgccagtcaccgtcttgggtagatgctctaattccttttcgggtgaggcgggaagccgaccgggagaacgacctcggcccgcgagggtactggtggcaaggtccccgccgcgaaagccggctccttcgcggttcacaggtggctggagaggcgtttaaagccgg

SEQ ID NO: 5689 - DNA, 363 bp, Homo sapiens
cgcgggggtcaccgcgcccgcgaacgcagagtccacacgtggattcccgcgcctgtgatgccccgacccgtcccgggtccccgcacagacaatgccgcgcgtccttcccgcagccactccgggacccgcgccccgcgccgcccggacgtccccctgcgtctgccggggacactcaccgacaccaggaactccagcgtgcccacatagtcccgctcggtcttctggagctcgctgagcacgcacacgcgcaggcgaagctgcttctccaggtccttggcgctctcggcgcggctgtctccgcggctgtcctcgctcatggtcggcggcggtgcgcagcgcggcgctgcccgccgtgctgagcgc

SEQ ID NO: 5690 - DNA, 960 bp, Homo sapiens
cgtagaaaacgctgcaggggccaggcgtccgagacaccccgcggggcagtgggcaccaggcccaggctccggctgcagagcggaggggcgtcgggcccaggaaaggggctgtgggtgggggtacgggggagacccgaggggtgctgggaagagggctcccctctccagcgccagccctggtgtcgctgtgcactcggagccgcgcgaagggcgcccctcgacccggaggcacaggagcgtttagagaggaaagaaagaaaaagccaccgctggctcgaatttctggaagccggagccgggttttttgccctaaacaccgaggcagaacccctcttagcgctgccccggcctctctgttacccattttcggtttgcttttggaagaaccggttcctcagccccccgtcgccgcagttgtgacacaagtaagtgcagccgcgctgcccggggcccgccagggtcccccgcgcccgctccccaccgtggctcgcggcggccgcgctcccgccccgccccgctcggccgccccgccggcttctgcctccagttgggttgccgtgacgaggagacgttgttgtgaaactaaatctgaccctgagttcccaggcggcggccgagagcccgcggctgctgatgcccctgggccccaccccggggcaggagggcggcgatcggcgcccgggaagcggctgaggggcgccgcgactctcagcgagcgccgcccgagccccagcccgcccgggcagcctccgaggcctagggcgccgccgccaggtacgcgaaagtcacctggaagggagctgggtgcgcgcaataatggggccttgagccgtggccggcaggggagaggtgcagccgcccaaggcccgtggcgtcgggcgctgcacgtggagggatgtgtcaagggccggtttgttttccttcggggaggtggtaactgattgggacgtcgggggacgg

SEQ ID NO: 5691 - DNA, 1404 bp, Homo sapiens
cgcccgtccctcccaggcccggtgggaccagacccgaagccaaccctcgccaggcgtcaggtgtagaccccaggccaggccagagcagttcctgggtcttcggaccgggatgcccgccctgcccctcctcctggccccgcccggtctgtcacagggggaggcctcggcctcgcattccgggcagcgaacttcgccggccgaggttagccccgtgcgggggcctcccgcgggaccgaccgccaagcggcattgtccgtcccgggcgcccgcccggttccagacgcaggtcctgcggccgccccgtgacaagcacactgacgggccactgtcctttgacgagtgctaaaaagttcgtttgttttgaacgtcaattttcaagtgatcttcacgaggtttcccctcccggttccttcgctgctgcctcgcccgcactcggtccccagtaggtgctcaagaaacgtccagcaaacggcagcgcaggcgagtctgctctgcgcgctggcgcgtttcactgcccacggatggcgggcgacctcacgggatccccggttcgcaggatccccgcccccgaggctgcctctgggccgggaggggttaccccagaggggcgtccactctcgacggcgggggccggggcgccgcgggcaggggagggcgcagcctccaagcagccccagcctggcctagaccccgcgcctagcgagccggccggccaggcccacaccccccacctgccgcccgccccaggggaagggtccccccgacgacgcccgagcccccctcttcctcggagggccggaggccggcgcccattggccggccctgggcgacgccccgcccctccgacgccacgggccaatgagcgcgcgctgtcagctcatcagccgggctggctgggcggctcgggagcccgagcggtggcggagcggcgagcagcgagcagcgcctgcgggagcggccggtcggtcgggtccccgcgccccgcacgcccgcacgcccagcggggcccgcattgagcatgggcgcggcggccgtgcgctggcacttgtgcgtgctgctggccctgggcacacgcgggcggctggccgggggcagcgggctcccaggtaagcccccgaccgaggtggggggcggcgggcgcggggggctcgggcggccgaggcgcggtcccggagggcttcttccccgcggatcccgagctcgccccgcgcggccccgcgccccctgcctctttgcaaagtaacttctagggccggcccggggcgccccctccccgcagcccgggcggccggggctcctgagtccggcggggccgcaccaggggtgggtgggccggggccccgggaggggaagcgcgagcgcgggagcgaggaagaaaggcggcggttcccggggaccccgcgt

SEQ ID NO: 5692 - DNA, 1247 bp, Homo sapiens
cggggggcaggccgcgagagggagaggatcccgggagcagacgaagaagtggagcagctaaagtctgcgtcagaagaggttggggactgcgagaggagaggctggggcctgcaggggagcgcagcagcttttagcatcgatccaaactctaaagactcgtggcctttgcctgacctcgagggtcgggaatagacgcctgtctttgtggagagcgatacccaaccgagaaaatggggctgttccgagctgggccctgcgcctggcccagggcgaggcttctctggctccgggctggcccctgaggggcgcaaacggcaggcctggcggttggggccgaggagggagggtaccaccgccccgaggcagcacgcagcctgcagcagaggcgcctgctccaagctgtctcttgggggcgccgccgccgcttccctcctccggggccgctcgctcccaggaaagtggaggcggctggcgaggaccgagagccggggccgcgctgcggagggaccacacctccgggagttcgagggggaccctggcgcggcgggccagcctttgctccccggccacgggccggcagcgcccgccttcccccggtcagcgcttgcggcccgcgccgcgcgcaccgcccggcaaccccgcgcgcgtcccgcgggggcgctgcgtcttcctgccacaccggcgcaccgcggcccctctcccccacacctccggcccgcaccacccggctctcctcccaccctccccacccctcctctgccctccctccccattcctcccctcccggcgaggggcgggagggggcgtggcggggccggggtttgtgtggctgggacccggctcctcgcactccgagtccgcccgaggagccgggccccggccgctgtccagccgctccgtgccccgcgcgtcctgcgccgccgccaccgcctcctggggagacgcagccacttgcccgccatggatactcccagggtcctgctctcggccgtcttcctcatcagttttctgtgggatttgcccggtttccagcaggcttccatctcatcctcctcgtcgtccgccgagctgggttccaccaagggcatgcgaagccgcaaggaaggcaagatgcagcgggcgccgcgcgacagtgacgcgggccgggagggccaggaaccacagccgcggcctcaggacgaaccccgggctcagcagccccgggcgcaggagccgccaggcaggggtccgcgcgtggtgccccacga

SEQ ID NO: 5693 - DNA, 1861 bp, Homo sapiens
cgctcattgggcgacgtggggaaacaagctccagcccccgaagcgcgaccaaaaggagaaatcaagttcccaccgccagggcgggggagggaagctgggtgccggcaggcgctccgccggagacgagactcctcccggccccagaagcgccccgccagggccagagagggcgagcgtggcgggagggaagcctctgtcccccagcggccaggcgacccgaagccgagcgccgtgtcacacgtaccccgcctcgccctgcttgcggcactcccgtgtaactcctatgaaaatgtcctcccgtccctgacgccccgcggtgcaacctccacccctcaacgaggagggggtcgccgcaggactgggaatccagtggccggcgtcccagcattttcggacgcgttccgtgcctcccccagtatccccttgagggatcgcctactgcgattccacgtagtgtcggttacctcgccctagccgcagggagcatcaaacaaaagaacttttgcaaacttttctctctggacactcgcgggtctcttaaatctggcccccatctccccagaacttgcatgcagtcaaacaggaaagctggcgcgggggggatggtgtgcggaggaagggaccccgaagtttccaggtcatccctggtctcgaggagcgcgcggagtggagccgttccctcgcgggcccgacccaggctcccccctcctgccaccctttcccctccgtccttcccagaccacgcagcaagacccgccgagggcgaagaagttgggagtgacttcaggggcctctgcggctagaccaaaccgcaattctcggtgcccccattcccgcggaccgcggggtaacgccagcgagcagcgcttttctgaggaagggaagagggggaaagggtgaccggacgagcgcatttgtcccagcggatctccggtgtatacttggggactgggggttccccaggtggcgctcccctattccctgcgggctcctctcgtagcttcaaacaccctaaacggcgcgcgcatcctccgcctggcccactcaccgactccgccgacacgcaggccaccaagcccaaggtgagcaggatccacgcgcgccgcatattccccagggaccggctgctcccagccgctgcttgcaaccagggcaaaacgaagcctcctgcccagcgctcggcgcagcccgcgcacacgaatccggagcagagtaccgcagcgattgcggctcaggctcggggactcgggctcggggctcgggggcgctcgcttcctcctcctgcgcctgctcccgccgcccgcagctgcgccccgggaacgcggcgccctctcacttgttggtttctgcactcccgacacggagttggtgctccgggaaggctgctctctgaagctcttcttgctctgctgtggttttgctcctccgcggactcctttcccgtgccgaggttcagtttctggttttaaggaataaattcgctggcttgaaagggagctacggcagaagtttaggggcagagcggcgggagcgcgcgatccgcgcggctggagctccgggggtatctggagagcagcgcgtccaagcggggccactggctccgcggctgcgcccctcctcctcccgcgccgcgcctccctccccgggtcctcctccttctcctcctcttcttttcctctggctccctccctcctgagcctgcttctccgggctcccctgggcgactggggagaggaggcggcagtgtgactcccagataaacccgggagaaattcctacaggattacacgccgattggcagctccgaggaccagtgggcgccgcggctccgcgctgtggctgcgccggctctgctcaccgg

SEQ ID NO: 5694 - DNA, 3044 bp, Homo sapiens
cgccgagggggaggggctggaagatggcggcggacgcacacccacccgaccgcgacagagcttaggcccctagcccgcgccgccgcccgctgctcgcagccactgtgggcagccctgctctgtcccgcgttgctggtagagccgccccgcggaggcgtgggaccagggtggcgtccgcatcccctgccagcgcgccttcgcccgggtccgtccagggagcacctgtgcacggccatattggattctgtgccccagtcactgcctcagcgcggcgggaaaggagagggtacgcacagagcctgggttcagccccagtcccgctggggccccggagccaagatgaccagcgaggaaatccggaaaggcgccaaggaaaatcacaccgcctaaggctcgccaccctcacctcagccggccttggcgccctccctccccgacacacacccctgctctcagacacccctaaaacagcccgggcggccggcgctggccgcagccctcgtggcctgggcgccgccagcgggagggagggcggcgaactggggcgcgcaggcggccgcagggcagtgggcgagggggcggagggcagggagagaggcgggaatatggagccaggtccttacttgagcacggactgctccttctcctcttctttcttctgcctatccatgacggccaggatgattttcctctcctcctccgtgaggtggctgaggtcaggcatctcgggctgcagaggcggctgagaggccgccgggatgggagccaggcggccccggggcccgacaggagccgacatgtttggtggagccgaaccaccctagggaagcggggaggcaactccactggcagcggcggcaccggcgcggcggctggggcagcctccagcgctgggacaaatacatacaaatcaatggccttcaatccaaggcgacagcccccctcccccaagaaaagcagggggaggggagggcgagcgcgtggggaaggagggctgaggagtgcgcttcgggaaatgtttcttcttcccgggggcgaagggctgtgaagtgagcggttcaagggaaaggggaactggaggccgggacgcggagtgcgcggagaggcgggggagggtggtggagtaaggtggcggggacagctaagggtggggtgactggagggagcaggcgggagggcgacaggcggaccggggcgcgagtgtgtccggccgcggtcagggccgggagcgcgcgcgccgcctcggaggggaaggggtgcctgcgaacaagcccccggggaactcgcttcgagcgcccggaggcggagtactgccggcccgaggggcacccaggcgggagccgagagggtcgtgaggaagcgaggacggtttcccggagaagcaactcatccgtcccgccggctgacgcatcacagggctcccgcgcgccacagagggagaactcctccaggcacacccgggagcgggccgcggggccggaaacccccgcggagaccccaaccccacccaccccacccccggctagagtggagaagcgaaagcggagaagatatgacgggggctagcggcggagagtcccggggccagggcccttcggctgccaacgcccggatccaggcgagctccgacgtgcagcggggtctggcgccggcccctcctcatcacgcgcccggcccagggtcgctcagccgccgccaccgccgccgccccttgggtcgatggagtcggcgcggaaggcccgcgcgccctgcgccgccgccgctcagtgccgccgccagcacctcctccgcccctccgcctcccgggctcatcccgcgggggcggcgtcacctcctcgctgcccaggcccgggcaccgcgggcgccccgcgggcggcagccgcccctcccgagcgcgatctccaggctgggtccggggccgggcggggagggaggagagactgagcgtgaagggagagggcgcccgagttttcggggacggaagtgtggagaataggagcgtgtgagggggcgcccgaggtgtcgggggcgggggaagagtatgagcaggggtgggggcaggggtgccaggtgtagcaggtagggaggtagaggcggcgagtgggggcgcccgagggaccggggcggggcggggagcgtaagggtggcaaggcgcccgagagtcagggctggagctgaaggtgggtgacagggagggggcgcccaggtgtcaggacctgaggagaaagagtgcgcgtagcgggagggccccgaagtgtcggggcgggatcctggaaggagggagaacgtgaggagggaggaagggtccctggggtgtcagggatgggggccaggaaaggggcagagagctggaggcccacaagtggggatagcgggggagggaggttggagcgagtggggaacgcaggtggtgtcgagggcggggacagggcgaggggagcggggcgtgaggaagttgtgggaaaccgcgctggacgctgagaatgtgcggaaggatcctgaggggaggacgcgagacagcgcgaggagagacgaggagagttagggttggccgggagggtgcgaagatgaagcgaccactggaggctgtgagggtgaaaggagcaagaatcgtctagagacgggctgggccggtgctggggccaaaggcttctgtctgtcaggccctttttggcgctcactctagaaagaagaggcggagacgcgaagagatcgggttagagtcagattttcgaagcacggagatgggttcaatgaaaggacgaggaaagacgagaaaccagcggccggagaacggaggtggccgccgccgtcctttgctctgctcggggctgggcgccgcccggagagccctcccggagggggcggggcggggccgggtgaacagagctgggcgggctcgccagctcttccaggcgccctgggcaagcaatgtgggtgactgagctcgggtgtgtgtgcctgtgtgtgtgtgtgtgtgtgtgtgtgtgtacgtacacaagtgagcgtgtgtgcgcaccccacccagccttccacacgcgcgc

SEQ ID NO: 5695 - DNA, 1603 bp, Homo sapiens
cgacttgatctctgcgagcgtgcctgtttcggaaggtgtctcttgacccgccgtgtcctctaagcaccatcgggacccccgggcacccgggggctcagggccatgcactcccctgcgcgcccaccgccttgaactcacagcttccgcgctgggaagtgactggcggcccctcccagggaggactccgcgcgccaccagggccagacaccacccgaatccccgctcggctgagcgtcctggcggcgtgagccggacccgcccgaagtcccaggacacgacctgccagccaccagcccgcgcccgcagggcagagacgcacggccgcccgccgcagaggcgcgaacttttacacctactttttgtttcgcttcgggtttggtgtggctctggcaccgcccaggatcgggaccctgacgctctgattttccaccgcgtggggaagttacctccctcgccccgaggtctcgaccgcccagcttttctgagaagtttctaccctggttactaaaagtggttcccaagagtagtcccacgtcaatcgcacaaagcaatgacaacaacaataataagcgtctaaaggagcgggactgcccctccggctggacgacagcgccggggactcgcagcgtgcgcgggtcggaattaaaaaagcagcccgggagcgcgagggctgagcggggcaagcatgggctgctcctcgcagcctctctcctgcccgaggctcgggctggccgtctgtctgtctatgactgtctagttgtcccttcgactgctcaggcaaagtttgagacatctaggggaccgggagcggatctcccctagccccgccacccacccaccgctttcccgtcccgcgcaccccgctcctgggcaataatcccaccaactcccggccccgcgcgcaaacttacgtttgatctgccggggtttgctttgctttcgccgggacatctcggcggcggctgctgccgctggggctcccgcggtgcccgcggtcgcggctgccgctccctcggctcccgccgccgccgccgccgccgccgccgctggccaggctcggcccgccgccggccggactccaggtgctccgggcgctgggctcctccgggagccgcggattcacgttcggagatgagcaagcaaatgagagaagagagacgggggcacagagagtgtgacagtgaggaggggagggggagaggagagcgacggggggagaatgggaatgtacaagcgaacggtcagggagagagaaaaggggaaagagaagagaaaaataacacggaaagaaggaagagaaggagggagggacgggagagcgagcagcgaggagagggggagcgcgggggcgcagggcgcgggaggaggagcgcgctcgctcgcccctcgccccggcgtgcgggacggatactccggcgccgccgccgccgctccgggccgcgcagctcctgttctgcggcgggaggcggcgaggcgcgcgagggaggggcgcgccggggctgtggggaggggagactattccatcagccaaaggaggattggctgcatccaaatccagtccggatgcaaactacggccccggccttggtcgggcgaagtgcgg

SEQ ID NO: 5696 - DNA, 1365 bp, Homo sapiens
cggtctgcatctccatcggaaagtgcgcttgccacatcccttcggatcacttcgtcctcccgagagcgttctgccttctacagctcggaaagaaagaaatcttagctgtgaagtgaccgtggagaaagcgcaggaagcgacacaattggttagggaggcagagagtgtgagcgggcgcaccccttgcctggggaccgcgctcgcgggcggggacggagcatcccagtggctgcacccgccgctccgcgctcctgcctggcgtcgccaaccccgcggcggccgctggaattccagagctgccaggcgctcccagccggtctcggcaaacttttccccagcccacgtgctaaccaagcggctcgcttcccgagcccgggatggagcaccgcgcctagggaggccgcgccgcccgagacgtgcgcacggtaggcaacccacaccaaggcagccgcagctgcggcgcttgggtacaccgccgtggactccaaatggcctaagagcgttcttttagccctgcgctctcagtgcctttagagttctttcctttccccggagcgccggcacaacgcattatgccgctgggtcggagcttagggctcggcagaggttgctaattcactgattataatcaccttcctctccaactcgtccgcagctgcccgctctggattaagccgctccgcggctcgtgctaggcagtgggttcgcttcctccttccctctcttctttaaattgggacgtgcgaaggcgcagctgcctccccggggctctctccatcccccacacaccctgttttcgcttcttgtctctcaggttcgtggcggagagatgctgatcgcgctgaactgaccggtgcggcccgggggtgagtggcgagtctccctctgagtcctccccagcagcgcggccggcgccggctctttgggcgaaccctccagttcctagactttgagaggcgtctctcccccgcccgaccgcccagatgcagtttcgccttttctcctttgccctcatcattctgaactgcatggattacagccactgccaaggcaaccgatggagacgcagtaagcgaggtgggtccctctctgccaaaggtgcgtggtgggcttcaggggtggcgtgtggaggcgctcactcacgccctggctccgggggctcagatggtcagggctgtgctctccaccccagcttttgcgggtccccagtccccacctttaggaccctggagctctacaaaacactctgttttctgtaccctggaggcgcggggagccggagcgagacgcgctgggagctcggcgagccgggcgccaatcgggcgctcagggctaagtcgtgcggtccgcactcatgttcgccgc

SEQ ID NO: 5697 - DNA, 419 bp, Homo sapiens
cgtggcgggcgctgcccacccggcggagccgagcggcgtgcagaggctacaagtgccgtagctggtgattgggggactttctccgggaaccgtgccgggagagcgcgcggtgctggagccgcaccgggtggccgaagcagaaggtgagtggcggggagtgggatggggtggaggctttgaatgcaagggtgagagccctggagcctagcagagctggagcgcatatccccgctctctctccttcgtctccgagtactaggcggacacatccgtacctcgaatgcctcagtgggcgcagagttcaccagaaatggatagccggattcctcggcgcctgctgggggcaccgctgccaggtgcttggggctcgctctcccggctttgctcgcacagggcgcatccagaggtcgcctccccga

SEQ ID NO: 5698 - DNA, 3675 bp, Homo sapiens
cgcagcgaggccggctgcgcggccgccgcgtgggtcggagtccagtgccccctggtggcgccgaggcgggcaggcggcttccggaccgcgcggaggcccgacggctgtgactcaggggtggcgccgctgccagggcggcgggaggcctgactggggttccgtcgtgggctgagccacggcgcaattaattaccagctgctgggaatccttgtcgcccgctcgcggtgactcacccggcagccaggctcacttgccgagcgcgggggccttggtttccaaaatgaatctggggagagtgcctgctcggggtagggctccccgctccctcgccccagggcgcccgcagacccagcgaggacctgacggctcagacgtagcccacagcgcgggctccccttccctggtgggcacccgtgatccctgaaagtggggtgcagagcgtcccagctgggaggcctcggtgaatcactggggtcccagaccctctgggcccggggtccctgaggccagggagcccgagcaccgctccagggggcgacccacagaagggactggtctcctggagcccgcgagctgcccgagggttaggtctgattccccagccaccccttggccagctgctagcctgccgccaggcaactctttcccatctccatcccttccttggctggggtcaggagaggaagaggagcccaggggtctctgaggcttgggtctgtccttttggagctccagggctccaggcgggattcaggaagccgaaggtcaaggaaaagcccctcgatagcctaaagggagagggcggggagggggaggaggtaaaggaggccaaaatgggaaggagataaagcctggagagggctcatctggaagcagggaataggtgcgccccagcccgagcctcgtgttcctaccccaggtggtctcgagggggctatcgcgtggctcagggctgcatccacggcgcaccttgcgcccagctgtggggaaccaaagagtgattatatatatcaaagagtgattatatatatatatatatatatatatatgtgtgtgtgtgtgtgtgtgtgtgtgtgtgtgtgtgtgtgtgtgtattttttttttttccttcagtaaagcaacagagaggttactgggtcgggggattgcgatgtctttccccgctgtcctgactccaaaagtggcggcccatgctgtccttagcgctctccagggaaacgactcgggtctgcaggtgctggcccaagcgggctgtgccgctgggaggcgagggggccgaggcagccctcgggaccccaccactccacgaggccatgtccctggccaatgacacgctcccgcgccgggtggctaggtggggggtggggggtggggaagacttcgtgaaccgctgctgccgctctcctgtgtgcccatggccccctccccttctgctccccactctctgcccaatctgcctgaagctgtcagcctgccatctctggctgaatcccgttttcctcctccaaccccgagtccctcaaactctccacccgccagggctgcttgcgctcttggggagcggggctagaaggacccaagaagccgcgtttatcctcccatcccccgccaaaacccgccggcggctccgcccccgccccctccctggcggctcaggccgcccctcccgggctccctccgcgtgcgccctgcgccgcgctgggtctgcagcgggagctgccacagcagcctcgccagctggctggggaccaggcgggaggtggcgcgccctggaggctgcgggagggagggagggagggaggcccggcctcggcgtagcccggcccccgctccccgaggccctcccgccggagcggggctgccaagcgcacacacacacacacacacacacgcacatacacacgcgcacacacacattcgggctcccaacggcgcgcacgcacgtagcgcccggggcagaccagcgcggcggccgcctcccgggacgcccggacgccggagggccccgacccccgcgcggctcatgcgcccgcgtccgccccgctgctccgcgaggcccgcgggacccctcccgccgccgccgccgcgcccgccgcccccggaggagcgggctggccgaccgccaccgcgccgtcccccggccgcccccgaagccgctccatcgcggtccctgccgtcctggggccgcgccccgctcccgcgccttgggggttgagccgagcaaacttcgcgcaccggccgacgcccggcggggaccccgctgcgcacccgcgcgcccgggtgggcgctgggcgcgcggacctttggggagcgggctgcccctcccgctgcacctgctcggccccctccccgcttgcaggggactccagagacaccgccacttcgcaaacttttcctccccaccaccgagagggggcgaggaggggtaaaaggggaagcaggttccgctgggcgcgcggacctgcaggctccttgctgggcaccgccacccgcgagctggacccacaggggtaccgggccccgcggccgccctccggccgctttctggctccggttcccgtccctgcgtttcccgcgggagcggggggcggggtgcggagggcagcaaggcccgcgcggtacccagcggggccgccctgcatggccctgcgcagtggggcgggctgcttcggccgggtctggcgcagggtgtcggggttcccggacgcctggccccggcgctcgagcagcctcctgtgcctgtccgccttctcggctgagcccgggcccgcgccgcccctgccccgccagccgcctcgcggtggcggtggctgtggcggccccagcggagggggccccccccagcctccccgccccccgcctccccgctgctgctgctgctgctgccgccgccgcttacaacttggaggcggcggcggcggcggcggaggaggaggcggcggcggccgccgggcgctgcagtgggacgcgcgcggctgtgagcctgcgggacatgccccccgcgccggctccttgctggcggccatgaagaggcagaacgtgcggactctgtccctcatcgtctgcaccttcacctacctgctggtgggcgccgccgtgttcgacgccctcgagtcggaccacgagatgcgcgaggaggagaaactcaaagccgaggagatccggatcaaggggaagtacaacatcagcagcgaggactaccggcagctggagctggtgatcctgcagtcggaaccgcaccgcgccggcgtccagtggaaattcgccggctccttctactttgcgatcacggtcatcaccaccataggtaagggctgggcgcgccgctgggctcccgcgccccgggaggagtccggggaggcggctgagcgcgccgcgccgggctgggtgcagggcgtcgagggttaaacgcagcctcccttgggggccttcccgcagcgccccctcctctctagggagccccccctccgcggcgcctccgagcctcacccttcggggaccccacccggtgctctccaccgcgctggtgtctgggccgggcgtgcgagccccgagcgagtgtgcctgagccgggagggcggaggcgccacttttgcgaagagagtggagcgctaagaataatcccatagcagacacccacccacccaccgccccggcgcgggctgggctgcgcgg

SEQ ID NO: 5699 - DNA, 3675 bp, Homo sapiens; identical to SEQ ID NO: 5698

SEQ ID NO: 5700 - DNA, 3378 bp, Homo sapiens
cgggccgggccggcgaggggggctccggccgagacgcgaggcgcgtcacgggacccggcggcgggagcggacggcgagcgagcgagcgagcgggcgggcgggcgggcgggagggaggtggcggccggggctgcccaagatggggccggagccgcgggccaggcgcggaggagacggaaggggcgggcagggccgcgcgggcgcggtgcgggcgccctctcccggcagtcagcggcagcgcgccggccctccgccttccgccactgcggccccgcgccggccgcctgggcctggagccccgcggcgtccccggaggacgggctccgcgccccacgacccactcccggaggcggggtcgggccgaccgggggcggaggacgccgcaggaggctgctcggaccccgggcgcttgctaggccctccctggggcccttcatgccaggccccgcggctgtgtccgcaagcgcagatggtctcgggactcgggccaccctgacgccgcagacccagcacgctgcggaccgggcacgttggatctcgggacaagtgcggagggtcgggggctggaagggatccgagagcagagcccgcgtccccatttcacggacgcggccaccgaggtccgagaggggccggagcctgcgggagagggaagggcctccgagggctccacaacttggctgcgccccctccctagcccgggatccggatgagtgctgcctgaggccgaggcgacgaatcgccctctatccgcccctgcgcgggaccccggcaggaacaagcgcccgtccctgggatcggaggcggcaaaccccaggctcgagccccccagcgcagcgcccacccgcggagccgcgcgcctctctggcgcatccctgggcttcgcggctcggccctcagccgccgggtctcccgggccagccttctgccccccagatcgaggcgcaacaagtctgaaagcagcgccaaggagcagctagcgagccgaagggagggcgtggggcgccgggcgctccgggatccccgaacgcgcgcaacgtccgcctccggggaccgggcgcgggcggcaggcgagcgggactgactcggcgggctgcgcacacccccttccaaggccccgactgtgcgcggacgggggcgcgcccaggaacccccgccccctccttcgcctgcttgaccttgctgggtactcaaagccggactcggcggcaccccggcgtgcgggcgcagagtttcgctgccgcccacgggagggagcggctcgacctccctcgttgcctcctcggcagccggggtcgcagacgagtggaaggcatgagggttctaggagacgtgacagtcgcctccccagaccccacacaccgtataccacctccctcccagatagaaaagggacccagctcccctttcccccgcctccgcccgcgcggcctctgctgttcccccgcggcggctctcgctccgagggggcgtgtgtttgtgtctgtggggagagtaccgagggtctccgtgggttcccaggatggagcgggagagcagacctcccagctccctccccaacacaaacgacaagcggctcctctggggcgggagtgcaggccccctacccgcccacacgccttcctgcctttcaactactccggagttgcagcccaggaatctgcgccccagacccggaggaagaacggggaggtcgcggcggggacgggtgctgaaagagggctggcttagggctcttcgggtcccagcctaggcgcctgcgctccaagaaacttagaagcccaaaataaaagtggaaaggggtaaggtgcccagcggcctggggctggggtgccagattaggcgttctcttcaggctgccggggagtggccaagcaggagccgccgcggccaggaggagggacgcgggctcggagccgcagcctccgtcaagccctcccggtcgcatcgcttcgcggtgattctcagctccgccgccccctcccgaggccggaggagctctctacctcgcccagggggccgcggggacctagggagagggctcctggccgggtccagagctcccagcctccccaggagggggcgggggccgtgctcgttcctcgaggcagctccgcgcggctccaagctagcgcggcgacggtggagggccggcggcctctgctcaccggcgacgcggacccgggagtgctcggcgcccgggagtgctcggcgcttggagcggagacggcatagggccggcccaaagttgagagcggcttatccgcgcggcctgtccgacccagtggaaaggtagacaaggagggaagagccaggcgttcgcgtgggggtggggggcgcaaaaatagccctccgcccgaagtgggggagagtacctccagggagtctccactgccaatgccaggtctacaggcgagggcttctacgagcgagggcttcgagaaggagtctggggttttctcctgcctgccccgagctctgtgcgtggggggaggacgtctcgggcccttacaatgtctgtagggggccctggacgtgattagcaggagggggacacgctcgggggctctccggagcctgctgcgtctatgtgtggctgttgggggccatggggggctcccttagacccccgccagcgtctgtgtgtgctgggggtacagcgggaacgccctccccagcctgccctgtgcatgtgatgaagaggggtgccaggctgtggtgtgtggatggggaggaggcggcggcgccgaggagcctctcctgcgtccagggtcgccccctcctcagcctgcccaatgcgggctcgcggggacctgccacattccatcgccaccgctggagaaggcagggggctgagggggtagggggtgggggtccaaactcctgagctctgagcgcaaaacctcggagctgcgaagccccaaacggcgaagttaggaagtctgggcgcccgcccctcccccgaccccctcccaccctcgctgcgcccccacccgccgcgcccccagccccccgccggagccttccttaccttccccagcagcagcggccccgccggcgaggactcgatccggcgagttgcaaatccccgcgagcgcctcgcgtcgccggcggctgagccgggcgcccgaccggaggtggggggggctcctccagccgccgccgcccccggcccgctctgggcctcgccgggacgccccctggagagcacccgccggcgcacgcaggccccctcccgttcccccgcgcctgctggagccccccgggcgcccggagggtccggatgcccgcgctgcggacgatgctggcgcgcgggcccgggccgggccaggacgcggcgcggccgcctgtgctcccggctctccggctccgcgctcgc

SEQ ID NO: 5701 - DNA, 1108 bp, Homo sapiens
cgggggtcccgactcctcccaggcccgtctccaactccacactgccacccgctcggcgcccacccaccctctccagaggcgcatggaccccgccggccgggccaggccacggcggctgcgggccacagcgacccctccgggacaggacgggtgcgggccctccccacccgcaggcccgccggcagcccccgcccgcgcccctgcccggcgcccctcccgccggcccggccggggtctcaccgcgtcggcgctgagctgggctaagatggcgaaggtggagagccggtcacagaggcagcgcgtccggagggcgtcgaggggcaccgtgcggcagccgcgccacgaccagggcccgagctgcgggggggcggaggaggagggtctgggggcgggcgggacacgggagggagacaggcggagcgtcagcggcggcggggacgcgggcgccccggcccccgagcggcggctccgcgccccggccccggccccggcccgccgccccgcacctgcgcccgcagccgcgcgcccgtccgcccgccgccgccaggccccgcggcccgggcgcccatgccgcgctctgcgcccgccgccgccgccgccgagagccgcggagcgcagcccgagggagcgccgggcgggggagccgagcgatcgggggcggggcggggggcgagagctggcccggggcccggcagtcgcccgccccgcgcccccgccgcccccagctcctccggggcccgcgcccccggcccgcgcgggaaggagggggaggcccggaggggcgcgtgggcgcacgtggagcggggagggtgcgagccgggtgtggcctgggggcgcggggcgggttcggagcgcggcgagggtccgctccggagctctccggccccgcggcccagggcgccggctggagctgacgaccttgggaccgctccatcccccacatccacctcccccgggcctcatcacccctggtgcctgcggctcatctcctgggacagacacagccttccccgcggggaggcttgccgctggaaacttccctctgcggtctgacccagccgcccgctgtctacgggccgcgactgccccgcttttcatctgagcacgc

SEQ ID NO: 5702 - DNA, 1700 bp, Homo sapiens
cgaacatccacacgcacacacacactcgggagcgcacggacgagctgccttctccaaggccactcaaacgtcccaaccactctcgggcgcgcaagtccaagcgcgggagccaggacttaccgccaagacgctctgggcgaggaaccccacggtcactgtccccagcagcagccacctgcatgggaaagggaggaagagagacgtgaacgtgcgggcccggcttgtcagtccccgagagttacaccgaagggtccatgcgcgcgtgacccacggggaccaggcagaaagtcgcttaccgccgtagggcagggccggccaccgcgcgctggtctctccccatgctggcggttcgtccactctgggccccggtcagtcccacttagcctagaggcgacagacaaagcgagtttagcgcaggatgagggaggcagcccatcctcaccgccggtctcggtccgcgagacgcggggacagcgcggtgcgcggcccgcatgcaggggtgaccggagggccgtcccccccacgacccggaaagaaggagagcctcccgttaggcccctgtgggtgctccttggccgaggagctcggtcttcgctctcccaccctccccctttctactcccaagcaggagagcgtgcagccctagcctgcacaaggcgctccaagtcggtgctctcgggccagggtctgggcgccgctcgggggtcgctctcacctcgggctcggcttcaggggctgctgcccgaacgcattggcccttccagaagcacccgccggcggcacaccggcagggcggccggccttgctgggctctctgggcgccggccccgggggctcgggcggcccctttcggtcctcggcctggatccgcgaacgcgcgggcgcgaggggttgggacgcgggagcctcttgagtgcggagcgcggagccctggtgtcccggcgcactgcagccacactcccgggccgcgcgctcccgccgcctcttacccgcgccgcagggtcctcccctttgaggcgccgcccgcgcaccgccgggggggagggggcagcgccaacaaattggggagctcggcccgccgcgctcaggtctccgcttggagccgccgcacccgggacggtgcgtagcgctggaagtccggccttccgagagctagctgtccgccgcggcccccgcacgccgggcagccgtccctcgccgcctcgggcgcgccaccatggggccccggctcagcgtctggctgctgctgctgcccgccgcccttctgctccacgaggagcacagccgggccgctgcgaaggtgagttcccggccagctccgctcccggcgtcccgccccgagcttgggcgccccgagaggcccctttgtccgcgcctggacccgtccgcctgcccctcgggggtcgcgcgtggcacggccaggtgcattctctgggccggggttcgttgggggtccctgtaggctacgatcgcgcattggtggaccgagcctcctttgttatggtatgggtactggagagttaaggaattcctccggggaagggaggagaaacagcccgcgctgtggcggggtgagggtgcctgggagccggcgggatttgaacccgcgtcgcgggtatgctcggcagctgggcgccttcacccgtcccgggtgcgcgagggagttgggggctggagggccgggagcgcccaccccgcgc

SEQ ID NO: 5703 - DNA, 692 bp, Homo sapiens
cgacccgcgaccgcacatcctgcagagacccggcctcgcccctgcatccttcgtagatcccgccctgtgaccacacccctcgcccttcataggcactggcccgcggccgtgcacgccccgcttttattggctccgctccgtgaccacgcccccgcaaccttgatagactccacccccgaggacccttctcaggagcacagtgaccccgcctccacagggtccgctccgccacactgacccttccgtgtcgctcgcgggaccccacccctgtccgcctgctccggtgcccatggggaagcctggtgccaggggtcaccagtcagtccaattcaccgcccgactggtgggacaaggacaggtcagcgggtcacaggccggaagtgagactcgcccggccgctctgggacgcgggaagaccgaggcctcggtggttcccctctctcccgcctggctccctcaggagaaggagcggctaaggtaggacccgacaccgcggtcgtacccgccttcttttctgtcccagagtacagcctgggatctccaggggggagactgaatgagtgctgtcgaggaccggcgagagtctggaacgttcgcgccttcgtaggagaacgaggaggtgacggacagggaacggggagcggccgttgggtgggacgcctgagaccctcgggaaatggccgggtcgccga

SEQ ID NO: 5704 - DNA, 1924 bp, Homo sapiens
cggcggagtaaattgaacgttattctccgatcaaacaggagcttcgggtccacctgtttggaagctcccaggcggcttggaggggtccggccttcgggcgcgacccgcaggggttgccttgcccggctcgcggaacggacgtttacccgtcgcagccacgaacccaccaacgacaccaagcactggccgggcagaccaggcgtcgtggaggcgccccagccccccagccccccgcaacgacgcgtcccaggggtgcgcagtgcttggcgcggtgaccggacccggccgccttcccgaccgcgcagagcgagaggccacaccctggatcccaggccgggtccctgcggttctgggagggaggtcccggacgcctcccagatctcgggcttctgtaaccccgaggccgggttttaaaatcacggctcttccgagttacacggagagtccgtggtcaagggtcaagggcggccttcgaccctcgggatcgtcttcttgagaaatggctgagagctaagcctagagctgcgcagggaagggagccaaagagctggcgccgagcgcgaagggccgggaggcgcggggaggccccttacccgccccactgtcctgcccgccaatgacgccgatgacagcgacagcgtcggccgagtgcttcccctgctccgggtcgtccaggcaccgggtcctccttcagcactcgcagcacgcactgaagaagacgctacggaagtctccgttttccagactcgggggaattaggaaacgcgcccggcgaccctcgggcagtagcaccgggccaggtttgctttcggaaccgctgacgccactcgccgcctttcccgcctgggcctctcgcgggtcgcaggggtggaagcccgacctgggccagggcccggatttcttcctcccggcctctgcgccgccgcccccggtgccaggacgcgctttgctctcgccgagacccagacgcgccgaaagcctcgcgcgggcagttccccgccccacgccccgggctgcgcgttctcccgcgaagcctctgccgagtgcgcgcgacggcgccgccggactcccccggaccgcgctcccgcgcacgcctgaccggagcaccccgcttcacgggggcgttctgcgcgtccttcctccccggtgcgatttccgttctttttcctctcgcggtccccaggagcccaggcacccctcgacgccgctgccggcggaaccgggaaccctccccggggctccctgcgggcccgaagccgccttcccgaggcggcggagttgggcagctccgggccccgcgccgccccgcgccgccccgcggagccggagtttctctccggagtctggacacagctctccgcttcgtcgccgcgcactggaccccggtagcgtggagcctgcccgggaagctgggctgcgccggcctggggcgaaggtccaaggggcgcgggggccgggacgcggggctgtggcgacgaccggccctctgcgaacgctcaggccggcgggtccggggccacaggctgggagtggagctggcggccactggggagtagagaggacgcccaggaacaggtgcaccagggtcccggcggctgggccgagggtcgcaagcagaggggaccggcggctgccagcaagtcccaagcagatgcctccggcggggcagccgcattttacagcgcccattccgcgtacatcgagtatccaaaacgagtaaaatcggtttatacgttggaatgtagcttatgattccaaaatctcatctccaggctgcctagatcacacggccccgtttcattcatttttactgaataacggtcgttggacaatttagagaagcagcagaaaccacgagaaaaacagtggagtcaaacggcggtaaggaccgacaaggctggcggggacattgagcaaacggcgg

SEQ ID NO: 5705 - DNA, 1991 bp, Homo sapiens
cgctcagcctccatccacggagggcgaagacaaaaagcgccccaggcgcgcagggaaaccgcgcaacgctgtgtccattgcagcgacttttccagaaaaacaaacaaggctttccgacaggttacccgcgtaagcagcagccggccgagcctccctttcccgctaacctagcagccagcgctgccgccctccaagatcctttctaatttaagtgcaactcagcaaggagggagagtcagagattctggggacgctcgaggaaatcgaaccccgaaaccctctgctcccaaggcgcggtcggagatttttgggaccccaaagcggagagaattccttaattctctgctagaagagcggggctagagatccctgggattcccttggagtcgaaccctcccctctagcctcacctcggagggcgggagcgaagatcctgaagactcctctagcgcaataaaccctcccaattctgttggaacgcgggctctgggatcgcggggaagcccagaggggcgaaccccggaattccctgccctgagagcgggatcagggatctcagggacccgggagcagagggaacccccgcaactccgccgaaacacagggtgagagatcgtggggaaccccgagccgagcgaagcccgcaactctgcccggcgggcgggatcagacgcgtctccggcgctcccagaccggcgatgtagcgtggccgggagcccaggaccccaagcgccgccgctgtcggcaagtaccgccgcatctctccacaacccaggacccgcatggcaacggccatgctggggggacttcattcaagaaactcgggccccgccgggagcggtggcccacgcctgtaatcccagcactttgggaggccgaggcgggtggatcacctgaggtcaggagctcgagaccggcctgaccaatatggtgaaacccccgtctctactaaaaatacaaaaattagccgggcatggtggtgtgcgcctgtagtcccagctacttgggaggctgaggcaggagaattgcttgaacccgggaagcggaggttgcagtgagccaagatcgcgccactacactgcagcctgggcaaccgagcgagactccatctaaaaaaaaaaaaaaaaaaaaaaactaaggctgaacccgggctcccgcacgcccgcacccacctgcgcggccatcacgcgctgcctctcggcgatcaggttgcacttcttgcactggcagtcgcgccacatgcagaagcgcttgtggcccttgagcggcgaggcgtagccgtggttcctgcagcgtgcgcacttgggcagccgcggggacttcttgctcccggcacccaggtccgacgccccggagccggagccgcctcctctgctgctgcccccggcgctcgagccgctggccgcccccactagcgccccagacgctttgccaaagcccccggctctgccctgcggcggtaccccgggggcgtgaggggcttccgacggtgtagagggcttgctgaatgcctcgtcgttgggcatggtgcccctaggagaagtgcgagcactctggccccctctctcgcctggagactgctgcgagggatgaacccgacggacagcgacgctccggaggaggaggcgcaggagacgtgtgcgctgcagccggaggcgcagctggagtggcgaggtctgggcacgccacgcccggagtggtggggggttgtgccttttcttttggcgcgcgcgcgactcagaactttcggatacttttcagaacattcccgggactgcctgggagggagcgtggccacgcccaccgccccccgactccagccaccgctctccagctgcttgcaaacttgcaccggctgcaagcatccagggctttgctgcagggtccctgcaagcgcaccgagagatacagagcggcctgggaatcgcgtggcacccctcgccccgctctcggaggcgccaagacccggttgccaaagcacggtgcaccga

SEQ ID NO: 5706 - DNA, 1667 bp, Homo sapiens
cgaccccaccgtagtgagtgtgcgcacgtgggttttaattttgtcctgtctcaactccgttgtctccctgctcaatctgacacgttccgaacccttcaacctgggaaggcacctggcgatactgacgcacagtcccgtcgtttggctgcccggaggcgccttccctgcgggcgcgagtgccactcgcgctgggtccagactcagccggcttctcccgggagaggaagccccggcctggcggagagtaggaaggaaagccccgacaggcccacgtcccaaaactttgcctccagtcctcccaagtggagctgcagctggcactccgaagttgcccccgcgcccggccaaactcccgcacctcagacgctcttacctggcttggcgagctgcgcctgcagagccccgggctgcggctcggcagtccaacgcagcgcggcggccgcggccaactcggcagcagggcgcggcggctgcggctgcgacggctgagaggctggcggcggctgcggggcggcgacggcgtcccccggcggcgggggccctggcagagcgcgcagcgagtcggggatgaggctctccaagctctcgttggcctgctgccggcgcagcgccacctgcgcagccatgacccgctgccgctcgatgatgaggatgcacttctcgcaggtgcagtccttgaagcggcagtaacgcttgtggcccttgagccaggacaggacgccatggttgcggcagcgcgcgcacttgggcgtgcgctgcaggggcgcccgtggcggctgcgacaccgggccgcccatgtacaggtagggggagccgtagccgttcatgccccgggctcccgaatgagttggcagcctggctgcgggagagggccagggagcgctggacggcggggctgcgaggcccgctcaggggcggcctccgggcgacgcggcccttggtcccgcagccccggtggtcgtgtgtgctccggggcggccggaggtgccgcagtcgtctctccagctcccttcgcgctcacagctcggcctcccagctcacgcccagccaacgccgacgcgggcctctgccttgggcgcgcagccgggtcggcacgtcctccttcgcggaggcgctgcggcggctgcaaggagccggcgacagctctgattaaggtctgagccagctcttctgcagctccctcgtgagccggccggacccaacacctccgccgccctcccccaacccctcctccttcccaccgccacccccgcccctggggtccctgtctccttgcactccccgccccacgccttcctcctcctttgcgcccctcgggtgcctgcacttcaccttccttgccacctgcagccaggccactctcgcgggggcgctcgcggccccctcctccaagccctctccgctaccccagcccgcggctggagactgcggcgctccagaacgcggcggtgctcgcggggcggagaaggggaggaccagcgggagtgagggtgggggtgcctgtaagcgagtgaggtggccgctccgcttctctctcttctcctccctccagtccagatctggccgcgtttttccgagcccaaggccgcttttatcccgacatttggccgcagaagctcagctccgggagaactcgaacctacgggagtgttgcggttgcaccccgg

SEQ ID NO: 5707 - DNA, 433 bp, Homo sapiens
cggtcttctgcagcctcgggcgcctcaccttgctgaggccgctttcggcttcctctgacccaggctgggcgggaaaggtcgggccgcccccgcctggctcagatcgctggctcacccggcgggcgcgcgcagttgcattcagcgcagcgccactggcttcagtctgcagactgcgctccccttcctagtactgtccgctcaggccccggagctttacgtcctctgattggccggttgtcaggcggtgtgaatactgattggccgaggcacgctggcagggagccctccgcctcccgcggtctacactcttctctctgaagcgctccgccagagtccgcctaccgggccttcggtgcagccggctcgcctgtccagaatctaaacccgaggtatgacggtgcctgcaagagagaagtcaccatttatctcgcgg

SEQ ID NO: 5708 - DNA, 896 bp, Homo sapiens
cggctccacaccctggcgggcggcgtacggagcgtcccggcccccggcaccagccagcgtcggagtgggtaggactggagatggcagcctccggtccaggggaagcgggactccacggaagggctgggaagagggtaggaagagggggcgggggcgggaactgttccgccccctccccctctgtctactttcattggccaagggcttcctggccccaacccacctcccgcctccagggcgccgcttaaagtgtgcggagcaggtgccttgggtggagccacaactttgcgcgagtgtcttggttgagcgcagcgcccattcattgcccgcgagcgtccatccatctgtccggccgactgtccagcgaaaggggctccaggccgggcgcagccgccacccgggggaccgaggccaggagaggggccaagagcgcggctgacccttgcgggccggggcaggggacggtggccgcggccatgcagtcctgtgccagggcgtgggggctgcgcctgggccgcggggtcgggggcggccgccgcctggctgggggatcggggccgtgctgggcgccgcggagccgggacagcagcagtggcggcggggacagcgccgcggctggggcctcgcgcctcctggagcgccttctgcccagacacgacgacttcgctcggaggcacatcggccctggggacaaagaccagagagagatgctgcagaccttggggctggcggtaaggacctccacccggccctccgcggcctcccctccgccctgcccgggctctgcctgcgcggcctcccggctcctaccctgagctctgctgcgctccgcgtggtccccgcaccctgggtcccgggccgtggcgtggaagcaaattcgtgcctttggtcctcgt

SEQ ID NO: 5709 - DNA, 1494 bp, Homo sapiens
cgagcggcccaggagcgagtttaaaaccccgcacaggcctgctcggccgcgtcccctgattggccaaggcgcgcccgccgccccgccggtcgcaggcgtcacggcagccccagcagcctgggccccgccaccgcctccgcggcagccccggtcggcgcaagtgcggcgcgcgctgggggagggggcgcggcggagcgctaggctggcgtcgggccaccgcgggattaagtttctcagtcacgcgtgagtgtctgtgcgttttgatccgaagctcctcgccgggtcgttacttcagaagagaagacagtgagcgtgggcgaggcgaggcatccagaggccccggcgacccctgctccccagtcctccgccccctcgcgtcgcggccctgggcgggcgccgcgagccgggtaagcggcgcttgagccccggcccagaggccgaggcgcgcccccgcgccctgcgcgcgcgccggcggggaaggtgcgcgggcgccctgggctcggcgcttgggggtgggggtgggggcggggatgggggtgggggtgggggtgggggtaggggtggcggcgggccgtggggcggtggggcggtgcgcttgccccaccccgcgcggcccggcgcttcgcggaagccgctgctgtggcttttttaaaaggatggggtctagaagtttcctttgctactcgcaagtctccactccccccagccccgcggtggataatcctagacctttcagcacccccgccacccctttcttttgctctcgctgactaagaggtttaaaagtttttccttttccttgacccagaggggcacagtcttggtgtcggggggctgggggtggggtgttagcctgggggcccggagcgcagaccaggcctccagggcgcgggagcctgttgctctcccctgcaggggccgctcccggacgccccatccgccgttacgtggtcccgggatgtgcgggttgcggtagagagtgggcagcaatgctcctggtcctgcgttctcgccttagccgcggggaccccgaggcgagccgctaattggtaccggtgccccgtccctcacccctggcaccggcgcccttttaaccgccgctcccgttggtgggagcacgttggtcttgtctctcccttagtctcctcaccccccgcgctgatgggcgtctttgtctgcgatttggcagccccaggatgccggatgttaccagggaagcgatgtttgggagacgctttgtgtcttgcggagttgcgcgtttgttgggtggtgatggtgtacatttttgtttgcgttctttgcagaggcacaaaggctgggctattcttgcctgcagtcacatggaaatcaagcggagactgcgggggaggagaagtggccaggcgccggcgggaggtagaggccgctccgtagtcactgggggcgagtgggggcccctggagacctctactgcgcggtgcggcttttgaggtgctccgcttgggaagaccccgg

SEQ ID NO: 5710 - DNA, 828 bp, Homo sapiens
cggaggccacgagtcatcagcccggacggtgaaacctacccctcccctgcgtcccacgtccggatgggagaatcccagcttcctacggcgcatcggggaacaacttcagagcagcacgcgagcagagcccccagcgctcccacgctcacgctcacgaccctcctcccaaccgcgcggcacaaggaggcacttacgcggagccaacctgacagctcccgccggggtggaaacccgcggtctcctcgcaccggcatttcggacacaggtcccgcgtaggcgcgcagctccggaccccgcttctgcttctgctcctgctcctactcctcctgggcaccaccggacagtgctctgacccgcagcccaaccgccggggtgccgacccgcggggacccacccctttgtccctcctcccgcggcggcggcggcgtcagcccgcccccgacccgagcgtggcgcctccgcgctggccgcccggcccgggaaactgtcaaattggccgctaccacccacgcgcctgccggggaagggctcgccggcgccgcgccttcgaggctcctgcggcgaaccgcgtcacgcgcgactcctggccgggggcgggaggcggcggcggcggcaggagaagcccaaggcccgagcggcccgcagcccccacgcctgcacccctccacccccgccagcccgatggttcgctccgcggcgtgcactggagcaagcaggtcccgctccgagcgcgcgcgctctgggaagtgctgcaagtttggagacctggagtgagctccgggcgctgctggcccgactgtccgcggtgtttccccggtgaggtcgcgg

SEQ ID NO: 5711 - DNA, 2705 bp, Homo sapiens
cggggttgttcgtctatttaaataccttccgttccagcaaaggctgagactcgccagctctgcccggcctgaccagggcgccctctccccgtcgggtggtttgggcggttccgggcccggcgtctctcaccccgctggtctccccacgcccgccgggtcccctaggagtgcactagcaccgagtgcaaggagccgcccttgctttcggccgaggtaggggctgtgggctccagcagagaggcaacgggcgaggccgcggccgcggagcacacggtggatggcgccggaggctgctgcgaagccgcggggacagtgagccccggctgcagcgcggacacgggcggcagcgcaggcgtgggcttgatgggcaccggcatggcaggcaggctctggcttgccgagtggcacagggacttgaccgggaccccgaaggccccatactccgggcctacagggactccggctgcggctgcggcggccgcggcggcggccaccgaatccatgacgccaacgtgcggccacacggagctgacgacgttgccaagctggccgggcacggggtagcccaggtggtgcatgacggacgccaagggcagccctccagcctgcagcacgcccttgtagtcccggccaataatgttctcaatggcaaaggggtgcttgaagcctgacgtggacgccgcggccgcggcggcagcggcggcggccgagcccagcccgtagggtgggaactgagacaggcgtcccacgctgcccaccgcggctgccgcggccgccgccgccgccgccgccacggccgccgcctcctgcatcttgccggggtgagacggctgctgaggctgcgactgctggggcggttgctgcgggggctgtgacgggaggtgcggaggcggctgcggagcagtaggcggttgctgatggaaatagtgtaccatgtgcggcggcggcgggggcggcggcggcggcggctggggtgggtggtggtgatggtggtggtgtgcggcagcgtggtgatgatggtggtggtgggggtggtggtggtgatgggggtgaaggtgccctcccggaccggcgcccggcgcgctcttggtgcttcccgcgtgcaagtgagtatggtcggcgcgcagcaccttgaagcgcttgcgacgccgcaggaagctgccgttctcgaacatgtccccgcagtcggggtgcagcgcccagaagctacccttgccaggctggtcgggcctccgcggaatcttgatgaagcagtcgttgaaggagaggttgtggcgcaggctgttctgccagcgctgtgtgtgctcgcggtagtaggggaagcgctccatgatgaacttgtagatgtcgctcagcggcagcatcttctcggccgagtgctggattgccatggcggtcagcgagatgtaagagtagggcggtttttggtcgctgtacgagctcttccccggccgcggcatcgcccccggctcctccaccgccctccggcccgcactggaccacagaatctctccgcactccgttcctggggcctggctgcccccactaattcccactcggcccctccagtcccgccactttgccctctcgccctccaggccctctctgcttctctctcctgccttctccgaattgcctggtgtctccgaccttggcctttcgggcctactcagctctcggaagctggcaacttctggccccgacggttgccgactggcgcgcacagtcgcgggcggagtgcaccaggtttaccgccgccttctctgcgtcttcccccgggtggccaaagactgagtgctggagctggctgcagaggagagtggcaaggggccgtgtttcctcccggcctctttgctttttctaggtccgagggaaacccagaccaagatggctgggaggaaggtctgggcagtagagactctggccctttaaatctgagtttgcgcctgctgtcctggaggccagtgacagcaggacttccagtgccctggacgcaggcccctggccaggcacttagccagaccgcgctggagttctccttttcctggagtgaaaaatcagggtaaggagagagaagattggcttctagggcgcctctcttttctccgaggctcgcagcgtcgccggggttagaagagacgcgcagccctaggctgtcgctgaggagaaaaaactttggtggtttctgaagcggcagcgcccgcaggttctgctgaggagtgtggggcgcaggactctgggagcgagcggcgggctggagagggcgtctgcgaatgctgggtgagtgctggccggggaggctcagccgtccgcgccgcagctgccgcctttctcccgggcttgtcttgaggaggagaggcgacggcagtggcagcgacgcgctctcctggctgcgttttgtaatggtccccgagacgccgagacccccgcagctagcgcttcgagactatcacatgaccgaggctgagggactcagccgccgccgccgcgtctgtagctgaagaaggggcaagaaggcgccgtgcctcgcccccgcccccttttccacctcgtttcgggcgctctccacccatcgcgttcaccactcgctcggcagcccccagccacctcccggtgcggcgggtggcgcaggctgttcgccgggagggggcacagctccgggtgcatttcccgcagctgcgccccacccgggccaccaagcacgg

SEQ ID NO: 5712 - DNA, 704 bp, Homo sapiens
cggtaggggtcgtggaagggcagcgccagccaggcgccatgcagctcgcgcatgaagtccagcatctcctgggagctgccgtcggctgacacgaagaccacttcgaagggcgcgggccgccgcgcctcggccaccagcgccgtatagaagtcgcagagcagcggcgtgaagtcgcggctcggcgcgcaccgggccgccgcgaagtacagtgccaccaccttgttctgcagcgccgcctcggcctccaccgtcgcgcccttacaggtcaccaggtgccgctcgcccagaatgtcaaccatggcgcagacacgcagccacctgagacccgaggacacctgcaggaggatgatcacctgcggggaggcggcggcgagcgccgcggtgccccgcctctgtccgcaccaccgggcgctggacctctcaagacctgccccagatgcgcccacaccttggccaggcctcgcctgtggctggagcaattgtgttcgcgccgacaatgagacactcagacaccagagaccccagatacctgggcgacagcgcggcacccgcctctgggagcggggccagccaggcaacctcaagccctcaggtctctgcaccctcccccaactgcgccccgcccacactcctgcgccctcccaccactgcgccccgcccacattccccgcaagctccccaactgcgccccgcccacattccgc

SEQ ID NO: 5713 - DNA, 950 bp, Homo sapiens
cgtgcaaccccaagcagcggtctcccgggccggggctgcgcggccgccgctgtgctggcttttaacggtgggagggcaccatcctcttgctctgctctcgttctccagaaggctgtcccggggcccccactctccgtcccgctccggggacagtggctcgcctgctatgcgcggcagcccgcgccggggccggcaccagcagcgcccgggcggatgcagcgagcccacggaggggcatgcttccacgcaccaagtataaccgcttcaggaatgactcggtgacatcggtcgatgaccttctccacagcctgtcggtgagcggcggcggaggcaaggtttcggcggcgcgcgcgaccccggcggcggctccctacttggtgtccggcgaggcgctgcgcaaggcgcccgacgatgggcccggcagcctgggccacctgctccacaaggtgtcccacctgaaactctccagctcgggcctccgcggcctgtcgtcggccgcccgggagcgggcgggcgcgcggctctcgggcagctgcagcgcgcccagcctggccgccccggacggcagtgcgccctcggcgccccgcgccccggccatgagcgccgccaggaagggccggcccggcgacgagccgctgcccaggccccctcggggggcgccgcacgccagcgaccaggtgctggggcccggagtcacctacgtggtcaaggtgggtgcgggcgcgggccgccctgggggctgggggttctggggccagttcggggcagactccttcattccctgaagcccggggtgcggggcgctcccgcgactgtcacgttagaggcaagcaaatgcgcactccttagcaatcagctcgcttgacagcggtgaggagggaactacaaatgcgcttttcccgcatccattgggaaaaggtttaccactcgggtggcccgctccgtcccgg

SEQ ID NO: 5714 - DNA, 4861 bp, Homo sapiens
cgcggcctttgcccctcctcctcccgacctttccggggctacctaaaagccgatcaagccgccggttttctagctgttcccatttctttaccgcccccttcctctgccccgcctgcctctgtgccctccgtcacgtcacagcccgctggctctcacgcctcttttggtctctctgcgcacatctcggtggcgtctctggtgccctcacatcactgtctggaatcttgtttggcccacgccgtctgcctctgccccttctctcacctgtgtcgtttgatccctccgactctcgtctctgggggtcttgcctcccgaactctccggctctctccttccagggcgtgcgctccgctcagtctccctcggtctcggtcggccggcctctttcacgtggccccctcctttttggcctcccttccgcctccctcccttctgggtccctccctccggctcagcctaggggttgggggcggcggcgcggggcggggcggggcggggcggtgacgcggggctggccgggcaagaggcgcggcggcgtggggagggggcgcagtcccgggttcgaccggccgagccccgcgcgccccgcccgcgccctgcgcctccgcccggccggccggcgggggagggggcatgagccggcgcccgcgcgccgccccgagctgcgggccggcctagagccccgcgcgggccccgcgccggagccaagccgtcgccgccgccgccgccaaaccgcgggcgcagcagtgggcgccgcgatgcagcggccgggggagccgggcgccgcgcgcttcggcccgcccgagggctgcgcggaccaccggccgcaccgctatcgcagcttcatgattgaggagatcctcacggagccacccgggcccaagggcgccgcgcccgcagccgccgctgccgcggcgggcgagctgctgaagttcggcgtgcaggcgctgctggcggcgcggcccttccacagccacctgggtacgtgtggcggccgcggggtcgcgggccgggcttggcgggagacagcgagctgaaccgcgggggcgccccgagcctcctccggcatcgaagcagccccgggaagctgctctgggagcgcaggttctgggaccgtctctcggagccctccaggcgggaggcggagggtgcaagctccaggcctcacagaaaccaggcctcgtgcccgcgggccgcccggggagggtgttcgctctttccttcactgcttcccttcggcctccagcccggggaccccgagtgagcatccccagtgcaggcgcactgccaggctacggactctcgtgggtggaagcgacctcaggccacgggcgcctgggcttcgccgcagagggatggccgggagtggccgcggctgcccaacccagggaagtcggacctctggggaggaggcctgcgctcccgagggctgggtgctgacgcgggcccaagccggcccggagtccccgggagctccagcgggcgaggaacgcggccttggccgcagtgcggacctgcttcggccttgccttggggccagaggcctgactgtgagcagctgcctggctgtcccttctggtttcaggtcggctgggcctctgcagggcttgaacggcctgcgcagaccttttcagcttctgccctttcttctaatttggcggggcctgctctgccctgatggtgctgtctccatcgcactccaccctcgtcttgtctttccctatctcgctttccaaccgtctgccggtcggcctccctcgcttctctcattggggtcggcctgcctcccatctcccaccttttccctacgggtcctctgccccacatttacctgcgccttgccctgccctttccgactccagccaggctaggactcgcacctcagtgacaggcctgtcggggaagggaggctcctacgctgtagccgggaccccagcccttcaagtcgccttccctgcacccccccacctcctagtcggtgctccctagcctggagacggcagggccagcgcgctccttctaagtccagctgggactcggccattcggctacctttcgtctccatctgctctgttgctactaattcgtttgaagcgggcacacaatcattttaggactgaagaaaatggaaacatctgcatggggaagcgtctgaaaatagaaaacgtgaacaataatttccaggttctcagggtactttggaatttccgggaagcacccaactccggcccagatgactcctggccaccgcatggctgttgtgccacgcacggaagagcaaatgtgcacgctccgtgcatgttctttttctaacgcagcaaggctgatttggttggagcaaacgccatcttcttaggaccagctgccgttttctttttggtttctactttccccgaaagacaagacacactccgagtttctcgcagctgcaaacatgttcatcaggaaccccgagatctcagaggcagctgaggcctggggaactccaggacagaacacggacagggtcgaggagatactccctcccaaatctggggaacggcaacgttgaggagggtctccatctgcgccaccggcgccgaccggcagggcgtggaggttttgcgctgggaggcactggccaagcgcgagcacccccgcggcacgtggtgcggcagtccctggggcagaggagcgcggccgtagctcacccgggtcctcattctctttcttcgcagccgtgctgaaggccgagcaggcggcggtgttcaagttcccactggcgccgctgggctgttcagggctgagctctgcgttgctggcggcagggcccgggctgcccggcgccgcgggtgcgccacacctgccgctcgagttgcagctccgcgggaagctggaggcggcaggccctggggagccaggcaccaaagccaagaaggggcgtcggagccgcactgtgttcaccgagctgcagctgatgggcctggagaaacgcttcgagaagcagaagtacctttccacgccggacaggtagggcggtacaaggctggggccagcgggctgtgggagtgtggtcacttgccttgctgagggtgcgccctgctctttccagaatagatcttgctgagtccctgggcctgagccagttgcaggtgaagacgtggtaccagaatcggaggatgaagtggaagaaaatagtgagtgtgcctggtggcttcccacccctcagcttcctgggccatgccccggtgcatgcagagctgctctcctctttctccccactgagactctgcccaaccccccgattccctcggtgcctggtacgcaccggaatcctctcagttttttctgccccttgggtaagccaacatttcgtcctttcccgcggcaccttcaggcctcctggcagtcttatgctccccaggccgggccgctccccaggcggcatttggacaaatggccgccatttcccgggacatttccccaccatttcctcatatggaccctgcactccttagtcctacctgggttcaagtctcctcgggggtccccagtccacgtgctggctcacccaggtgctggcggtcccccgtgcaggtgctgcagggcggcggcctggagtctcccaccaagcccaaggggcggcccaagaagaactcaattccaacgagcgagcagcttactgagcaggagcgcgccaaggatgcagagaaaccggcggaggtgccgggcgagcccagcgacaggagccgcgaggactgagggcggtatacggtgcggggcctgggatgcccgcgccacccgcagccccctcactcggcggaaacccgcgagccggcccttccgcgtccaagaagtttacttcctaagcctttttattatgatcttgaatgcggacaattggggccaaacgaggaaggacacagacccaaaagccagacccaggtcccagcgcgcttctgggctctaacctgggagactcgcatccagcccggcggaagctacagtctctaccctgagctccgtggcgcagagcgctccacgcgtattcacgccccgctcctcgcctgcacccccaccccgtctggggcctgccctcccggccggggagcctccaggcacacacccgcttctggacgtcggggacccagcggttgggctcaggccacaacggcctgagattgccccggggcaacccgtcggctcggcctggaggccgggtccccgatgtcgctggggcccctaccccctcttgcgaagacggtgactttttttccaataaaatattttatgacacaatcgggctcggtggagcagcttctgaatccgcagggggtgagggtgggggtgggggtgggctcggcaagataagcggaacgcgggcagttgcttcttaaacttcctttcctccggctctgtcgaaggcagctgtgctcttcaccatcaagcccgggctaggcacggcgggcggctcggtggctgcaggatcctaggaatcgcttccactctgggcgtgaggggccagtctgaactccacctcctctcccttgccagccagagagtcgctggcaggagcggtctggccgcaccgcgggtgcccaaaggagcgggagccagaggtccgccgcagagctcgctccggaagtggcccggacagagagccgcctcggttgttgtttcggtttcctgggacttgaaggaccagttcgtgcggtccttgagatggtcttcaccaaccctttatgaggcggatgggaagtcgaggacgcaaggtttggacagagcccccccaccagcgcggtagcccgcccgcgggtccttgcagcagcaatggctccccagagttctcacattttccgcaggatactcagggcggcggcgc

SEQ ID NO: 5715 - DNA, 999 bp, Homo sapiens
cgctgggagccggggcgcgcccctgcctttcgcgtcaggagaaccacctccgcctccggagggagtccgtccccgtgagggccgctcccagccccggctcgccgtctgaagacagcagttccgggaaccgcgacgacagcatcgaactggagatcaggaagttttggtggaaaaggccaaggagtggtgtgcacgcggagcccgggacccgggcggggacagagcgggagcgcgggcgcagcccgttagcgccggcggcagagtctcagccagaggctgcgaggggcccaacaggccgccaaaggtgcttctggccagagatgccacagcgcgcacctaggcaggaggcacaggggacctttcacaggggctgcgggagctggcgcttccccgccctaggccgggagctgagaggggctctagcgcccaggccgactgcgccctgaccgggagccactgcgcccagcgcagcccgagggcgctgagctcggaggatgcggcgcggggcgggggtctcgggagcaacagagactgggatccgagggcccggcccgcgctgctgcccacgcagcgcttccactttggaaagagtgtctcccgcgcggcgggccggcctctccagcgcgcacctggggctgcctctgcagggccacccccgcctccagggaggcccacgctcgccggcgaggaaggatggtgagccctggcccagcgggaaggctggaggaacgcaggctcggaggaaaaagccttttagacctgggccatcaacgaaggtctctatagggactaccaggaccgggacgccgtgggcagaggcgccatgccttctgcgccacctccctggggaccgcgcgttagctcgtggtgcagggccgagccctggggctgtgagcgcgcgtcccgtcttcgtgcgctggtggaaagcggggtgtccgtgcgtgcgtctgcgagcgtgtgtcggctgtaaccgcagggagcgcaaacaggccgttacgc

SEQ ID NO: 5716 - DNA, 1750 bp, Homo sapiens
cgcgcacgcattccagaggccacccagaccatgctccgccgcctgggcgcccaagctgcagtcgccctctgtgtgcaggcagcagctgcctggcaacctccgagcccgctcgcgctcccagcatcgcagaaccagggccaggtgtcccagtggctgcagccaagccaggcattctgcccagcggcggctgcacaggagcagaaccgagaacccgccgctcaaccccacacggggtgactgccgagtgcccatgccagcggccccaatccccctcaggtggaggagtgggcgggaggcacgacctgggggccctcaggctgggcgcgctggcgatcccgaggccgaccaggccatgcacctccagcccgcctgggcacccaagctgcagccgccttctgtgtgcaggcagcagcctccaggcaactctcgagcccgcccgcactccccacatctcagaaccagggccagatgtccctgtggctgcggccaagccaggcggtctgtcctgcagcagctgcacaggggcgggaaccggccctcagccccatccccggtggttgcagagggcccctggctagaggtctcgagctctggcagaggaggagccgggtgggggcagggtctggcgggctctcaggccaggggcactcgcgatccagaggccgcccaggccatgctccaccacctgggcgcccagctacaggcgccaggcaactcccaagctggctggcgcgcccagcctcgcagaaccggggctagatgtcgctgtggctgcggccaagccaggcggtctgcccgcggcggctgcaccggggcaggaaccgaccctcagccccatccccggtggctgcggagagcccctgccagcggccccatctctcttcggaggaggagaggagcgggagtcacggccaggcgggccctcaggcgggaagggatgcgcgcctgcgattccgggatgtcctgcgcgagcccaggagaacccgcaagccagcggcgcctgcgcccgagctgcagccgccctctgccgtccacgcgagctcgagagcggctcccggagtccgggctagcgccgagctgcaggcgcgcgcctaaccgctttgctgggctcacgcggtctgagaggtcggagcgcccaactgctggcacgcgagtaacggcttagttaagctcactcggtctgagaggtcggaggctgcgagtgtcgctgctgaaggctgtggtggaccgggctggatcgcggattctgagctacatcgcggggttgggggtggatcttgggtttgggggtggattgctggtttggtggtggatcttggatttaggggtggatagcggggtggggagggggatcgcggatttggaacttggtcggggtggaaaggccacgaggagccgcggcggctcagtagcgggtggttggcgtctgagaagtcgccaccatgaggaaactcttcagtttcgggagacgcctgggccaggcgctcctgagctccatggaccaagagtacgcgggtcgggggtaccacatcggggactgggaactgcggaagatccacagggtggccatcaagggcgacgccgcggaggtggagcgctgcctgactcgcaggttccgggacttggatgcccgcgacagaaaggacaggtagcgggggctcagcccgcggtgggagggggcccccaggccctgtttgcccgcagcgcctgaggcgggggccttggaggtcgccgggccctggagccgcga

SEQ ID NO: 5717 - DNA, 391 bp, Homo sapiens
cggtgctggagcgaggatgcgcagaccgaggcagggaggcgggggtgcgggaggctccgcggctgcgcgggcgcgtgctggtggcctcggcggaggctcagtcccggcccgcgcccgcggcgcccccgctgcggcccgagcggcctggctgcgggatctgtgcgcacggatggcgcggccgccccggcagcacccgggggtctgggcgtcgctgctcctgctgctactgacggggcccgccgcctgcgcagccagccccgcggacgacggtgcgggcccggggggccggggaccccggggacgcgcgcggggggacacgggcgccgacgaggcggtgccgcgccacgactcctcctacggcaccttcgcgggggagttctacgacctgcgc

SEQ ID NO: 5718 - DNA, 817 bp, Homo sapiens
cgcgcgccgttccctccggagttcccgagctgctgaggagtctggattgtgtctgtccccagtgtcagatgaaagggcgctgaggctcttggccgctgccccgcgcccagctccgcgcacgcccctctgcgagtccggccgcccagcgcctcttcccgcccgagccgccgcctgcgctccggggcagccgctctgtctccagcgcgatgtggcctcgcctggccttttgttgctggggtctggcgctcgtttcgggctgggcgacctttcagcagatgtccccgtcgcgcaatttcagcttccgcctcttccccgagaccgcgcccggggcccccgggagtatccccgcgccgcccgctcctggcgacgaagcggcggggagcagagtggagcggctgggccaggcgttccggcgacgcgtgcggctgctgcgggagctcagcgagcgcctggagcttgtcttcctggtggatgattcgtccagcgtgggcgaagtcaacttccgcagcgagctcatgttcgtccgcaagctgctgtccgacttccccgtggtgcccacggccacgcgcgtggccatcgtgaccttctcgtccaagaactacgtggtgccgcgcgtcgattacatctccacccgccgcgcgcgccagcacaagtgcgcgctgctcctccaagagatccctgccatctcctaccgaggtggcggcacctacaccaagggcgccttccagcaagccgcggtaaggcgcccgcccctcccgacccgggccctagtccccgggcccttcgacccaccgctgcctgcccgtctctatcccgg

SEQ ID NO: 5719 - DNA, 814 bp, Homo sapiens
cggagcacgggttacgtgccctaggctccgggaaccagccctcactggccgagggtccgcggggccgccaggagggctccccaggttcctcccagggatggagcagctacgccttccgagtgtgcccattccaccgatggagcaaagtgaggctctcagctcgcccggatgtctctgcgccgctcgcggggcagctctcgcacagacacgcccgcaagcccccgacccgcccgccacccgcgcccagacacccgcgagcctctggggccgcagggacggtgcagcgcccgccgaggcgccctcacctacctgtgatcactgccggagacctctggcccccctccgctcgcagccacacttgcagcgtgaacgcgtcccggggcagctcgaggtcggcccggaggcgcagctgctcgcctcgcccgctgaaatagagcgcccggctcggcgggctcggctcctcggtggcgcccctcgcctcccgctgctgccgccgccgggggacgcgcacggcttcccaggcaccgcccggcggcggcggcggcggcggcgaggcgcggcggccgcgggccgcccgggtggcgcaggtggccgggccggcggcggggcgcgggggtcggccggcccgcgggtctctccgggcccggcggggacgctcggccagcccgcagcccagcgcggcgctcagcagccccaggtgcagcacccaactccagagccgcatgtccgacggttccccccgcccccccttcgcccctgcaccgccacccggagctgccagctttgggagcctcggcgcctcgactttcttcgc

SEQ ID NO: 5720 - DNA, 1429 bp, Homo sapiens
cgcgagggaaggaccactaaacccaaagacgcgcgtgcccgtgtgttcacacagacgtgtgcttcggcgcctgcacacggccggcgcgcaggcatgcggacgcctacacgaatacataggcatgttttattgacgcatctggggcactttctttcaaagaaagtaaggaatgaaaatccaatctgagagtcaccagggttcatctggaggtcgcccaaggggcagaaaaaatttgtaatgacgctagagtgtttgtccttggtgcaactccactctcgggagggctggatacaatacgtttggaaagctcgaggggctgccttaggatctgggggcggggggtggggtactcagcaactcttgccgcgggctgctcaagaaacgtggaaacacaccctgcgactttccactcccccatacatataggcacgcgattccgtcgccacctctcggaccagcagcccacgtccaacgctgggccgaccccagatacacaggcagtcgggattcccgcccggtgcgcttgtctattcatccctctgcgtcaggctgggacgcgctccgtctgtaaaaggctcaaacgcatctcccgccgcggggcgggatctaggggcccaggccccggggtccagaggcgggtaactttgctaatctcccccagcggcggggaacgtcgcgcaaccgctgagccctgtccgccgagactaaacaagcagaggaacaggctgtaaacacacatcctgacacgtgagtgacatttacgcggtgcgagaagctgcagccaagggaaaggcaaggggtggggggagcgggcaccgacaggtacggaaccttcgcaggcgccggaaacggcggcccctcgacctccccctcccccagaaagtggcaacgaatgcctaagtcccccgaacctgccttttgtgggaggtgacaggtgaacggaattcaggtctggccactctcgccgctgcctacctccccaccatctgcttcctcgcagacaagcagacccggcgcataatgaggtagcagcctccagccggccaccgtgactaactcagaacaaaagcgctccctccacgcctcctccaacaaaggggccaccagccccggcgctccccgaaggctgcggggctcccggctgccggctgcggagctgccgcgcgcaaacttcccggggctcccggggctgccggcgccacggagccggggccgcggagggaggaagcgcaagccgcccggagaaagtgaggccagacccggcgggggagaggggagggagccgggcggccgcggaaggagggtgattgatcagtgcgcggtgcccggcgctctgtcccgttattagaggcggccaaagcagggccacgcaataacctcagaatcgccaactaattgacgctgcaggcaactacttcattgtgcgcgc

SEQ ID NO: 5721 - DNA, 7708 bp, Homo sapiens
cggaggggaaagcgagtcccggaaacaggcgcagcttgtggcgagggtccggtggccgagctgaatcccggggctccgggagacccggtccctgcgggggaggccttttccgaagccgttattggcgggggagtagagaaaaggggaaagaaggggagtggagaaaaagggaaaggagccggccctaagtagcgaggccgaggccggccagaggcaagggcagggggcggcggcgggggaggcagccgtggggcccaggtttggccggcgccccgaaccccctcactcccgcccccagtgcccgggggcgggtcgagattccccaggatcggatccggggaggagcgaggggccgaggggagggggaggacccgggctttctctctccttttttttttttttcctctcaattaggccgattcaatggagctaaagagctcgtaaaatcatgaataatttactcgtgatctgttattaacccatcgggtttcgagctcttgtcgctgggactgaacctgtaatcaaatctgacttcgcctcattttactaaagacgagattgtaggttcaattgtctaaataatggattggaatcaaatcagtaattacgccgccaggcacacacacacaaaaagctggggctgggggaggccgggcgtccggccggtccgcgcgggactcccgcggccgcggcgcgcaaacccaggcgcaaagtgcgcggcccgggcccctcgcccgctcctgccgccgttttcgcacccccagcccgctggcagcccctcccggggtagggggaggtttccgttccaccggggcccgggcccgaggggctgcgggaagaggccgctgcggccccgccccggaaggactttccgaccccgcggcccgcggctctgctgtaagcccagcgcccggcgccccgacggcgccccctccccactcggcccccagctcgccgcccttcagtaaggtgccgccgcgcctcggagggactgtccccagagcaagaggctttgcaaggggtcgtcgtggctgggccacaggatgtgggacactgccacaaacaagctcgtgtccccgtggtcggaaccctgcacgcacacgcacacgacccgcgcccgcacaccccgtccgcgatcgcaccctccagggtccccgctttccagtcctagctgccccgcggcccacactgcggccatttctctcctgccagtgcgggaggggagggaagggcggacgccagatctaggaagactgggctgggccccgagaggccggggagatgccctctttccccaacctagtcccgggagccccgaaagagccagccgcatagccaccgccggcgcaccgaacgccgtttctctcaggactaggagccccggccaaggtcggagaggagggcacgggaacaaacacgacacacacagagacagagatagagagaaaggacggagagaacggaaaggaaaaaaagagagagggaggccagagagaaagtgagatggctgaatggagggtgtctcttgtagaggttaaacaaggcttgaaattcagcctccagcccacctcgctggggcaaacggcggctgaacagcaaaaagcagaaataaatctctgtaccttctactctctttttgcacaatcctaaaaccggcgccgaacctccgtgcccaggaaaacaatacagctccccagccaccaggtgccctggagccgagccccgcgaggtgcttccgagtggaagttgacccacttgataaatagaagcggcttggtgttgggggagccggtctgaactcggttttgtctttttttggggggtggtaggagaggagggatggaagttccagagagctacatctgtggtagtgccttcagcaaatcttaaatccgcgccaccgaccggcctaccgctgcttcaccatttaccaaactgggggctgcgttttcctcccagttccgcacacagggacacacgccccatgatcctccaagcgatttcgttggagcgaacacccgcccctcatttccctctctattcaactcagattctttaagatgaaaataactgacttcttcccgccgtagcaccctctgcacagtcttgggtttgtttttgtttttgcttttttctgcttgtgcattagactaaagggaaaaggaagaagaacacaaaatctccaaatctaattctgttgcaaacgaaagaaagaaaataattgcacataaactctagttcggaagcccggagagtcataaacctttccgggccttgcagacttcgggcagatgttgacggctcatttgccggaactcagaacctctgcagctgtcctgagcagggaggggcgcgggagggggcagagcttctccgggaatggcctggggttcaaagatgccggaaatccgaaccaagccccccacctcaccccaccccaccccaccccggcgcgaggccaggcctgctccggtctcgtccccgcccggggggctcgcttccgagggtcacggccctcaccccagcaggcgccaggaaactcggaggaaaaagtccgggaaaactgagacctgtctttaaaggaggatcgggccgagcaaaaggaaccgcagcctttgctttcctgagttccccaagcccgagttccccaagcctgccgcccttgggacatttcacgaggtcaggccgcactccaggccgagctcggcgccccgggccacagccagccctttctcttgggaccctcgccgccctgcctcgttccttcgctgccccagttcccggccctcagccgcgccaacccaaaacctgtttggcgtcagcgccgccttgctttctccatccctgccacttcctgcctagcaaagtggggcaaaggcccaaaccaaaaagccatctccaaaaaaacaatttatcagagacaaggccctgcacccggagcagcaagggaccactgcaccctctcctcccgctccagccgaggacgcacagtctggaagcccagggggctaatgtcccttctgcgaggccgtccggtgcttaaggctcgctatttgcccagcacacagagattcaatccagctcccggccgtcgaggccgcacactttcccccaaccctatgggggcgcttcgtgcgccgcgcactcaccagcgttgtaggccgccagatccgcaccggggcccgggctcttacgtttcctcggccgccccttctgcacagtgcccacgccattgtagtagggaagacccagagggttggcccctgctgcgcccagccccgcgctcttggccgccgcggctgcagcggccgccgctgccacgtcggcatggttgaagtgtgcggggtactcgccctgcagcagcgcctcgaagtgcaagcggcagtagaccaggctgtccttcatgccgaagtggtcgcccgtggtcagcatcttgttacacgtggtgcacgtgaagcagttgaggtgataaaccaagtcccgagcgcgcatcaccatctccgaggccgagatgcccaggtggcagcgggcgcagcgctgcacagagaagcgcctgtagggaccatggagggaggggctgtgggaacacacggttgggtaccccccttttcctcctccaggtgccgctgctgctgcggggggcaatcccctcctcaagacgaacaacccggcctttatttggaggatgggggggagagagaactagattttgacccaggcctggtcctgtcctaaaatagtttcccttaacacacttatgcctacagagacttctacttcacccagagtctccgcaagccctaggaaagcctttacctgggagtggagggagacacttaccacttaccccctcctcaacctttactcctccctccaaaccagcgcctgggaatcctactgacttttataatttggaagaaacacagagacagggaaagagagagagacacagacgtagagacagagacagagagaatatacatagaccctaatcctaaaactggggagaaggagaaacagagaacttggagtctactagtgattctggttctttgatcttggccacctttcattcccattttctcaaaagacctggaaatgcacccactcccacagctctctttccagctgtgtttcactccagcttgggctgcctaggtttgggggtgcctgtttctataacctcggattaactcaagaaacttcaaagagagaggggagcaaggatcccaactcaagcttttttgtggtctaagctccgagcaggagggcagcttctgctttttttctggttctcctacttcgtagacctttccaagagctccccaaattgctgctttaaaaggttatcacccaacttgtggtggcttggagaacttggggggggagcgggggagtcctgagtagtgaaccctctcctgggactaaacggaaaggagagggccaaactgtaagactgtgcctgagattggggggaggggtcctgaggggcagttgggtgggggggctacctgtagtagtcttccttgcagtagatgctaccgtccttgctgaaacaggtgagctccgactccaggttgagcttgcactcgcagcacttgaggcagcgcatgtgccactgcttgtccaccgccagcaggtagtagcggtccgagatcttgcccccgcagccggcgcacagcgcggcgcggtcactgctgatggacggcatggtctgcgaagggagggaggcggaagacagcagcgcctgcgtcagccagcggcccctccgccgccgggaaaccggcacccacaactccctctgtggccttggctaccctgaacgcggagggggctgccaggacatgcggcgcgcttccccccaccccaaaaggcccatttccatttctgggcggttcagaacccaggcctgcctgcgcagccctcgccagccacgggcccaggccgggctcctggcctaaatggctctggtgcttacctctcttccttccagtcctccctgtcctttcccccaaaatgctcgggctgtgtttagggaccaggacagctactccagtcaagccctccaagagctttccctaaactgcttcttaaatgagccacccgggggataaggtgaccattaagtcaccctccacacagaatcctctttggagagacagcggagttcctgggccccagctccagtgatccctggatccttagaccagaggttaaggccaggacaagtcagccaacttctggctcctctgccacacgggctggggccctcttgggtccggggatgaggtaagtggggtgcagggacaccctcaaagtccgtgggtgaaggacaggttcaacccaaatacttccctatccaaactgaccagcagagaaggtctaaccgaagaagcgctcagaggccgggaggacactggcgccgctgctcctgctcccggagcagagaagcttctcccgtgctccccacctccgcggcctcctaaaggtcacttctgggcccgctggtcgggcagtgtctgctcgtctggcccccagggaggcctgaggcgaggaactggctatttggggctgggcccgcggagccaggtgtagagatccaaatggagtctccttcggcgagggccaggccggagcctgaactcccagccctggcctggctaagtctgaccagtcaagggtctggggacgcgatcaacgacaaatgttggccccgaagacttcggcctctgaaactgcgctgggggttgaggaggatccccgattgccggaaagctgggagcggcccaagccggctggagccccaatgctcccagctggttcgcccttccctggcgccgctcgcggcgccgccagcaaccggagccgagaggtggaggagagcgcggggctgtcgaccccggcaccgggcaaggtgagaagggagccgccccgggccgcggatgggacttcgcttccagttcggaagaaacgctctcctctacccccagggccgagatttcggtttcaaccttgtttcccttctgcgtcccagcagccgggtttcccccgaaccgggagccaccggccttgcattctgaccgaggatccccagcacccagtcccgtgcggcacgaaggacgctccccaaacttcggggagcagaggcgctgactggcccggccccatcccagctctcagccccgaccccacagccgcgcgcctaccgtctcggtgtcgccgcggtcgatggcggagctgatggcgggagcctcgctcttggccctgcggtccatctcgtcgatgaccccgtgcacctcggggcccgacagactgtggaacagcatcgcggcgggaccggcggggccgggggcgcggctcctccgagggagggcttgccccccgcctcagctgcctggcgctcctggcgctaacgggcccggtgcatcgccaccgcggccccggccccgcccgagctcggctgagcccccaggccgggctccgggccccgggcgctcgcggggcaggacgcctcccgccgaggcgcaggggcagctacattgcggggcgcctgggcgacggcgccaaagccagggtcacaagggcacgggacaagcggggcggggggagcaggagactaggacagaggtcggcgcccgccgcgggcgctttcacgccgcgggcatcgcccgcccggcttcagcgcccggggcgcaaagcaagggcgcaaactctgcccgaggcggcgacggctgcggtcggggttcaccctgaagccgctaggtgtccgcggcggcccagctgcctggacccctcccctccctggggtgcgcccccagcccaaggcgaccctcttgggcgctgagtcggcgactggagtaggggtttctccgaagcctgcgagccgagtcgagccaccgggagaattgaagaggaggaggaagaggaggaggaggaggcggaggaggaggtggaggaggagaaaaaagaggaggagcagagtgggaggaggagccgccggccgcgggcccagccgcgcgcaatgctctccaagcgcgcgcctagcccagccccggctctgcagtccgcgccagcgcaagcctccgcgccttttctacagccgcgcctgacatcacgtcctgccgccgtgccattggccgctcggcgccccaggccctggcagcgcgtgctccgggaaggcgggagacccaagagggaggggagaggcaagaggagcagaggagagtcgagatggtgggagctggtgggcgaggctggagggcgggggtgggggggaggcagggaggagggagagcgcggggtttggagtttttaagatacgaacagcttcctgcgatatcttcagaaaggaaaattaaaccctctatcctaagaaggcgcagcaaggggatgctcgtctcactgcggtctcccctcggcctggagccgcggcctcaggcacccgcctgggaggcccgggaaggcaggcctgtggcagagttgcaagagccttcggccggccgtttcccatcgagctccgccttcggcccgggctctgcacagcgggctgcaggcggccgtgcaagcctcctgggtacccggcagagcctgagtggcgagaccggcgagagctgtgactcccggggaggggggccagccagcatatccacgctccaagcccgctagggcccaatctgcagcccagcgtgtagcttctcgctcttcccgg

SEQ ID NO: 5722 - DNA, 3969 bp, Homo sapiens
cgtcccttctgcgagccgcgcgcgtctgcgatgcgcaggctgccctggacccttcggggactggggggactcccttgggaagttaagggggacaccctaagtgtgctttgcaaatcgtattttctgatgtgaaaaccggcatgcgcggtgcggccgcacggggagagcgcgtgcctgggggtggggggcatcgcccaggaaagcggagtcaccccgggcggaaagcgacccccgcagaaagcgccgcgcgggcgccgctgcgtgttcgccgcccacagccgcagccaaagagacgcaggcggccccacgcggcctggttcaccgccgcctgcagtgtccgcggcgcggggcgccccgaggctgggctcaccgtcctctccgcgtccttgaagatctcccgggcctcctcgaaggagcactgctcctccttgcactccctctccagggagcccggccgcagctcctccaggaacgcgttggcgcgccggcgccggtgcaggacgccgtgggcttcctcctgggttacgaagactgggaaatgcgagttccgtgaagcgcccaccgcgtgccccgcccagtgcctcggagaccgccccacggcccacgcggcgggggcatcgcaggttcccgcccgtcctggaggaggggagcggcgctgctcgcgggcctggctgggtgtcctccctgccgtgctcccgggtcagccacccccgtcgcccatccttcccggcctggcctctctgcttccgggggctgatcccgagggcgcgctcgggggcacgcgcggaagccgggccgaagggggctgcgggcgccgccgcgtaaacgtgaggctgcgggtcgatgccggcgaggagaaggcggcgcggccccgggtgccgggcaaccccctggggcccacgtgaaccgcgcgtggaaatccgtacagccgcccgcggaaatccaaatccctcgtctccacccgcaccgcgtctccggcggccagatccgccttccccaggcctccgtcctggtccgaggcgcggcccctgcccggctcccccgacagcgagccccgggcttcctcgccagctcttggcggtcctgggcttctgccgccttccccgcctccgcttggggcccctctgtcccccgcgacccctgagagctccagacctcgcgcggatcctcctggggccggtcctgagagcacagccccccgccgcagctcctggcccctccgtaaccccgacggttacttgtggacaaacaggaccgccgttttgcccatgggaagacggggctggtgagggccagagacgcccagggcgaggcaaccccgtgcgctcagctccgagcaggccgctcttcaggacgccctacagccgaggggaccgtcacccgggagcgccgtgagctgtgggcaccacgcggtggtggagagtgacccccgccccggggcggccgtgctgcccgaacctgcctcagcccgcgaggggagacgggcctgggggcaggcgggagagggaggccccgggaggaggcgagcggggctgagaggacgcgcgggaggggctctggagaggccgcaggaggcgcgttccggagggacgacctttgctgggaggacgaggcctcaggtggacgctgtgggccggtgggcaggagcccgagttctgcaggagcggcctaaattggttactgagcgcggaagaagggacggaaggtgagcgctactgggccacgtggggccgagagaaaggccactgcctgttttctttaaaatcagtttcacacgtcgacgcccctagagaactggtctggtttggaaggaggctgaggatgcaggcggggacaccaaagaatcgggctcaaggaggtgggaactcacggactccgagtcctcacaggaggtgccctgggcggcaggagtgggaggggaggcccatgtccctgcagtccccgacacccacgctcccgggacacccacgacccccgggacacccacacccccgggacacccacgccccccggacacccacgcccctgggacactcacacttctgggatacccacgcccccgggacacccacactcccgggacacccacgcccccgggacacccacactcccgggacaccctcgcctccggaacacccacactcccgggacaccctcgcctccggaacacccacactcccgggacatccactcccccgggacacccacactcccgggacacccacgcccccgggacacccacacccctgggacacccacgctcccgggacacccacgcccccgggacacccacgctcccgggacaccctcgcctccggaacacccacactcccgggacaccctcgcctccggaacacccacactcccgggacacccactcccccgggacacccacactcccgggacacccacgcccccgggacacccacacccctgggacacccacactcccgggacaccctcgcctctggaacacccacactcccgggacacccacgacccccgggacacccacacccccgggacactcacacttctgggataccctcgcctctggaacacccacactcccgggacacccacgcccccgggacacccacactcctgggacaccctcgcctccgggacacccacactcccgggacacccactcccccgggacacccacactcccgggacacccacgcccccgggacacccacgctcccgggacaccctcgcctccgggacacccacgctcctgggacaccctcgcctccggaacacccacactcccgggacacccactcccccgggacacccacactcccgggacacccacacccccgggacacccacacccccgggacacccacactcccgggacaccctcgcctccggaacacccacactcccgggacaccctcgcctccggaacacccacactcccgggacacccacaacccccgggacacccacgcccccgggacacccacactcccgggacaccctcgcctccggaacacccacactcccgggacaccctcgcctccggaacacccacactcccgggacacccacgcccctgggacacccacactcccgggacaccctcgcctccggaacacccacactcccgggacaccctcacctccggaacacccacactcccgggacacccacgcccccgggacacccacactcccgggacaccctcgcctccggaacacccacactcccgggacaccctcacctccggaacacccacactcccgggacacccacgcccccgggacacccacacccccgggacacccacgcccctgggacactcacacttctgggataccctcgcctccggaacacccacgcccccgggacacccacgcccccgggacacccacgcccccgggacacgcacactcccgggacaccctcgcctccggaacacccacactcccgggacacccacactcccgggacacccacgcccccgggacacccacactcccgggacacccacgcccccgggacacccacactcccgggacacccacgcccccgggacacccacgctcccgggacacccacgcccccgggacacccacactcccgggacaccctcgcctccgggacacccacactcccgggacacccactcccccgggacacccacactcccgggacaccctcgcctccgggacacccacactcccgggacacccactcccccgggacacccacactcccgggacacccacgcccccgggacacccacactcccgggacaccctcgcctccgggacacccacactcccgggacacccactcccccgggacacccacactcccgggacaccctcgcctccgggacacccacactcccgggacacccacgcccccgggacacccacactcccgggacacccacgcccccgggacacccacactcctgggacacccacgcccccgggacacccacactcccgg

SEQ ID NO: 5723 - DNA, 2490 bp, Homo sapiens
cgtgaatccgagcctcggccacggtcgccactcgcccttacccacttccacgctgtagtgcgaccagccacccgcgtggcattcgccacgacccagctgggttcacagacaggagctgcctcctcccactgcaggcgggtgacccaaggcccccactgccctatacctgcccagatcgcggggcactcgggctccgcagctctctggccgcgctcggggtccggggagccgggctgcggctggggggcctggaggatgagggcgaagactcgagctggactgcggagagggtgccggcgcgggccgggcttggggggaggacacgaccgggcctccgcccccggataccgcacgcgccgatatagaggggccggcccccggccccggcgcggcgggttggcgcagggcggggtggcggctgaggggcccgggtcccaggtgcgcctcggagcggccccggcggcggtgcgggggggaacagggaggcaggatggggggcggggaggcgggaggggggagccgaggcccccgcgccgccagccccgcgcccccgcctccccgtccccggcccgagcggccgtcatcgcgggcgggcggcgctgcgcccgggtgcggctcctcgccggcggcggcggcgcggccgagaggtgcgggctccgcgcgggcgggacgcggggcgctgctcgcaggagcgaccaggtgggcgccgggccgaccgcagccgccgtcgcgccccctctcgcgtcccgggccctggctcttcgcgcttccctcctccggacttcgcctctccgcccgaggtcgctccctcgcctcgggctcggcttcccggagcccgccgacccccgcccgaggtctccccgcccgacgtcccggtggcagcggcggctcgggctgcgcctcccgttgccgtcgctgctgcggctttgtctcccccggggagggggtcccggcggctctgcgttttcgggctctcggtcccggcgccgtcgttttccgcctcctgcggcccgggcccccgtctgggtccgaccctgcggggcctcgccttggcgcttgggctcctgcccggcaggtttccgcgcgtcccctgtccccgaccctcgggctgggcgcttccgcctccaggttttctctccgtgtttctgtagctccccggcctcgtctctccggggctcctctcgtctcggcgtctctgtctgtcgtctatcgttgtgtctctggctctgcgtcagtctctcttgggttttctcttcgggcctccgctgtctctccgagtctctgatccaatcccccacccctcgtttctctctctctctctctctctcgtctctctctctctctctctctctctctgtctccctgtctctctccatccctccctgtgtctcgtccccgccgggttctctctagctgggcgtctcagtgtctgtgtctctggcactctcggactggcctcgtgtctgcgcccggtggcgtcggtcgttgtctctcgccagagtttcttcccatctctggctcccccggactctgtctctgcctccttcgtctctgtcgggttcccagaacacccgggccgggcgccccagcgctcctgggtcccctggcgtcttccccgcggctgagcccatctctttttctcagaatcggggttttgttctcagacaaacgaatcccaatcgaagcgcatcgaacccgagggccccagatcgggcgcgacggggtccgcgcgggaggagccccccggacggggcgggagcgtggggcctggcaggggaaggccgggcgcggggactgcaccggacccaccccgggacgctgcgcggggcgctcggtgggtgccggcggcagcgcctgggcacagagaggggattacgcgacgggccggcgacagcggctggggcggcggccgcggggaccccaggctgccggtctccgccggccctccctgacccgctgtccctccgcaggcggacgccgcgggcatggactattcgtacgacgaggacctggacgagctgtgccccgtgtgcggggacaaggtgtccggctaccactacggactgctcacgtgtgagagctgcaaggtgagcggcgagcgcgcggcaggggtgcggcagacgggcgctgcggggcctcgctgactctcagctcccgcagggcttcttcaagcgcacggtgcagaacaacaagcactacacgtgcaccgagagccagagctgcaagatcgacaagacgcagcgcaagcgctgtcccttctgccgcttccagaaatgcctgacggtggggatgcgcctggaaggtgcgcgccgcgcgggcctcgacccctgaccccccacagcctgagggggtagggggtgggggtgggagaggggctgaggggatagtaccattggccttcgcgaaggcccctcgtgcgacattagggcccagtcgctgcaagagaaccgggcgctggcgctgggtgggcctcgggcggggaagggacgc

SEQ ID NO: 5724 - DNA, 5370 bp, Homo sapiens
cggccggcccagcgcaggattccgggacaacggatggcaactgggggccgtccggaggctcccaggaccccatcagtgcccgctgggctgggctggtccgccccagccccaagacgcgcagctctcggaacccttggagctgcccggcccagccgcgcacagagccggcggcagagcgggcgcgggccgggcccggcagggggctgaccgggctcgagtgccgggcggtggcggggaaggaggacgagaagcgcttactgttggtagtcttgtttgcagtacagtttccgatcccggaagtagcagctggtggtgagggcttgctgacacgccgcgcactgcaaacactcctcgtgccaggacgactcgttgactcgcatcaggaagcggtcggagatgggccgctggcagccctcgcagacggcgggatgcgggcagtcggagcctgtagcgcacagggcgaaagcccggccgtcagcgccgcccggcccagccccggcgtcccggtcgcaccgggcccacagccctcggccccgagggctcgggccgcccgggatcaccgcctgccgcctgcgctccccggaccgccgcgccaggggccgggcggccccggctagtccgtcccagtcctcgggctccggcgtggagaggccgcgggcctcgagccttggctcggcgctgtgctctccccttctccggagaatccgcgctccgtgttaagacaaatgacaacgagcacggcgcagggtggccggctgggaccaagacaggcgaggtgaggctggggcgctcgctggctgacacgccccacggtggcgttcgtggtcttctatccccgatctccccaaaatctgtggtttgagtgaccagggagacgtttttctcttagaatctcccccaccccaggtgaccttgcgcctctcccaagctcgccaaggtgattgctaggtcctccatcacccctgccacccgccacctaccacatcggagtggcagctctagaacctaagcctggaaaggatggtgggtggcgactggagctgtcctgtcccctcaggacgcctgccggaggcgtacttgcggccctctggcgatcactccaggagtcctgtctctgcctcctccccatgtcctgcaaacccatttcctttatccgttggccccaacgcccgtgtccacagccggacgacgccccatcccacgcccgagaccactcgggcgttccgaccccgcactcacccagcagcacccccagagtggcgggcccggggcgcagggcgtgctcctccatcttgatgccgtccaacatcttggcgcagtccgtctgcccgcgagggaagcacctctccagcgactcgggacctgttgctatatccatgggacgcggggcgcgctgcggaccccgccggccgggctgctcgcccgccggcccgtccacccgctctccgccgccgcggccctggaaccggggaggcgcggcccccgcagggcaggggttgcgccggcccccggcgatcgtggagcggcgacgcgctggccccgggccccggcgtcgtgcgggcgggccggggcggctgcagcccgcgccgcgctctcccggacacttgcagccacgcgcgccggctcctctgtcacctgcttgtcagtcccggaacccggcggcggcggctgctgcagacggagccgcggggaggaggcggcggcggcggtggcggtggcggcggcggcaggcgggggagggggtgggggtgcaggggcggccccgcgggccgcggggggggcgcgcggcgcagcggggtcccgggcggggcgcagcgggccgcggggctccgggcgcgctccccgcgctactccagtgccatggtgcgcccgctgagccgccgggtttagagctggggctggcggcggagggatacgggccgcctcacctcccgaaacttcctgacatttgaaccccgcggccggtatccctgcgccgggatgcgccgccggctccacgtcaaatagtgccgtcccgcccccccgcgcgccccggggctccgcgcccctggcccgcgccccgcgccgcgcctggccccgagctcaggccccggctccccggcccggccgccccgcgggcccctcgcagaagttttgatcgtcttcgaaacaaatccctctgctccacccccttgaaaaattgatttgggagttggggagcgaaggctttcttttttctcctctgccttctttattattaatattttgtaaagctccagcgctacgaggagtggccccgagcgaggccagactgcgcggacggcagggagcgcggcggctccgccaggggacggcgccggccgggagtggccgcttgggaacccccgactgtcggccgaggtaggtcgcgggggctgagtcggagtcccccgggcggcggcgcctgctcggggccgcttggtccgcggagagggccggctcccaggaacgaaggacgggggcgggcagaaggcgaggacggctggccctggactcgtgcaaggggggcccaggcccaggaacggggagtgagcctggagtgtgggtgaggggtctgggaaagctccgggcctggcagagattgggcgggggactgagccgatgggaggttggggccccgggatcgagaatgggggacactgggacgacaaggaaggtcaggcctgggttcaggcgaccgagagtttagaggacaactaaggctggaaaaggggtccccgggcaggggcaggagcagtgggcaagacccgggcctcctagggtttgcagtgaggggcgctaggagggagtggtggccccagggtagcggctctgaagaaattaggttggctgccaagatcggggtcctttggcgggtcgggtgcccggccaggggtcgctgggacgcgcggatcaaggacagtgctctagccagcctgggcaaagtggacctcggcaacgggacgcgaaagctggcgagatggagctgccgacttccgcgccagccgggcctggcacccgcgtccggtgcgagaggccacagcgtcggaccggctgtctgcggcccgtggtccccaccgacgcgcggctcaccggggagcaggggggcggttgcggcccggggtagcggcgggctgaccccccgcgatccgctgcggggcggccccggcccctcccggagcgaggcagcggcgcggagccgggcgggggcggagggcatggggggcgggtcccctgacctcgctggaggcgaaagggcggatcggatttggaacctgcgggaggcttggtcagaagtggccccctgcgccgcggggccccgcggaggggcccggctttgtggaggattagaggctcccgccctaccctacctgcgtgtgtgtcggtgggtatctgtgtgtgtctgtgcgtgtcgggcccccgcctctgcggctcttgcctccgtgtgctccttggctctgcacacacggtatgtgtgtccctgcaaccttccagactcccaggggtgaatctgtggatctgtgtctgagtcccctgcacccgtgtgtatgtgaatgtgtgggtccttcgtgcctgtgtctggggtgtgtgtccgcatcatttcatgcgggggcctaagtctttgtgcgtgtctcagcctctgtgttgtgtctgcgatccttttctgtatgggtgtctctgtcagctttgcgtatctgtgcttatctccggggttctgaatgcttctgtgtgctcgcgtgtctcctagcgtgtgtgtgtgtgtgtgtgtttgtgtgtggtggggggctttgtgccttcgtgtatttctaggcgcctttgtgtggctaggtcggggagagtggacagtcaatgtggagtttctctcccacatctcggtcccctctttgcttgacctggaaaccccaggcctggacccgcgaagttgggctgggcctgagccgccttctccgggcatctggggcgggggcgcggctgctgcagggagaagccgggcgggcaaggcttcggcgcacagagccagagtcccgaggcgcggagcgcggctcggggccggcgggcggaccaggcactttctgccctctgctggtcgcggtccatccctgcaaccggggctgggcgactgcctgcaggcgagagtcctcgttccaggcccagaccctctccctctccttcagggtgcacatggtaatactctctcgtcacaggccctgcacccccaactcctggcgcaaggctccatcccctccccaccttccctgtgcctggcctctcctaccctacagctctcctttccccctccttggctgaatgagggcccctgcgatccagtctcccaggcttctctaactcgggttggcgtccagtgccgatctggggccgctggctgtgcccagaggcgcattccccggaccactcgaaggcctggtctcaaggcaggaggacttgtgggaagtaccccctccgtgccgcgtctggtctgtccgggtgcgcatgcattctcagcgcctcttccgcgctcctgccagtcatatcccacgccaccaaggcggatatagggtggtctgccgccatgcggcccgcgcccagataggggcgctggctcggtggacgccagagcctggctgccttctctggtctggggtggggctgctgagtccacaccccttgggcccctctgcatgccttccccgctgtccattcattccccctacacacacacacacacacacacacacacacacacacacacacacacacacacacacacacaccctccctataggccccgttccttgccctttgtcctcactcctcgtgtcccgtgctcccagctgagttggccggtctcgggtccttcgcacgcagacgcgcaggggtcccagatctctccagcacaatcggggctcccgcgcctctccaccgcttcccttgccgaagaagcgaagaagcggccgactggacggcacagcaggggccgaggcccagagccggctcctgcccgcaggcggcgaacggcaccttgctccgccaggcccctgcgggtgtgatccgtgacccgcagattctcccgggcgcctctggcccatgacgcgggggctgctcgctccacgcaggcggcttcgggatgctctcccgctcagatttcagcggcagaaacagcctcggattctctctacctgggggaaagactgagtcgggggctcggaatcactggaagaagcgagaatggaaagggaggctctggagcgggggtcccggctccttccagtctgcggacgccccagctccattgagccccgccctagtccccccgctcctcttcttagggccttgcaccctctcctctgcgctacccgcctccctcgagcacgg

SEQ ID NO: 5725 - DNA, 3120 bp, Homo sapiens
cggacggaccggcggacgctgcgggcccggccgggctgataggaaccatctgcgttgtcttaggccgcccttcggcccactgtccctctgaactcggccggttcccgcgggccgtttgatgcttgcagggtcacagacccccgcacacaaatcaccgccgcggggctgggggtggggcggaggcgctgaaacctaatccgcagagtttgctccgccgccgcctccttgctccttccctcgctcgctcgacgccccccacccacccctttccaaacaaggcttatttttcttgccaaaaaaacaaagttggtatcaagtgtttcgagggagaaagtctctcccccacccctgacctggaaggaagggccggttgccgactgagccgggattgcagagggggctccaggagaggacgggcgggaggtgagctcagggcttctggctccatcggtccccttccccgctctcgcctgcccgtcccatacttaatggcagcgaatcccatggtccccggccatgtcctgtccctctactcgtcctgcccggaaagggtttcctccatcggagctcccggtccctatgctgtcagagatggaagcatcacttcctgctccttctccctccccataaaacagtccttgcctgtcgcttttacgaggtgacaccctgctctcagcccgatcctccctgcgcccggagcctgggctcggcgcgcaggagactgcgtgcactctggcgtccccgacctctgccagggcgcacggggactccagagcggatcctctacgagttctaataggaggccagggagccgggacatcagagacaaattcctccgaagtccccctccggttccactgactggagcctttgggctgaaaccccacgagctccccacccccatgtccatgaggggagcaaaacggagcccccgggggcacgcaggcttcgtttctgggtgttggttttgcttttggttttttcagccggtgcagtgacccggaacagcgcggccgcttctccgacgcccgcggctccccactgcgccgaggcgagcgccacggctaaagcccaagcctcggcgcccgctgcgcctgccggagttctgcttgtccgagcaggcagcggggctcaggcacggcggcgacgtcgaagggccagtcggcagacagggctgggtctctgcggccagagcgccgcaggaaagccctgcaaacggtgggacgagggtggcggcggcggcggcggaggtggcgagaaaggcgccacgggcctggcggagaagagggtttccgtgggggtggaacaaaggaattcaccctcggaagaaaggggccgagcatgcagccgggaatggccaaccctggagacctgcaggagtgcgagcgctgcgacattagtcccagggatccaacgaaatctgccccgccgagggccccagcctggcatctccattcggcctctctcttctggtcaatcccgctttaatgggggtggtgggtgtgcacccggagtgccacctttcctgggaagaggggacagagcaggacccgtgctctcggtcagaggaggcaaacacatcccactaaccctccccccattcatcctctagtcgtggggtcactgtccccattttccagacgctgccaattaaggcacccgcaaaaccaccccttcccccgcccccacggcaacgctccggctcctgaggcccaagcgcgctcggaaacgaaaagcgtcagggggctacagggccggagccccctcttcccgccgtcctcggaaggggtggaggggacacggttgtaaggtgctcggcttcttttctgtgcttgacatgaataaggggattaggatggcaagtttccgtcgttcactccgtgggacaaagggccccgcggtttgagcggcacagcctctgattaaacgacagagccctgtcactcagcaccatcctaggtacttgtgttcgtgacataatcttattagaagataaaaccggcgaaatccttttcataatgaaaagttacatttaatggccggactctccccccacctccctccccggagcctgctcgcctttccccgttgctgttggatatggctcgcctataattggcatttaaagcaccaagtccgggagaaaaacggggtttagggtttttgtaatccccctaaactgtctttgttcgaaatctccacagatacaagtctgttaagagtaaatatttgtggattgatacaaccacatttcccccctgcaaaccaaatccaaaaaaaaaaaaacaagataaaaaaaaacctgccactcgccgccctcgggctggggcgcaggagggagggggctggggtcggccctagcatccgcgccgggaactcggctttcgggccgcctggttgcctccaggagctgagggacttcgcacgtttctcaggcgggaaaagggtcttagattctcccccgcaacccctaattttctgttctctcaataaacaaacctcccgaacttgctgcttttggccagcccgagggggtcggcaggagggcttggggaggggcgagggctgtgctcaacaaggaatgaaaatgccagctctccccgccagtcttactccctccagcgggagcctgcagtggctccaaggagaatcactggctctttctggaccgcgtaaggccccacctggcggggcaccccgaccccagcccaagagagcccccgagccaccaagggtccccgaaacgctgagaagcccgaaagctgctgcagggccctggactccgggcttcagcctagcgcgtcccaggatcgaattcctccataaatcagctgctgggtgaaagggctgcgctttagaaagggcaggaccgtgtgcgcgtattagagcgcgcggttcccaaatccgggctaaacccctggtgacaccgaaattcatcaaccgccgctggtgcccgcggctcggctgcggagcccaggagcctatgcatggtgtcatcccactcccagtaaagaacatgctgcacgaaccgccgagaggtgggcctggaggggtgcgcgggtggaggccgctgaaagccgccccatccgcgtgtccggacgtcgaaggaagctctcccgc

SEQ ID NO: 5726 - DNA, 3120 bp, Homo sapiens; identical to SEQ ID NO: 5725

SEQ ID NO: 5727 - DNA, 7861 bp, Homo sapiens
cggattttcggcacgggttgggaggagcctagaggcggggtgagctccaggctcgggcggcttagagtcccggctcagggggcgtccaggccaggagtgtccgccgctctcagcccgggtggaagcggcgacggccggacgcccgagtcctacccgcgaccagcgcccctcgccggcccttgcgcccctctgccccagcccgcgcgtacctcccacatgaggttgttgttcttgcagatgtccacgtgctccggggcgatcacgcggccggtgaaggggcccatctcggttcccgccttgatccacgtcttggagaagatgccgaggccctcgccagggatggagctctgagcgatgatcacctccgcaggcagcaccaggctggacagcttctgcacttctgcggcggcggggccaggaaaaccggtcagagcccgaggcagccgaggcccggcccttccttccccgccgggaccccggcttcggtcctgcccagaccagccaaacccaagtcggccccaaatccagagaagccacccgggtgtggaggaagtcggatgtgcggaggctcaacgacctctcctctgtttgcaacctggagaccctccgtgccctggaaagcgagtggtgcgttggggatcatttttagaagtgggtttttagtctctccgcgaattctcaaagcattcgcaacttcttccatcctctgccccggataagtttaagaattaatgagccaacggcagcgagcggttttatgcacagggaaactgaggccaggtcctgcaaggaggtgaaggccaaccggagactctttcgcctagtcggcttccgggagcccactgtgtgtccaggctctgggcactggcagaggagccgggccgtgatcagcgctggggacagacctcgggctggcaggtgttggaggtgccaaagaagcaccggcagcagctggccaggctctgcgctcgctgtgtgaccccgggcgcgcccgagtccctctctgctcccaggccctggggtgccagggagggcggcgcccgggctcagacaaaccccgatgtcatctctctgggcggggaggagccgcggcggcccccagctccccgagggttcccctgtcgggcatctgcggcagggctggaagcggcgaggcgcacaagggcggcctccatgtcttacaaggttcccctctaagctacctgggaaaatacccggcgagcgggccggctgaaaggggggggttaaacggtgtccattgcggcgcggcgggcaatttgtcacgctgttaaagtgatcgcattcattcggctccattcgaaagaaattgctaattctaaattcattagccctggaagaatgctgtagcagtaaattgtagctcaatgcggaggggacttgtttaaaaggggccgaggaattccccttacaaaaaagggggattagatggttgacatagcgtgaatggaagtggaattagtcttcacggtaaattaagagaggaacagaaatcgtaaagggggaaaagagggcgacgcgcagagatgccagagccagggaaagatattgtttgcgggttgatgaatgaggaataagaacttgagacatcttaaagaaaagaaacttttctcgctctctctttctctccctcgctctccccgcggctttttctccccgcccgccctccctccaccccctccccagccccggctgccttttaaagttcttggtttaagtgggaactttcgtgggtcaagcccaagttaactaaatgaatttaaaaccccttctttttgagtcaactgctattacacgcctagtaaggctgtaaatgccgggaacccgccagctcaagcgcaggaggggaagggaggggccggcgggggcgtcggggccgagcgacggggtcgccggggtcggtccttgagccgggtgggctgcggagctgcttggtggctcgcgtcctggtttggcccatggggaaactgaggtgcaccgagcgccgggagagcccaggttggcgcgagtagcagcgaggccgggtatcccagccgcgtctcgcgcatcgccaggacgggaatgggggtcgccgggaggagggattgcgccgggctccgacggctggactcaccgccggagaaggactgcgccagcacctcggcggtgaaggctgtcttggggctggcgtggtggctcttgtcctcgaagagctgctccccgagcacgttgcgccagcggccgtacaggaagctgtgcaggatgtcggaggtgataacctcggccagcgccagtcccggcgccttcagcccggtcttgagcaccagggcctcagccgggagcacggagcccatcatgggcggcccggagctccccggcgccgggggacggccgggccgacgggggaggtgggcgggcgagaggggagcccaaggggcgagaggagagcgctgcgatggagaaggaaccagagcagggggaggacggagaggaggaggacgcaggagggagcgggaggtgagggggcgactgggaggaaagcgaacgagggggagaggggaagagagatggtgaaatctgtagagatggcaaaggcggcgcggagggtggagagacgcgggtggaggcggaggcgggtgcggggggtgcagggtgggtgagaggcgggtggttgcagggaagcggcagcaaggggctcaggcgcgcgctagcctctcgcacactcggccggggccgtcttccccttggcaaaatctcagcgcctttataggagccgcagtgaccctcctaattggttattaatgaccccctgacgtcggaggacagacttgttgtacccggctgggctcgaggagccttcgtcgcgagagcgcgaggggcgggggcgcgcggaccgctccaaacagtacccctccactcctctctccccttcctggtccttcctcccccctcctgtttttccttctctccccgtgggaagcgcagggcagggagggaggctcagccggctctgaggagaggaggggacggagaaggggagggggtgcggcgaggctctctaggactccagggaccaggctagacaagaggggacgcctggcttcgggccccgcgctcccctcaggcctgatctatgttcaccggcctggcccagcccggcgttcacctttactttgctgccccggctggccggcccagccctgcaccgctctccctccccggccagagcccgcgtcctcttccctctccggccctgcactccccgggccgccacagtcgccccgagctcgcgcgcagccctagttgccacgcggatcccctgctcagactgcgctgctgaagccggcgcttcgcttcatacgggccgcgccaactcggtcgctgtgcacggtcgggtgcgaaactcctccgcgggctcacggggctgccgaggcggggccgcagcggccgtcggggctggggctggtcccggcctgagacagcttcatggaaggccaggctcccggcccttgcggggccaggtcgggggtcgagatgggcggacaggaatcgccctggcagcctgtctctgggaaaagaatttcctacgggatatagggggattgaaaggggtcccgagacccttcctaggtgggagcaggcgtgcctgagagcgaagtccctcagaaactgcaggcagctccgcgagaggcctcagtgcgggttcggcttgcggcccggctttccggctccttgctgagctgcaacctcgggaagccggtggcgttgcggcgccccttccttcttgcctcctagttctttctttctcctctgcctctctcttctttcccttcctctcctctattcctcctgcccatcatcccaggagcagacttgctttgcggcggtttcgaggcacctcggagcccagcgatcccctctcccgaagcaggtagctgctgagcccagcggaaggccccgcttcctgcaggcttcgcggctccccagtgtcagcctcaagcctcggaccccaggccctgacatgctgggtgagggagctcaccccacctgccgcacttctggctcccatcaccagcctacaatttcagatgccgctaacagaggtgcctggaccctctcggcgtgggtcaggctcacggattagtctccgctggactgtgtggactccctagaccttctcctcagcgcggaggacttgggtggaagaacagcgagctgacctcccatgagcgagaccctgtccaaacgcctgttggcatagacgcccctccaccacccggacgcgccttggctaagagggtctcacacctggcgtccagactccagacccctggtccccagttcctgccagtagtctccggcatcccccgtccccgttgggacgcaaagggaggaaggcggcggtagctggccttcagaccctgcgtccgggtccgcccgaggctggagcccaaggaagggcacacctggcagaaggcaggaccgttgggcagggcgccagcagagggcagcgctgctgaggagggaggtgggttagggtcgccgaaccctccactcatttttcgacgcagcttgtgggtcgcatcggctccctggccagagctcgagtctgagggggcgtatggagtccgatggctcctgcaggggagcctcaccggggcctacttcttggcttctgggaagacctaggtggagaggacaaagtgctaggagcgagggagacgacgtcggggagcgctgccaggagccaagcgctgcggcagctcccaagccccgaaagcgacctcagttcctccaggacaccaaagggggataaggactgctgtgtgtcctgtggactgcccctttcctctctgggcctcggtgtccctgtctgtgcaatggtttgagttggactttgtgaactgaggtttctttgcttggtctctctttgggtaagatcactttaccccacgacaaccccgaggattttgccctctccagggccacgtcccactgcgggaagccctcaggtctgtgcatcctccgtgctggggtgcagcgtttgggtcctgaaccccggcttagagttagaggcttggattccgctggcgcagtgaccacgggctcggactgcggccagggagtcccattcctctcctccggacccgcaagcccggagagcagtactgggagccgggcagaagcggagcgcagaacgtcctcccagctggtgcgcccaaatctccaccgcgctcacattttgtgcttctagtctagcggcaaaacccacctggacccccgcccggggaaaaaggagcccgtaggtagcgcccagtctcaaggtgcattgaaatagggagcaagaccctgtgctcacatctccccgggaggagatttcgaggggaaacattccgggctttcccagcggatgacccgtgttattttgtcattttccgcggggcccaggcgcggaatgtgctcgcgcaaaagccccctcccctcggccgggccggagctctcaggctccgtcgcccccctcgcccgctggccgccacttggcgatctctttaatattcatgggcgttaatagagaggccctcagtatatcggtccattgtgggcggctcgtaggacttgaataggcctcggccccctttcttcggcgcggcttcccgaggggccgggccaggagtgaatggccccgcttcccgctccgcgccccctccccctttcagggagaacatctttatcctcttctccgctgccgccgccgcccgggcccccattcacgcggccccggctccgggcggaacgaatcaatttgccgcggctcttcggaggtcatcctcgccgcccgggtgccctcttcccctgagcccacgggagtggagagagggccgccgcggcaggccgacggccccacggagggacattgaaggggaagtggaggagaagagcaggggcgacccggaggggtggctgggccggggcgggcaagacagtctcagggcccggcagccgcccggggttggctaatttctagttgttgccccgctcagggcggagcgccgaggggaaggaggccgcggcccaagcccggaggtccgttcgtcctccccttgaggcaccagcgcgcgtcccttcggcccggctgaggcacctatgagaacgggggcgtgtgggacagcccagggccccgcacgacgctttcgttctcgccggtgcgccggggcttagctccgggagagccaggtcccgacagtgcgcttcagggggacgctcggaagggcggccggcttcgcggctcctgcgccctcgctctggggcccgggcctgggtgcgggggaggggggtgcgagtcggtcaggcggggccaaagcgcacgggtccccgccctgcccgccccgccggccctcagaggcgcagaaagaagcccattgtccgccgagaaatacatttttgggggccgagtgaaagcccgtctttcttttgaactttagaagaaagtctcctgttctcgcccctcggagggagagatttgtcccccctcccgggagctccgcgcgcctcctcctcccgaaacatctgccgggggaaaatccaccctggagggcagatcgcgctcgctttaagcctggcgaactcattaaaaagatattagcggcgggggcaggtcccgcgcaggtatcgatcggccggaatgagcccgaggaagaaaaggcgaagaatgcgcccgcgccgcgctcagacgcccacccgccccgcccagcccctgcgccccagccccgcatagggagaggggcccccgcgccgcctcgcactgtctgtgagtcccgcggcccgcggtccagccgcccccacccgggctcctcggcacagcccctcggcaaccctcccctgccggtgctgcgctccgtcctggcttcccctgcgcgcaggttcccggccgctcccctcctccgcccgctgccgtcgcgcgcccagcatccgcgtctctcttctccccctctccttctcttcctccttccccagcgctcccctctttcgctggcgctccgactccctctccagcttcgcacaccctctccgcttcctcctcgcacgtctctctctggctttctgagcctcaatctttcgcagtggcccaggaaattccttcctcgcgtggggcccgcgccgctcccctccccccacccccgttccccgtaagacggttcagggttccagggcgcccccgccggcgcgtacaaaggcgcggctggctgccaaggcgggtgggggcgaggccgaaaaaaacggtttcaacagacgtgactcggggccaggcctgcgcggggctgccggcggagtggcggcctcggctcagtgaatggggacagcggccccctctcccaccccacccctgtcccctcccaatgtaattagctttcaaggctcgggagagacaaaggcgcgccccggggcgcccacgtggagtgcgtaggcgcgaagtcggcgccccgaccggcaggtgactggcacgcgagtctccccaggcgcccaggggcggaggaggggaagcccctcccctgcgcctctcgaacccccttccatcgcccacaccccggtccccaggccagcgatgccagcgccacagcccaggctgatcaaggcggcgggaacgacgggagagacgccggggacaccaggagaccgggcggtgggagagacagaggcgcaggcttctggaagcagagggggcgagacaggggtcgggggagactgaggcaaggcgatgccgaggtggagggagcagatgaaaggccgagtcggagacgcaggggtacaaagactcggagatgaaggaagcagagggggagaggcacggcttccgaaagagcgg

SEQ ID NO: 5728 - DNA, 1434 bp, Homo sapiens
cggccccgcggcgaggggcccagacgaaggaaacgccgccccaggggcgcgcgggcggagatggagtggcccaggctgggggagcggggagcagggtcgccaccgctgcgccggcccgcgacgcctgcccttgcccgccctgctccccgccgcctccctgggcgactcgggtcccgcgcggcgcccgcccagcccggggctccggaccgaggagggggaggaggaggaggaggaggagccgcgccaaggcggccggcgggcgcacttacgccggtgctgcggtccagcgtcccgccgccggccgccgagagcttggtggtgttgaggcccaccagcgagggcagcgtctgggacatccagttagtgatcatggccatggtgctcagcacgaccccgatcttgagcagcggcaccgacatcgcgcctcgagctgcctccagcgcccgctccgagctggcaccggctcccgcgcccaggcggccttcaggcggcgggcaccgcggcgggcaggggcgcctggctgtgtccccgcgccccctcggcccgccgccgcccgcccgccgccgccgccgccccgcgcgccccggccatcgccgcgccttccccgggcgccagggaaggtggccaggtggcctctgcccgccgcgccctgcgcctcgcgccgcccgccctgcgccctgccttgcccggctgcgtccctccgggctcctccgccgccaccgggaagcgccgtccggctctgagcgctgcgcgggctgcgcgcgggggccgcggccgggaggcggggctcggccgggcgggaccgacgcaatccgcccaggaaatgggtggatttttcctctcgctcggctccccgccgccccctggctgctggcagcgaggtctgcaaactccagtccgcccaggagttgggatcagggtgacatgaggagacggacacaccaccacccccagatcataaaatacccggcggcggcgcggggactccagctgggggcacggcccgcggccctcccgtcccggggcttctcccatcctcacgccggggcatccctctccgatccccgcagagggtccgctttggggcaaaggttgccggcagagagacggcgccgtcctgcctactggagcccttttccgcggtgattcgagggtcccagccagcctgggccgtcgcctgaaacccagcaggcagggcaggctccgaaaagcagccagactcgcgagggcctccagcgccaggggggcgtcggggcatcggtggagagctaaaggcgcccctgcgatcccagggcagccgcggtgccctaaggccttgcttgggaggaagggagccaaccggcactcctgacacctgcacagcaaggcgggggctggggtggtctgccgtggcccgcggtgcgcagtgagggccctgggagggcgcacacccgg

SEQ ID NO: 5729 - DNA, 5053 bp, Homo sapiens
cggtccggcaccttgcggttccggtacgcagccctcggcgccacactcaccccttctgcgtttcgggttgagctcccgccgaccatctgctgctcccgaggccaaacctcagcggcgggaggaccctgctgccttctcgacccctctcccgggaaccttagccctcctggcgtgtgctccagctcaggcctctgcctctgggccgctccggcgcaggaagctgcggggccgggacgaacgctggcgggaagccctgacctgggccctcccttaccggtgcccgccctcgggccgggcacgcggggcggcctctgggcaccgcaggtcccggcgcaaaggcgctcagagtccgcagtggcccgggctggtctccgcgacccccggccccgccccgccccgcggccccgccccccggccgctccgccctccgctcggccagaggctccgggccccagggcggcccgcgggcgcagcgcccagcagcacccggagtcgcttggacgccggttcggggctattgcggggtggcgtcgctgggcccgggaaagttcgggactggagagtggcgacgccgggcggcgggacccatggaggcgcgcggggagctgggcccggcccgggagtcggcgggaggcgacctgctgctagcactgctggcgcggagggcggacctgcgccgaggtgggtgcccgggccgagtggctgcaccggggagaccaggagatcctcaggcctttccgggcctggccgcggaggctggcaggagctagaggatctgggcgggagtgggcgcgaggaccccggaacgtccgcgcctgggcgcctcagcctgtatttgttgcagggcccctggcctgggttgtcagggagtgagtgaggttgtggcactgcgctgctccggccagggagctctcgggggtccagggtgggcttaggagacctctgcagcccggagccagctccctgggctggaggaggcgcagggagcagtggcggggcagtgaccacgggacaggagggtccccaagaaggccgccccagccggactctttccacgttccagcggaacagagtcagatgcaggggccaaggtcgagctgaactccgaccgtcggtctccccgaagtcaggtttcagcgtctgcgcccacagacacccgctcggtttatccccgctcagggcccgtctgtaggaaaaagcctctcttctccaggccccccagcttcctggtggcaccactctagctcccagcactttggttcttagggaacctgggcagttctcctcgactcccgggccagctggagccgcaggatggggaaggaggccccggagccagtggggagtgagagggaccggccggcgggaagggggttacatccaggctgtgggggctcgcggttccctacttatttatttatttttcgacggttcctgggaggggttggccgcgggggctggggggcggagagagggagggaggaaggaggactgcgcgcccgcgctcgggagagctggccggagcgggcgggctggcgtccaggctccgccgaccccgccatccctgacacaggagcccccgccagggctggagtcgccatgcagcgtaaggctggggtcgcgggcgcggcgcggggtgggctggggcggcttttgcccgacgcgggcgccggcggcgagctgcggccgaggcgctgtccggtccgcggtgctgaatccgcgctgtgtcggcctgtcgggccgccccgctccgagccgggtcctcgcctgcgatcgctgcccacgatggggaccccgggcgcgcagcgggtcctcgacgctccgcacccggagctgcggttttgccggatgcggggcgcattcatcgccggtttcccgccactgcgtggggaggcgcagcccagttttttccgccggaggtcgagggagccccttcctggtgtctctcacccactgggagatgggctggagccggcggggtccacagccagggaggcgggtgcaatatgtcagtaaatcccggtcccttcagcgggcactcctctcttccagagactttttctaagtgaagagggagtcctcagcccttgacacctggaaaacccgctcacagactcgaggctcccacagggcacccttggacctccccagtgtggttcctccagggggcctgcagtaccgaagtggggtgtggggggcagaagcagcgggaagccagacgtttgagtaactctgacggtgttgggggcacccacgcctgacacaaaggcagtggatcggcttgtccagtccactcataagtaattttgcggctgcccaatgatggggaaggcattgatatttaccccggaggcctgcagacagggccaccaggcagggcagccacatttgcgaggagtccctagaaagagtggccatgacgcttaacatgaaggagacccgatggggtgccccagctccaggtgatggtgaagacccgtttccctatgtttcctgccgggcttcagagagcagatccccctggggtggggttttcatttgagctccacatgcacccttcttggcactggcaacattttgtaattgagtattcagcctcgtgaaatggcctgggctgctttcttgctcacacacatttttagaccgatgtcagtttccccttagctcctgacataggatgcggtgcctgcacactcccggaacttgcggggccacttaagctggctggggaagagggtgtgtagggaaaggaggacccctcggcagccctgagtcctgtgggccggaggggagactggctcgcgttggggtgggaaggtggcttcactgcctcctggtctacgaggtgacccagaacttcctcgtgcccacagagatcccgctgtgcgctggctgtgaccagcacatcctggaccgcttcatcctcaaggctctggaccgccactggcacagcaagtgtctcaagtgcagcgactgccacacgccactggccgagcgctgcttcagccgaggggagagcgtttactgcaaggacgactttttcaagtgagccccgaaacctcacctcagtgtgggagcggagggcacgcctgccccagggactcctcccctcacaatcaccaaggccaggccctcgaagcctgcgtctctcgcaatcccagcccactcctgtcacccaggcagggcaccctgtggcctggccaaattaagggtggggcctctccatgggtgctccctgggtggctgggcctggctgggacatcagcaagtattatttggaaaaaaaagcaatttattacctaaatcacagaagcagtcattagagaagatacacccctatttgtaggattctactggacttagttcctccgaaattggtgatgttttagttcctaatgctggcacccagcggctctggcccagtggccttcatggctccagctgtggggtgtgagggactggccccagatgggtcctctccctccggattcaccttcccagatccagcatgggtcctgcaggcaatggcggctgggctccccgaggtctttctgagattgaggttcccttctcagtgggagtgggcagctctgccccggcggccaggctggcgaccaccctgcagggccggacagagccttcctccggggccgccttcccaggcagccgcttgcctctctccaacccgctcggggcgaaatgagcctcgcgcttccgcgctgagcccggccctgtgcgtcccgcaggcgcttcgggaccaagtgcgccgcgtgccagctgggcatcccgcccacgcaggtggtgcgccgcgcccaggacttcgtgtaccacctgcactgctttgcctgcgtcgtgtgcaagcggcagctggccacgggcgacgagttctacctcatggaggacagccggctcgtgtgcaaggcggactacgaaaccgccaagcagcgaggtcagccgaggggacgacgctcccacctttcctggtctgaaaaaaatggggctgaggccacgcccaggggggcgtccggggaaattctctccccaagcgctcactaagggggcctgggctagggcggtgtaggcagcaggaagccgaggccgggaacggcggagtcacggacagacccgcgtcccgaaccgcttcgttcggtccgaagtgtgcggcttttcgcccctggtcggaattatcgccctaaattcttggccgcgaaggctgggccatacccacacccttagaataaaggggagcccgcggggaaatcagggtgcttggagaagggagccaaggctgaaggcgggggcgccgtggaggtgcgattttagggaaggcgccgcccccgcccccgcggcagaacccgccctccgccggcgccccctccaccccagcccgggtgctgcccgtttttgccaatcgctcccagcgcccgcgccttccgagaagcctgtggggcgggatgggggtgggcacctgaggccccgacgtccccgcgccggccggggtgggagggctgggggtccggccggggccggaggggctgccgcgcctcaccgctcgcccgccgcgcagaggccgaggccacggccaagcggccgcgcacgaccatcaccgccaagcagctggagacgctgaagagcgcttacaacacctcgcccaagccggcgcgccacgtgcgcgagcagctctcgtccgagacgggcctggacatgcgcgtggtgcaggtcagcgctcgcccctgcttccctcccgcccgcggccttgggggcccccgcagagccgggcggccgctcaccccgccccgcccccaggtttggttccagaaccgccgggccaaggagaagaggctgaagaaggacgccggccggcagcgctgggggcagtatttccgcaacatgaagcgctcccgcggcggctccaagtcggacaaggacagcgttcaggaggggcaggacagcgacgctgaggtctccttccccggtaggcggagggatcgcggagctcggggggggacgagcgcgcgtcggcggggtcgcaggggtcccagggagcccgcgg

SEQ ID NO: 5730 - DNA, 6343 bp, Homo sapiens
cggcagggcgggacggggctgcggctcaccatggaatagccgtacacgtgaatcttcttgtcctgactctggtgggagatgcgcccgccgcccagacactcacagtcgcagccttgcttctgcatgtcgcccgacactttgtcgtagatgtccgctgggatgggagggcggcctcaggacgtgccctggccgcccttggaggccgcgggaggaactcccagccgaaggggtctgaaatcccagctctgaacagccccttccccaggagagacgaagccccttgaggctgggacagggatgaatgagcgaaggagggtggaaccggggagggcgcgggaactgggagactgctggggagggtgtcaggccgtgtcacgcccttcccgcccaggacctcagcctgggtcaaacctagcaggggcaggactcggagcagagcgcagtccgctacggcccgcagccccgcccccgccccgccagccccgcccctgcctcgtcagccccgtctccgtcccgccagccccgcccccgcctcgccaggcgtgcccctggcatgcccgcaggtcccgccctcaccatggtactcagcccacttgtagccgcgcacgatctccttgctctctgcagccggagccccggagcggggagccgagtggactcggatcagcacatacttgaagacgccgtcggagtcgatgtccacatcaggaatgagagcgaggtccgccaccgccatgttcctcctcccggagtcccctcctcccacccgacccgggggccgcttgtactgcgggaggcgggctctgcgagagcgacgaccaatcccgtcggggaatgcttcccaaggcccagcgcctcagccaattgtaccgccgaccgaggcacgtgctgaccaatcgcaatccagttccttgccgccttgcggctccgccagccccgcttaaaggaaacgtggaatcgggaatgggtggtgatgaaatccagccaacggagaagttcctctccagcggggtccggtggcacccttggaacggggcagttaggcggcccgcgaggctggggcaacgagggaggcctgagggacttgccagccctgacctcctgtcccgcacgtagtccgaagaccaccctccccgtggcccccaccgcccaaaggcctccctctctccccctcccaccgcccgaaggcctcccccctccccgctctccaccgcccgaaggcctcgctctccaccccctccaccgcccgaaggactccctctcttccccgtccaccgcccgaaggcctctccctttctcctctccaccgaccgaaggcttccgtccccaaccccgctaccggtacaaggaggcaacggcagccgctacattcaagttctattttacttggttcgaaagctcttgccccctggaaattattccggtccaggggcgttcccggccggccctcaggggtggggccgaatgcagaggccctggggtagggggcgcggggcgcggcggcgggtgggcaagcgggacgcctggccggtgcagacgcgcggggacgagatgggcgtgccgggtgcgaaagcaggagcggaggcgggggtgcccaatttctctcacttggtgccccctcccctggctccgaagtagggctggggactccaggagggcccttgcgtttggcctccacccctctcccgcataccccaccctccagagagctctgggcgcggaccagggtgcacttgggggacaggtggaggccgggccgccgggcttgcgcctccacgcccgcagtacggcgtgcggccagagcgggtgtgcggggacctctcgggacaggtcaagccccctcgggtgggcttccacgcttaccaactagctctctccctcacctgctcgcaccacgctttgccctccaggctcccacctgggaacgccccgtcccttggtccttcctctcctagccaggtgtcagctctggccaggcccaggtgctctgcttcccctgttcaggtcccctgccccttcggctgggagacttgcatatcggcctgaagacctccctgcggtttttcccagctcctgcagggcccagactgcagcggctggaggcgaagggacggcagggcgcgtggcgtggttagtgtgctggctccgaccagcgggaacgcactgcgcaccgtccgccctgcccaccgcctcggcgggacgcgctcgcgcacacggacgcacagaggtcgaccagggtgttctccagcgaggaggcaacacagccgcgggaggcggggcggggcgtgtttaaagtgacagactgggctttggttacgtcgggcttctggacgaggggaaaccggagtcggggaggctccagcgagagccccgcggaccgacggggaccggatctctacgggtggggtctgtgcagtagtgacccctccgagtgaaggcagagctcggcggtcctcaggcccaccccgcctcccagcggggagcaccgagggcgaggaccgacttcttctggggatcctcgagggcgagctgggagagggaggaggcccggaggagggagaggggttgctgggggtgggaaggcgaagggcctgtgaggaacactacggggacgaagggccggggggtgggggcctgggcggagctggaggccgaactgagcggagcttggaaggctggggaattagaggcggggcctagaagaagtcggggtggggccctggcggggctcgggggcggccctgggtgggccgggcggggcctgagtgggcagggcagggttcgggccagcgcctgggctaggcctggtgggcccggcgcctcacatgatgtcgtccagcaggttggcgctggccacccagtcgagcgcgcgcggctcggaggcggccatgatcatgcacatgaaggggcggccggtgcgccggtccgtggggtagatggtggtgggcgtgaagcgcctgttggcctcgacgaactcgcaaagctgctcgtagacgcgcgggaactcgtggcgcaggaagacgccgcgcagccgcagctcgcgctggatgtggatgaaggccacctcgcgcgcgcgccggcccgcctcgccgtcctgatccaggcccgccgtgcccggcggtggcgtcaggatcagcgtctccatgtcgggctcgcggctccgcgccgggggcggccgcgcggggctgccggccgccagcgctaccttggcgaacttgcgcactgttggcccgtggctgcgtggcgcgggcgcgggcagggccggtgtccccggtggcgcggtgccgggtcccacggccacggacacgctgagcaggaagcactctgccggttcgtagaggcgcccagcggccgccagctcgcgcgcgtagctgcccaggggcgccgcgtgtgtggccagctcacgcagcgataggtaggtgggggatagcagcagcccctccaggccaaagcgcaggaagttgtcggccgagcctggacttgggaagcccaggaagagcacgccgcggccgcgcgacaggaagccgacacgcgcgatgcgcgagaaagcgcggtgcaccgggccgctgtcgcggcaaaactgcagtacgtggcggcacacgctgcccacgcggccgtacacgcagcgcgccttgtgggcgtcccagtcctcgcggcggcacaggcgcgagcagtagtaggtgtagcagctgtggcaggacttgaagtagaggcaggcgttgaacatggtctcggtgcgccggcagcgcgcattggagcaggtcatcaggtcgtcctcgtcggcgctgggttcgggggacgcgtcggccgcctctcccggggccgcgggctcctcggcgctgccggccgaggcggggggcgagcgtggcggcgccagcgcgggggccccggagcccgcgggccgcgagtccagcagtcggcgcagttgggggcccaggcagtcggccgcgggctctgaggcctggccggcggtgggtcgcgagtcgatgaccaggtccgtgatgagctcgtccagctgctctaggctccgctggcggccagaggtggggccgtcgggggccgcgtggggaggtggccgcgtgcggcccccgggcaactcccaggccctggcgctcgggcgctcggtggcgcgcaggtcattgtcagtgatggtgatctcgggcgtcacgtaccagttgcggcccaggccctcgcccgcgcggcccttctccgtcagcgacgtctcggacagggacagtgcggcgtagcgtctgggagaggtggacaggttcacgacgacgggcgggcgccggccttcgggggacacgcctcgcggctcccgcacctcgcgccccagcaggttctcgtagctgcggccgcggcccaacgggtcttctcggcgcggccccggggccagaatgttgtcccaggagcgcgagtagtggcggctgtcggtggccagccggggcggactggtgccggtgccgccgtgccaggaggcgagcaacgggtcggggtcagagggcggcaccacttgcagggtgcggtacggtcgcgggccccagtccgcccaggccgggctgctgcgcgggtgcgggtacgtccgagccaggacgtcacgctcgcggtaccttccgaagtcctccgtgtaaaaggggcgggcggtggagtgggcccggggctcctcggggacatagcggggcccgtagggcaggccgtaggctcgtggagcctccccatagtaggagcgggagggcggttcctggattgggaaggtgcgcacctctcctgcgtagtagccgcccatgcgccttggactgggccccgagagctcctcggacggatagggcctggggtagtaggcgtcgaaggttgggccgggactggctgcaaagctgccccggaagccttggggctcctctgtatagaagaactgggtggggcccggcggggtggtgaagggcagactgcggcgctcggcgtagtcccggggcccaggcaggggcccgtcgcagtagaacgcccggggatccgcacagtatgagtcgctgggcgtcggggtgcgcgacagcgccatgtggcggggcccgggcaccgtgaggccgtggaactgcggggcggggcgggcccagtgcgcggcctcggtgggcccgcaggaccgcgagccccgggtggcgtgctggagcactgcgtcgtctggcttgatgtccaggcggcagcgcacgtggggggcgggacccgcgggtggctcgggcggtgcgcagcggcccgcggcggcgcacaggggcgcgacgcggccggggccgccccgctgcggctgcaacttgatgggatgcagctcgttggcaagggcgcggagcgccgggtacgcgggctcccggcgcggcgatgcctcggcccgcgccgcacgctgggcctcccgccctcggcggggcaacaccggcggcgaggcgggcgcgggcgtcaggcccgggggcgcgcggggcgcactcttggagcgggcgcggcggcgtggctcggcttcgcgggtccgggcgcgcggcacagcggactccggcggcggtggctccggcagggtctccatggccggcccgtccagcgcctccaggaagtcgaagctgcggcagtggcgcttgttgaaaggcgcgggctcagcaggccgggccacggatcgctcacatggcgagcacttggacgcgggtcccggggtcgccaccttgatgtcctggtacacggtcgacaccagcaggtccggagggtccgtacgggtcatcttaaaagaggtccccaggctggcggctccagctcacactgccttgcggggcttttgccctggggggagacgcgggtcagggcggccccctccgcagcccaggccccgctactcccccacgctggcccggcttacctggggcgcagcgggcggagcagccctggctgcgggcctgggccgagaacgcgggcgcttcctccatgccggggtcagaagcacctgcgggaggaacccagctgtccaggcgcccgtcctgcccgtccccccgtcctctccctgcgatggggcgggcgggccagaaaggcttagccgtggttgtggttcccgcggcgggagctcccgcgtgaagctccagggcctcccctcccccgactagtgacggcggggtcggctcgggtggacccctttccgggtggggtaggggagtgggggcgtggtcctggggctgcgccctctggtgtccgcagttggaaggacgggccgcatttgggccttatttataggtgttgccccaggagacgtcagtgactgcgcccccgtcacagcgcccactgcagagcgacccctccgatcgcgcacagtggaaggcga

SEQ ID NO: 5731 - DNA, 1089 bp, Homo sapiens
cgctgaggggccgcactcacccgcgcaggtaccagcaggcagccctggcgtccgcgggaggcggccgggggcgggggtccctcggtgcccatcgccgcccctgcggctgggtccgcgctccgggccggccgagctcaacgccaggaccccgtccgagcctcccagggccccgccaggcgccgcgtccgcgcccgcgcccctctgccggctccggctcgggctccaccggggcgcagggctggggaaccggagctccgcccgccgacccggagcaccgcccacgcagacccgccccgggcgagggaggggccgggcgcgcacccgcggggagggcggcgagcggggatcagccgaagtcgggagaggggcgcttccacggggcgggaaactggcgcgcgactctgggggaagtgcaggatggggggacaggggcgctcccgcgggggtggatgggggaccatagcggggctggcggggcaggggccggcgcacgaggctggaggaggggagcgcgcgcttctacccgggctgggtcgccgaggtccgcggcgcatcgtggcggcggtgggcggaggggggcggggggcacctcttctcccttgtggcgcaggtgggcgcgctctggaccggcttgacgacccctccccgccgccccacctccctggccaaaggttctcagcttctaatcagggacatttctagtccacagcctcgaagccatgggttctccccggccctctgaagccgccacacctgtgccagccggccgcgtcctcagacctttccccgcggagtcttcccagcacttggagacgcagcgcagggccccgaggacggcctggcccggagaaaagataccgaagctccaactttccccaaccccgctcccctcctccttccaccctcccttcccgcccccaaagctcgggggtcctatccctcctccggtccgcggagtctcccgaaccctgcggggacccggcgctcggcggtgccctcctggggcgcacggggctggggcgggagcgaggagaccaggtggggaggggaccccagatctcagacgccaggggagacggcgtttcccgc

SEQ ID NO: 5732 - DNA, 1020 bp, Homo sapiens
cgcagagatcgcagagaccaaggaggcgcccgcggctgcagagctgcagagcgggatctcttcgagctgtctgtgtccgggcagccggcgcgcaactgagccagaggacagcgcatcctttcggcgcgggccggcagggcccctgcggtcggcaagctggctccccgggtggccaccgggacccccgagcccaatggcgggggcggcggcaaaatcgacaacactgtagagatcacccccacctccaacggagtaagtgcccgagccccaggtggcgacgccatcctctcccagcacccccgcccccgcggagcgtctggcattttcctcctgcgcatccctcgcccctgactgccttcctagccctccctcccacctgccccctgcccttgctctgcggtttcctccgcttcacccttctcctgccaccccctgccccccaacagcaggtcgggaccctcggagatgcggtgcccacggagcagctgcagggtgagcgggagcgcgagcgggagggggagggagacgcgggcggcgacggactgggcagcagcctgtcgctggccgtgcccccaggccccctcagctttgaggcgctgctcgcccaggtgggggcgctgggcggcggccagcagctgcagctcggcctctgctgcctgccggtgctcttcgtggctctgggcatggcctcggaccccatcttcacgctggcgcccccgctgcattgccactacggggccttcccccctaatgcctctggctgggagcagcctcccaatgccagcggcgtcagcgtcgccagcgctgccctagcagccagcgccgccagccgtgtcgccaccagtaccgacccctcgtgcagcggcttcgccccgccggacttcaaccattgcctcaaggattgggactataatggccttcctgtgctcaccaccaacgccatcggccaggtgaggcggccaggcgggccgcgggtctgggggcgggcagagagcggcgagggcggggcctcacgcccgc

SEQ ID NO: 5733 - DNA, 6343 bp, Homo sapiens; identical to SEQ ID NO: 5730

SEQ ID NO: 5734 - DNA, 1109 bp, Homo sapiens
cgacatagggtggcgtgcagggagcgtgctttggcaccaggcgggcgcgagggggcagggcgcacgcccgggacacgccttagggaaaccgctcctgggcttggtagctgaacttagacgtcgagtgcagcccgcccggtgcgcgcggcgtcttactgccagatctcggaaatcagctgccagggtggggccgcgttttggcgacggccactcggccacccctgccgctcccgcctctcccaagagatttttctagcgggttaatttcctgtccgggtaaaccctttggtgagtccctcgcccctccctccccgcccctcccctctccatccctgctgtcccggctccccagtccgtccgcgccgcgctccatcgcccccgcacgcccgggcgcacgccctccccgcccgggccgccctctggctccccgcgcccggcagccagtgcctcaccgcgccgtcccgcgccagggctcgctccgagagccgcttccttctcgccgcggccggcgcgggccccccggccatgcgcccccgagccccagcctgcgccgccgcggcgctcgggctctgcagccttctgctgctgctcgcgcccgggcacgcgtgccccgcgggctgcgcctgcaccgacccgcacaccgtggactgccgcgaccgcgggctgcccagcgtgccagaccctttccccctggacgtgcgcaagctgctggtggccggcaaccgcatccagcggatccccgaggacttcttcatcttctacggcgacctggtctacctggacttcaggaacaactcgctgcgctcgctggaggagggcacgttcagcggctcggccaagctcgtgttcctcgacctcagctacaacaacttgacccagctgggcgccggcgccttccgctcggccgggaggctggtgaagcttagcctggctaacaacaacctggtgggcgtgcacgaggacgccttcgagaccctggagtcgctgcaggtgctggagctcaacgacaacaacctgcgcagcctcagcgtggccgccctggccgcgctgcccgcgctgcgctccctgcgtctggacgggaacccctggctgtgcgactgtgacttcgc

SEQ ID NO: 5735 - DNA, 1109 bp, Homo sapiens; identical to SEQ ID NO: 5734

SEQ ID NO: 5736 - DNA, 1384 bp, Homo sapiens
cggaagggacccgccggctgcgcctcgctcaggctggccggggccggtgtgaccgtgtgaccccgtgcacactgcgctcgggttttcgtgaatgacagcagcctgcaactcccagccggagagcagcggtggccaccgccgggcggaaagggttacaagccagaatgcaaagcgatttcgccccgggtgtgggggaccccgggtccccggccacctccgaggccgggcgtgctctgctcgccttcctccgccctgggcgccggggcgatcctaccttgcgctccaagctgggggttctccatgttcgtcgccgccgagtcccccgccgccgaggcgctggccgcggctcccgggcccgggccggggccgccgccgccgctcagttccgccagtctccggttggtggccgtgagttcggctcgcaggttggtcacctcctggctggccgactggaccgccccatcgatgcggagcgcgagctgcttattgtcttccatcatgctcaggattttggcctgggggcgagagaggtgacaaagagctgcatgatgcgcggggggcgcgcggccgggcacccccggctctacctgttgtgtcctccgcggcccggcttcgcccgcgccccgacccccaggcaccggcagcgccggttcctccggcacaggaatgacagcggcgcctccagccctagccgcggcggtggcgaggcggcggggggaggaggcggaggagaaaaaagaggaggagaaggaggaggaggagcagcgatcgccgagaccccggcgggcgggcgccgagagctgctccaagaaggacaccgcgcgccaccaggcactctttaaatggagcctaccattcgccgccggctcgggagggggtctcggtcggaggctgggggcacccttggcctcccgcgcccccgtacttcggagacacaccccccgggggggcggaggcggcggacggcagtcgggagggggccaaggtggcgcccctggcgaggggcaggggtcgcctggaccgaggccggccctctgtcccctcccttgagcggtggggcagcccccgccctggagaactggtgccccgagccgtgctaaggttggggaggtgctgggtgctcggaagagagggtgcttggaaagggggcctcagaggggagccggggtggatctccatggaagggagacgcttgcgccagctcaggagtggagttcgtgctccaccggttccttaaactgcgagtacgaaatccccagaggggagctgagctggtgccccgcgtgcctctcactctccaccccccacccgcaggccagacctgcgctgcccaccccaggagggagcgcctatcttcctcggcgtgggccgctggtgctcccgc

SEQ ID NO: 5737 - DNA, 1384 bp, Homo sapiens; identical to SEQ ID NO: 5736

SEQ ID NO: 5738 - DNA, 835 bp, Homo sapiens
cgtgaagccggcgccactcagtccctcccgctaactgcccatcctctccggccattgcctcccgagtgcccatcgagtgcccgtgggtcagcgagcggggccgctggaggaaggggcgggtgtgcccagggctggcggcgggcccggggtccctgggaggaaagggccgctcgctcagccccctcccggagcccagagacggccccggcggcgcgggcacacaggggcacatagcgcggggcggagggagggggtggcggcaccgtccgtggagggcgcgggctcgcttagccttccgcaccggcgctccctcgcgcggtgccccttccgcacactcacacgcactcattcccacagctacacactccagcacctgcaggcacaaacgcttgcagggacacaccacgacacagacacccaagcacacacaggtatcggctcatagactcgtccctgagtcacacacaggtatcggctcaaaggcacaggcaggctcatagactggtccctgagtcacacatagcccagactcagatgcacacacacagatgggaacgctcgcctgcacgtgcacagacacacggacacacccgcacaccaccgcggggttccgagcacacacgcgccccggcagacgctcacagacacacgcagggccgggagcgcacacacacagacacaggctcatatagacagactcggtcctaaaaatacgcactcgcagaggcaaaggctagcgcacaagcacgcacagacacaccgacaggcggcccccggacaccgcgctccctgccgcactcacggcccacgcaagggctcacacacggcctcacgg

SEQ ID NO: 5739 - DNA, 2248 bp, Homo sapiens
cggttcccgggtcagtctcccgctgccaccgccgtccagccagcgcccgccgcgtgggagccgcgaggccaggctccgcagacggcgggctcccggtctcgctgctcccggcgggcgcgtctcctccagctggtccggccgctgggctgccgccgtctcccagctcgcggtgccagctctcgcgctccacgcctggctcccgggctccgtgccctcgcagtagaagggactggggccggcggggcgggtggggacgtctgggaagcgaggagagtcctcgttctccgggcgtccccctacaatggggccagggtccccttccccgccccccgcgcaggtgtgagcgcgcgagtgtgcgcctcggcaagtgtgagtgtgaagtgtgtgtgcgcgggggagtgcgcggagggagcgcgggcggcgggcggcgcgggaggcgggaggcagggcgcaggggagggggctgggagggagagtgtgcgcgcgtgcaactccactccggggctttgtgcgagcccgggcgatagcatcggcggcggctggaggaggagcggccggagacgcgtgcagcccgcccgccagagcccggcagccggggcaggtgggagcccgcgcgggagccgagccgacgcgagtcggagccggagccgagtccgagcggagtccgggcggagcccaggagcctcgctcgcgggcagcccgtgggcggcagccaggcggggcgggcgccggcggggcggccccccagtaagatgtgcgcggcgccgcggggcgccccccacttgcagcggcgctcgggagccgggcggctgggccaggcggcgccttcggggctgctgcgcgcccgcgcctagagctgccgccccagggagcccgccacggccgcgccccgggcacgctcggcggcgcccaacgatgaccgctccctggcggcgcctccggagtctggtttgggaatactgggccgggctcctcgtgtgcgccttctggatcccggactcgcgcgggatgccccacgtcatccggatcggtaagcgctccctggagccgggggtctccgtgcgcccgggagggggcgggaatgagggggcctcccaacgcgttccggagagattttcctaacctctctccgagctgctgagccgatcggtgaccaccaggagctcctccctgtgaggacaaagttccagagtcggggtcacgggccttacttattggggaggaggccgccgggccgcagtgggcgaggggcccttggcgcgctcctgggaggtcagacctggcacagtgtggcgaaggtttccagtgcgatcccgagtcgagggcgcatttcgcggtgactgccagcatgaaccgcagccgaccgagttctgcgatcgggcttctccgcagagtggggaccctggggaaggcgccaacttctctcctctgcccacctcactccccgcgggcccttcgtccccacctctggcatagctcgagcagccgcagcgaggtcgcagggcacagattcgcatgacgagggcagccggtcttctctcctggtggtcgcccttggcctcggtggtaccggttcagccccgtgccatggggcgggggttgggggagcaggaccccgctgcccgctgcagctggtccctcggggccaaggcctctctcccgcctggggcagtgcaggtagagggaagggacgatggaggccgcccagtgcggcccgggcaggcggcccagggacgccagcggtttttaaagttagcccgaattcctccgcagctggcggcggctggcggggctgcgcgcggctttccggggctccggcttctccgcgtctcttctcgccggagactcttactccggtctttaactttgttgtggccgcccaaggcaccctgcaggcctgagcgccgcgcatgtcccgggccgacgaccggcagggctgggcctggccgggctaagacggagcctccatcaccgcaggccctgcgcccgccaccaggccggacacctgggccgcctgggttcactcggcgccagcaccagcgcctggcaccaggcgagccggactccgccgagccagggccaccttcctcctctacagctcttcttcagggcggaccttgggctgccagcggcgtgaaagaggtgccggaaccggtgtcgggcttggtttccgtacttgagattttcctaggaggcggtcagaaacccagcgggtgggtctcctcctgggcggccgcccgggagccgg

SEQ ID NO: 5740 - DNA, 3541 bp, Homo sapiens
cgaggctggacagctcccggcctgcacgccggatttctggagagcccgagccccttccctgagcccatccttctcctctcccggggcgtgatcccaccacgaccacagccgatgagccgttcaagctgggagaaggagcgagaaggctgcagcggcgcaggtcagatacccctgggcccaacgtccacccccaactagcgcccttgccagcagcgttttccccggagccacagtctccacctcgagatcttctccttctggaaccccggagcgcggccgggtaccaggggctcgcgtaggactgtagaaccgctgccgcccgccgtcccagccccagctgcccgcgcggtactcacctgggcctcagtgcccgggagaaggtgtgcccgcgcgaggcgtgaagccagagtccgtccgactccgcccgcaccggacgcgctctcagggcagaggaggtcggcggagttgtgacgctgggactagaggaaggagaaggaaagccgagacgggccgggcagacgcgccgaggagcgcccagtgcacgctggcagccgcgggaggcgaggcgggcgcggtgagcagtcgcgccggaaccgagccgcgaatccgcgccgcctcgcgctcgcagccgccaggacccgcgggaatcctggtccgccggcagcggtactgaggagggaggggcgcggggctgagccgcttctcggagcccgagcgcctcccggagccggcaatccctgctgcccgggcgggatgcgggcgggaattcagctcgcgtggaatgtgggaccggccgggctcggagtctccagcgctgggggaaagcggggcccacacagccaggacgagagggggtgcggtcccagggccacccccgcgccactccccacgtggcggccgcgcccccggggcgtgagtgtgtacgcggacggtaggggggccgtgaatgaagccccagcggccaatcagcacggccggcgcgcgggaccccgggagcgacgcccaatggagagctctgggcggccgggcagggtggcgggcgggcgcgcggggcgggggccgggcaggggaggcgggaggcagctccgcgggcagccaatgggcggcgggcggggtggggctccggagcgccgagcgggtcggggctttaagccggcggagcgaggcggcggggcccgcagacggagcggagcggcggcggcggcgcggcgcagggcgcggggcggcatggccaccaccgcgcagtacctgccgcggggccccggtggcggagccgggggcaccgggccgcttatgcacccggacgccgcggcggcggcggcggcggcggcggccgcggagcgattgcatgcaggggccgcgtaccgcgaagtgcagaagctgatgcaccacgagtggctgggcgcgggcgcgggccaccccgtgggcctagcgcacccccagtggctacccacgggaggaggcggcggcggcgattgggccggcggcccgcacctagaacacggcaaggcaggcggcggcggcaccggccgagccgacgacggcggcggcggcggaggtttccacgcgcgcctggtgcaccagggggcggcccacgcgggcgcggcatgggcgcagggcagcacagcgcaccacttgggcccggccatgtcgccctcgcccggggccagcgggggccaccagccccagccgctcgggctgtacgcgcaggcggcctacccggggggcggcggcggcggcctggccgggatgctggcggcgggcggtggcggcgcggggccgggcctgcaccacgcgctgcacgaggatggccacgaggcgcagctggagccgtcgccgccgccgcatctgggcgcccacggacacgcacacggacatgcacacgcgggcggcctgcacgcggcggcggcgcacctgcacccgggcgcgggcggcggcggctcatcggtgggcgagcactcggacgaggatgcgcccagctcggacgacctggagcagttcgccaagcagttcaagcagcggcgcatcaagctgggctttacgcaggccgacgtggggctggcgctgggcacgctctacggtaacgtgttctcgcagaccaccatctgccgcttcgaggccctgcagctgagcttcaagaacatgtgcaagctcaagccgctgctcaacaagtggctggaggagaccgactcgtccagcggcagccccaccaacctggacaagatcgcggcgcagggccgcaagcgcaagaagcgcacgtccatcgaggtgggggtcaaaggcgcgctcgagagccactttctcaagtgccccaagccctcggcgcacgagatcaccggcttggcagacagcctgcagctggagaaggaggtggtgcgcgtctggttctgcaaccggcggcagaaggagaagcgcatgacccctgcggccggcgcgggccacccgcccatggacgatgtatacgcgcctggggagctagggcctggcgggggcggcgcatcgccaccctccgcgcccccaccgcccccgccggcggcgctgcaccaccaccaccaccacacactgcccggctcagtgcagtgaccccgcgggccgggcccccgccggcgcgctgcagggcgcgggcgcgcagcccgcccgcgcggcctggactctttttgttcggttgctttggattttacaaaaaaaaaaaaaagcccagaaactttcgaacaaaaccaaacacccggacgaccctctccggtgagcggcgaagacagcccggtaggctgcgtcgcccgagccccgggagagaggagcgaagatccggaactcgccaactcaccccgggcatcctgcccgccgcctgctctctgcccccatcccctcgacgacccccgcccctgcccccccgggctgttcggggccggatcccggcagcggcctccccaaagcgacaggtaacgcagtgcggggttagggattccccgggagagaggacgaagcgaggagagttctccatcccctctccccgcgtggactcctgagcctgcgggtccagggtggggggctgtcactttattcgctacacgcctcttctctcctataaggatgcgccccaccccgctttcccctttctccgggcttggttttttacggtttttatttattcgtggagcctctcggctcctggggtccttctaactccgcccgcgcccttaatttaaatcgcagtatactgtatttatcggggccccggaggggaggtcgcgagagccgcgtctgtgtataaaagcaggaaatagccaaagctttaatctagcctaatttatttttccccttatatttccctaccctaccctccccccaaaaaaaagcaaaaaaaaaaaaaaaaaactaacaaaaaaaattcgagtgttcatttttcgtttcgtttcatccgagccccggcttggttcccggccacgccggaggggtctgcgctcccacacacccagacgggaaggggcttctgccctgctgcagaccgaccgccgcatagcgcggcccctgctccccgcgg

SEQ ID NO: 5741 - DNA, 1513 bp, Homo sapiens
cgcaagaacggcccagcgaaccctgtgtaggggaggcgccgaggattggagaggctctgctaagggccccgctgggcggaaggcgcgcgctccctcccatgggaaagacagatgtggggctaatgaaagggaggccgagaggcgcggggacggccggggagacgggggcgtggcggggagaggaaagctcccggagaaagccgatcggaccaccgcaagcgaggcatgcagcggagtccggaggaggaaggcgccggggactggggcagggccagggcgggacgggggtggggggtgtggggggtaccacaggcagttggacccgagggtcctgagctgaaactcaacacccgcctttggaaggatcgtccctctttctcctccgccccttcccttcccctcccctttcccctccctcctttctcttaatccccaggacggagccctgcgcgggagaggagagggcctgaggggaggagaaaggaacagcactgagaggggccaggagcccaggaaggggagggaagggcagccgcgggccaggggtgagcctgcgggccacgcgcgacccccggagccttcgcagccctctcagtgtccccactcccagcccaggcgagtccacaggacccgggcccctgctcctccctcgccttctctttgctccttcttttgctttgtggcctttctttcccttcccagagacacctgggagctgcccccaagctttggggcgccccgcggggccctgccaagggtgcgtgtgagagagggcggcggagccggcgccgggtgccaggggccgagggtgggagcgggagctcgtggccctgcgccctggagccgaggactggaagggggctgggcccctccgccgcctgggcgcaggccgcgcgtcgggaaggcagtcccgcctgttccaggggtgcctgcgtgctggttgctgctgcccggggcgaggcgccgtagcggcgacctcagacccccgggcgcgctgagtgagtgcgcgcgtgaaaaccgccgcaccgccgggggtgcgagtgtctgggccgaagcggccactccagcgacccagccccacggccacgctctcgggggcctttggctccaggcaacttggggcaagcgtctcagttctcgctctcccttcctcccagcggggtcgccgcagaccccagccctgggagcaccgctctgcagcgcggccggcgggtggagacggttggcccctaaactcgctcgtccagcccaaccgccccggcggcttctcccagccctcgaggctctcctgagcggcctggagaggcgtcgagcgcagcccagcgcccgcctgctcacccgccccggcccgggaagggaattttcggatcctgcgagcccggggcgcccccgcggcctagggcgggcagctcccggggcctggccgagccggtggcgcccgggaggccgcggggacagcacgcagcgcgcgcccttggatgccgtcccgcagcgacgccccggcccgccccgc

SEQ ID NO: 5742 - DNA, 3541 bp, Homo sapiens; identical to SEQ ID NO: 5740

SEQ ID NO: 5743 - DNA, 558 bp, Homo sapiens
cgtgcctggctctcggaaagtgcggacgagacggtgtgggtgggctaggagttatttgcaagggtgcttgcaaaccgtgaagcctagaggagaacgggagaaggatggaaccgagcggagaggggaggtgtatggtaagaaccccgctcgccccgggttgaaggggagctgtgggtcggcggtcaacgcttgaaggagaggggttccgggtggcgggaggcggctggggacccgcgcaggccagcgtgccggcccctcccagcccatcgctgccgccgccggggctgctccaagggagccaagcggagtgggagcgggtctgcgcgtctctgctctgcgcgcaggggcgggggggcccaggacggggcgccctttcccacccacatgctgatctaggatctccaagcggctcggcccaggacaccgcctggaaacccagccgcgtgggagagggcgaccccacctccaacccccttgctgtgcgccggcccagcccctagaagtcagcggacggcggaggaggtggcccggcctctcttggtggtcctgcgctctcgg

SEQ ID NO: 5744 - DNA, 7244 bp, Homo sapiens
cgcatctgctgggccgcctcgggttcccgagtcctcgtggctacacccttggcttctgcgggatccccggtccggagtggggaaatctcacggtgacctggcctcaagcgagaaggatacctgggccaccgccccctcaaaagctaggcagatttgtatagtttatttcgttttcggtttaatagaatttcccgaaaactttgtccaaaggagctctgggagcaggcgcctggcggcccctgcgcggaatccggcggttgtcggcgctcttcccccgaccccatggctcacctacccaggtgcagccggggctagacatacttggcctcggaacctccaggtgttggaaggtggggtctgggtcctgcgctcctagaggacatattatccctgaagcactcccttatcctcacttcacgcgggagaccctcgcgggggctgacacccttctctctcctaaacccattcacagactccagcaagtggcattttctgggagcgagtaaccagctttttatcgctatcatagaccttgtccgtgtcggagcgccctcgcgccggggcctggtgaactttctggaagctctccgcccggtcctccagcgaatcacccccacccactcctccctccagcctcagcctcccggtgggcatcttccagggctcttccggggcgccaggttctgcggtcttcgggtgggggcccgttagtcgcaccgtccttcccccacccccattcctgggctcagaagctgatagactgacaagacgcggcccagtagtcgtgccaggcggaatgggctgcgtcctgaggccgcgacgacccgggccgagtctgcgcgcccagattcccgccggcctggaggttcgaaagagcaacgcagagacgcacggtcaagagtggagggagaacgacaggaacgctcattttcctcattatttaaacgaattttctttattctgaaggagagagagaaaagtagagaacaaaaacgagagtgacagaacattagaaattagagggaaaaacagaattagagggaaaaacagaactttagaaattagaggggaaaagacacagagataaaatcagagctacagaaaccgagggcgactcgcccgagggccgcggcattaattccagatgtttgaaaggcaacagcctttcaaaaaggaaacaaaatctgaaacctgttacctcttctgcagaacgagctgttcctcagggccgtgacatcaagacaagacgagaataaggcgaaagttaaaactgaaaactgtccgagggggcctcccagcagtgactttgtctcttgccgggaaggtcggacagaccgatgcgcgtcctgagtttaagagaatctgcggagacacagaggccactttttactttcgtttagaaaagaaaaaaaaaggggggggggctatttgttcatttgcaataacgacaaaaagaatcccaccaccacggaaaagaaatcgagatgctgaaaagtgaggaaaagagagctcaaaaggggctgagggacgcgaaaagaggggcggggagaggaaaggctcagggcgcgagggacgtggcgggcaccgacaggaagtgcaatctcatttctcttcgctgagcttctctttaaacacgaaaatcttcataaaccacacttaccctccaggatgactatcgtatcaggacttttaaaataaagtaactgagctttaaggagacaggaggaaaaaaccaaagcagcccccaactaccccaaactcgtcggatttgggagcgcgccgaaacatagcaggaagaaggcaggaaaaatcgtcctggcatttatgccttgaacaccctcccttccccacccccgcacccttgtcccgcccctaccccgaccgcagtaattgaattgtcacctgccccccatcccgcctcagggctccagagccacttgggaagctcggctttgccaagcgccccaggccagtaagagcggtgcagccgagccggcgccccagaagccgagaggttacacaagtctacgcagagaggcgcaccggacacggtaattaggagcaattcacacgctctcgggcgcacggaaactacttgtcaggaaattttcaacgctcctcctcgcccacttttttccactcctttcctggcgcgccccctcccctcccagaggcacgcagtggagcttttggagtttcgaatctttcggacactgcagaatgcggggctccccgggcgcgggcccggccaatcagagcgccgtctgcctcccctggccaatggcaggcgccacattgttgtccaattctgtctaatggagccctaaggaccaacaatagagcgggcgagcggctcattgagagtctggcagcgccgggcaactgggccccggctgcgcgcagcgtccggcgcgcaccgcgaggggacccggcacggcgagagtcaggtcgcgggttccaaccacgcggcccgcagacgagcctccgacccggatttctgaagggagggttggactgcgctgcgttctgaggggtccggaagttcggacatggtgactgaaggagggtgacgtggtcagataaggggccgggggcaaagggaagcggccaagagctccagcgtcgccagtggagccgggaggcgcgtgcagcgccagcggaggaggaggatcccggagcccaaggcaggtagttgagggccgcagggagagcagtgggtggagacctggtctgcggcccctgttgaggaggcctgggccccgtgggccttagggacgcccgaagggtctgggagaggaggcaacgctcatagagaggaggtctgggactctcggacggagacacaaggactctgtcgcgggctctggcagggacggggaacgcgggaagcagaggagaccgcggcagaagcggggagctgggcctgcttgggccttatggggctgcggcgtgggagggactctggtgtccgtttatggccagttgcgaaggcgactcccctggcttggtgcggcctgctgggccatccgtgtcctaggaccccaactctgagatcagaacgcaggagcctgcgctcgagaggggtcccctgggaccccaagacggggagggcgtgtctgacgactctgtccctaaacccggaggggaggggagggcagtgtgaggtggtcttcgagaaagatccccctcccgaaatgcctaacttttcgcaggatacgtcttccgccccgactactactccagactgcgaagctaaaaaactgcaccacaggttttacccaatcccctcccccagcatttgcctgtggggttttttcttacacattcccctctcccaggcgcggcccctggatcccggacacccagatcagctgcttttcactgttttccttgcccatgaagctcatctttgggctgggtttgcctatacagaaagtttctttggccgaatttttctctttaatacttcccagtcctaagctaaattccacatacattttgtctctcactctctggaggccctcaccgtggaacttttggcgctcacatttttacgggtcccagagccactgggcctaactttgcccaagttgtttcctcgtcctcactctgcttcctaaagctattctttctgttgttgatttttctctccaaagcttctgccccaaactgcattaaaaataaacaaacaaaaagaaacaaaactccggcccaaccggccttcacatctgcgccttcacatctctctcctcttcacccttccaccaaactgaccgttttgctccgggttttcctgttttgcccttggcatcagcctaacttctgggccaaaactgtcgctctaatcccagtcccgtcaaacgagcatttctctcacccgtctcaccccaattaggctaagctttggggtatcatcttaacttttccaaattctcattacagccatctgaatcagtgactttcacactttacatgtctctttattttttccagcggaatcactaattcagacaaaatcttacccctagcgtgtatatcaggtctaagagcagccatggccagactggggtgaaggtgctagggctcacaaggaggttccgactgcacctcctcccagcaattctggcccctctagcccagcctccgcggcccaaatttccctctccagcttgggttcctcaaggcggcgctttggcctagcgcgcggtgtgctcctcaccaggtctctcccctctcccaccttctttcccgtcaggtcctgtcatggagctgcgctcggagctgcccagcgtgcccggcgcggcgacggcggcggcggcaacagcgacggggccgcctgtggcgtcggtggcgtcggtggcggcagccgcggcggccgctgcatcgctaccggtgagcgtggcaggcggcttgctgcgggggccgccactgttgctgcgggcagccgagaagtacccgcggacccccaagtgcgcgcgctgtcgcaaccatggcgtggtgtcggccctcaagggccacaaacgctactgtcgctggaaggactgcctgtgcgccaagtgcacgctcatcgcggagcgccagcgtgtcatggcggcgcaggtggcgctgcgcaggcagcaggcgcaggaggagaacgaggcgcgcgagctgcagctgctctacggcactgccgaggggctggcgctggccgccgccaacggcatcatccccccgaggcccgcctacgaggtcttcggttcagtgtgcgccgccgacggcgggggacctggagcgggagcgcccgcggggaccggaggcggagcagctggcgcagggggctcaggtgagagcgcggccaggccgcaggtaggggcagcaggatcgtagctctggggcacggggcccaggggcttgtctcggttcagaaagagtagaacccccgtgtccagtcgccgcgactgctagggttcaccgctcgcccagcctcgggtatggagcgtgggtacagaaactctcctttctcccgcttctggagcatttgcactttacccctttctcctgcatcgggccgaaatgtacacgctttaatttttttactcgcctctacccaaacgcaggcaggtccctgcttctttgcttcgtcttctccccaggtggaaacctgcgcatcttcgttcgctctgcgcttctccacaggccctttccctctgctccttcccaactcccttaaggaatccccccccctttaactgacaccctaggttttgagacgccctaggttctgagacgccctagtttcttttccccttctcgcgttcctaacgccctctggacaaccgcttgctgcgccctccctccttctagtttcttccgcaccctccctggtttctcaggtctgctttcctatgtcttttcctcttcgcttcctactgcctgcctagcaccaccctctttttctggacccccgtggctttttgtggggagggaagaaattaggccagagccgttgagggaaaggagggatccgctctaaacttgggagggaagaacttctcaggtctcaattttggaaagggtggattagaaacaggggctgtacttctgcctgtagagaagcttgggacctcctagataaccaaggcgcctttccttacaggctgcactgccagggcaggcattttctatacagtgggctcttctgtacagcgtggttaggcagaagttatgttgtctcttgtttgaaccctggacctggccacttctccacggcagggcaggactggaagggcagttaagggtggaggtgttggggcacagacgtggggaaagcagcactgaacatcgagtttacagggcacaggtagttggggttctgaggagtacagaaagagagggagccctggggtcagggctgtaggggctcagagcggaaggaatgctagagcaaaaagaaagaggggcactggagcctagtgaataagggctgtggggctgagggagaggaaactgagatccaaagggccgaggtgctgtgactgctgtcttctagctaaccgctcctcacgacacgttttctcccctcccagaggccaagttgcagaagtttgacctgtttcctaagacgctgctgcaggcaggccgcccgggcagcccgctgccgccgccggtgaagcccttatcacccgacggcgcagactcggggcccgggacgtcgtccccagaggtgcggcccggctcaggctcggagaacggcgatggcgagtccttttctggttcgcccctagctcgggcctccaaagaggcaggtggcagctgcccaggcagcgctggccctggcggcggcggcgaggaggacagcccgggctccgctagccctctgggctctgaatccggttcagaggctgacaaagaagagggtgaggccgcgccggcgccagggctgggcggaggctcgggtccacggcagcggacgccgctggatatcttgacacgcgtgttcccaggccaccggcgaggcgtcctggagctggtgttgcagggctgcggcggcgacgtggtgcaggccatcgagcaggtgctgaaccaccaccgtgggggcctggcggccggcctgggccctgcggcgcccccagataaggccgccgtgggtgctgcagcagctgcagacgacgcgtggcccagccgcgtcgacgccgccgccgccgccgccgccgccgccggggggcctgggctgcctgcgccgctgcaggcggggcccgccgcacctccgcaccacagacccttgctggccggcgccatggcgcctggggcgctgggctcgctgagcagccgctcggccttctcgccgctgcagcccaacgccagtcacttcggtgccgacgcgggcgcctacccgctgggcgcgccgctcggcctcagccccctgcgcctggcctactccgcggcggcggcgcacagccgcggtctggccttcatggcgccctactccactgccggcttggtgcccacgctcggcttccgcccacccatggactacgcctttagcgatctcatgcgtgaccgctcggccgccgctgctgcggcggtgcacaaggagccgacctacggcggcggcctgtacgggcctatggtcaacggcgctccggagaagcagtagggcgaggggcctggcagccggccggtccccaaacaggaaccccagccctgttcccgcgggccatcgacccctcttcgcccagcgctctctctgcgccctggctgggcgt

SEQ ID NO: 5745 - DNA, 824 bp, Homo sapiens
cggagccgctaggagtgagcatcccctctccgggatacccagctccgcggcgtctcccgcgcgccctggccccacacggacctgccagccccagggaacaaaagcggagcccgctcgccctctactgcagccggaggatgagtcgagagggctgagcggagagtgtggtcctcggcggctggaggtaggagaatatgttgcgcccgcccgccgcggcgtgagaggctcgaggtgggcgcgccggggtaggggcggccgcgggcgcctgtccgtctagtgggcgctgcccggacctggcgaggtggtggtctgcaacactgtgcccgcactgcctactgtgggtcgggcgccgagctctcgcggccgcgagggagcctcctgggtgggaactggaggcagtgggggaaaagtctggagccagaagccaggcagcggctgccgcggcggctgtggagggctgcctgcggcacttggcggcgcgcgtctcaccgcgaagagcgggaaggcggcggctgcagtgtgcgcaaagttttgggtggcgcgcaaaggcgcaggcgagggccgccgcacagagccgcccaagttgtggccggagcgccagggcgacccctgggaaccccccaagcggaatcccccgagacaagcggctcttgctccctgacaccccagtcgaggccgagttgacgcgcagccatttaacccttcctgtcccggggaaacaacttcatccgcgtcgacgactggactctggctggctgggcagcgtcgagacttccggggggttcagtcctgtggtcttgagcatttcctcgctcagtccgcgt

SEQ ID NO: 5746 - DNA, 824 bp, Homo sapiens; identical to SEQ ID NO: 5745

SEQ ID NO: 5747 - DNA, 1415 bp, Homo sapiens
cgtccaaaatgacttcgggcgccccacttaaagagacgccttggttcaggtagcccgctggggtcgaaggccccattttcccccgatctatcgggcttcgcggcggaagtcttcgttcaggcaggggatgccctaggagggaaggaggcgacggtgcccaaggacgtcggaagccggggatctccgcttccctcgggccccggctaggttaccagtgctggcccgcggcgcgggtgcccagttgcgcctgggacactgcgggcacggctgtggcggcaacggcagcggccgccgcgtcgccgacgcccggcaggactgagcgcacggagcggcggaactcctcgttcctccacgtgtagagcagcggattgagcgcggacagggcgcagcacaggagccagctggccgcctgcactccccagggcaccggcagcgagaagccgctggccaggctcacccacaccagtggctgcgtggccagcaggaagacgcagcagagcagcagcaccgacaggccgctgagacgccgctgtgcccgccgcgggtgcagcgcgggcggcaggggctgggcctgcgccgggtgcgcggcgccaccggggcccggcgcgtgctgggcgcccgggaaggcggcggcggcggcggcgcagccgggcaactggtgcagcaggtggaagttgagcacgctgacccgcttgacgctgacacgcacgcggcgcacgatgcccaggtagcagtgcagcagcagagctgtctgcgccagcagcgccgcggcggccagcagcgccgggtagtggactcgcggtggcgcggcgccgggccgcggtgcccagggcgggagcagcagcacgaggcccagggcgagcgcccaggacagcgccagcatgcccgccgtgtggcgcctctggtacagcgcctggtaggtggcgggcgcccgggtgatgagcaggtagcggttcagggccacgaggcagtgggagaggagggacaccgtgagtccgaggcccagcagcccaccccgtagcaggcggtagctgcccccagcgccgtcccagtctgcggggggctccgcagagccggtgggcaggagcccgagcaccgcctcctgcggcatccagagggcgcagacgctgaggtcggcggcgcagccgttcacgatgaaggcgttgctggtggtctgcagctttcggaaggacgacacgagatagatgaccatgccgttggccagcgtgcccccgatggccaggcccgaatacaggagtgacaccgggatgcgccggcccgcccacgactcctcttcctcgcagagcagcagcagcgagccaccggtggtggaggaggtggatgtggaggaggagttggtcattctggccaactcttcacacctccctcgctagcgtcggcttctggcagcgcgg

SEQ ID NO: 5748 - DNA, 1415 bp, Homo sapiens; identical to SEQ ID NO: 5747

SEQ ID NO: 5749 - DNA, 3039 bp, Homo sapiens
cgggcgctcacaggcggcgcgggcagcgcgagccccggagccccggaggcctgtgcgccctgagccggcatggaccccgagcactgcgcgcctttccgcgtggggcctgcacccggcccctatgtggcctcgggggacgagcctccgggcccgcagggaacccccgccgctgcgcctcacctgcaccccgcgccgccccgcggcccgcggctgacccgctttccggcctgcgggcccctggagccctacctcccagagccggccaagccgcccgccaagtacctgcaggacctcgggcccggcccggccctcaacggcggccacttctacgagggccccgcggaaggtaacgcgcggcgcggggcgtagcgcgcagcccgaccctctcttcttcttccttacccgggcccacccgggccttcctgcttatctctcccgctcgcctatttctcaactttttgcccctctcgcctttcgccacggcttccacggaagccgggttggcgctggcccgggccaggcaaaggccagtgtggggcgggagggtgaaccaccgttcctcggcggcgggaatggaaggcgggaggtcgagggaaggtgcagtggcgacggcccggagtccagtcggggcccgaaagcagttggacctgggaaggagagagcatgctctgccgaagttggactggaactgccacctaccctgaagcccagacccggccgagggctgtggagccacactgagacctgacgaagaagcgcggcttttgtgtctggcgccctttgagggccctgaggctgggcctcaacctagagtggtcaaatcggggtcggctggggactgcggcctggtcttggcccgtctctcctccccgggcctagccttcacaggaagggtgctgcctgtgcggcagactggcacagtctggccgcgactggtcgtgcaatgccagggctgtcctcaagacggaataactgtattcttatttctcatactaagctggcctccctgccgttatgcactatgatagccgcccttctggcagtcttggcttccccgcgctggatcatcaccgctgggcagtcaggagcagccctgggcagcctaaccccctggcgccgcgggctcacgggccggtgccctgtgctaaggccggctggaccgcgccggcatccgagaatgcgcctgaaggcaggggcctggcaggctgatcggcagctctgcggccgtccgccgcaccctatgacctgtaaggcgtctcggcttccgcactgcacccaccttatctgcgctgccatatcccgcagcctaggcccagaactggatcctccaagatccgcctcaaccccctgccgccgcccggctggcgcctcgcgggcctccacggagtggccgggcatctccggctttcgcccagccggggcggtgggaatgtgtaggggagggcggggaggtgtgtgtgggtcaacggaggaaatgaacgagtccgcggagcttcgtgtctgtgccctttgaaagaggctttcctgataaaaaccacagttgggacttaatgagaagcagttggcctggctcctctgatcccagccagacggcagaggccgcgcagtgcggtgagcaccgccagagacaggtacccggcctggctcagcgctccgcgtcgggcaggagccacccccccaggcccgcgtccctgctaggcgcgccgcatccggcaccgacagctcgggcccccggaccacaccggtgccgcgcgaactgcagagagcgctggtgcggaacgagcggccgggagaaacccagcaccccgggatccgacggcaagggtggccttgacaacgaaataccgagaaagaaaaccaaagaaagcgagcgacaaccaagaaaaggggaagggaaattgaacaaaacaacggagagcgcggcgagaacgagagggtaaatggcagtcggcgagctgggatgaactaaaatgaataaatgaggaacgaacgaataaaaaaagcaggagcaagatcgaacgaaacggataactagagaagggggaaaggacaaagagggagggagcagactaaacaaaagaaaacggagcatgtttaaagcgtagaatatatcaaaatgagaacaagggggtaagaaaattaacgatttcagttgaacggaggacaggccaaacgaaagggaggcaggcgggtgcgagcagagcctggtagagatcctggcggccgctagcctctggcgctcttgccggtgttcaacgggctgccagcgtccctgcggcagagcggacctcggcgcagcgcggcgcgcggtggagcctggctgcttgaggacagtcagcccccagggccgcacagcctacttggtgggaagtggcgggcgaagagggaacccgccttatttcccggtttttaaaataaccggctcggagcgtttccagtccacacgagtgagcgcgcagctgcgccccatctgcggcgcgatctttcacgaggctgggcagttgcgcgccccagagcctggcgcacctcgctcttctcccgcctgcagtccgccgcccgcgcagccccaggccgccctttgctgagagcgcccagccttgctctgaacccaggctgcgtgctggcgctgccagccactctcgcgccgtccgcgcttggctagtctgtcccgagtttggctctgacgtcgaaacacgccctcggcaagagactcctactagagttttgcccgctgccgctgaggccctgagccggatgacccggccgatcgccaaagtcgaggagagtcccaagttcttagacccgggctgaggcttctgggccaacgctgagaacccccaagaagggcaccgaggcctcaccggggtcctgcccacggcgtttatgtccactctggctttgagtcttcggcgggagctgcaggagcctgggcctcagcgagttctgcaggtcgcttagtgaccccacagtggccggaggaaacagtgcggcgcgggacaaggctgcagcgaaatgtgaaagccaaggctggtcccgcgg

SEQ ID NO: 5750 - DNA, 1277 bp, Homo sapiens
cgcgcccctggggagcggcccacccatagtactgcgagcatccagcatcgcttcagagcacggcgcacacaggcataaatgcagcagaggcctctcgacccgccaggacggcgccccctccagatgggcaccacacgcacgtcccctgtctcagccattccgttccccagatgcgcttcccacgagggaggaagggctctctgctagctccgaatccagcgaggaccagccccaggactgagaattaaatattcatctcgggcgtgacagttctgcttcgcttgccaatgttactgtcaaggtcacaggcctgaggccgagcggctggggctggggtctccagctgcgtaagaggctcccagtggaactgcgccctgggcgcgcagtttcaagccgcggatgggccggacaggccccctccggttctccgcgggcgcttgcctccgcagctaagcccaatttcctccggagttcttgggcccttctgagcaccagaagctgaagcccggtgtccaacccgtgcgtacgccgctggggaccccgatgcgcgaaggagagcgggccccggggctccgtcgccaggcaacggcggctggagcggcgagaggagcccgggacgagcgcagggtcgggcggatgcgggggcagcgccgcctcacaccttggtcctcagccctccctggctggggcggggccagaacagggaaagttgcagtggccggcccggtaaagccaggcggggcgcggccagcgactcacctgtcacgcgtgggtagtcgcgcagactcggcccgtgcactccggccgagcagctgcgatccccgacgggtcgcggacgcacagctcctcccccgggccacaggcccccggctggggctggggcgacccggagctgcgcgccggcgcacgcgactccgctcgctcctcactccctgcctcaccaccagtcccaacctggctcccgcccgccgcgcgctcggggctcaggggagcggcgcggggacccaggtcccacggcggagagagcgcgcgggattgcgaagactggggccgagtgccgccctccctgcgccctggcagcgccggctctgcggagcagaacggagctgggcggagcgctgcgcgcactgttccctcgctttccgaaaggccaccctggcggcggggcgccgtgacgcaggcttgactcacgcgcgggccggcgtcaatgcgaggctctcgggcagcgagcgaggctctgatggccgacgtaggcggagagggtgggcgtggggcgg

SEQ ID NO: 5751 - DNA, 2394 bp, Homo sapiens
cgctgtaaatgcgctaatatcccggctgccagcgcatggcgagcgcctcccacgcccatccgtaggagcggcgtcccggccgcccctccgttcccagcctgccctgcccccgcctccttcccctcctcggccatggccacctctggacgcctgagcttcaccgtgcgcagccttctagatttacccgagcaggacgcgcaacacctgccgaggcgggagccagaaccacgcgccccccagcccgacccctgcgccgcctggctggattcggagcgcggccactacccttgtaagtgcgtggtggattgcggtgcggggtgggaggtaggaggcgtggggcagcagaatcaagggcccagcccacgaggggccggaaagccgaaatcccagcccagagtctagatttcctcagtcttggaaacgggagccctgtcctcgaacccctaacgcattcatcccggtcggcacatcctaagagcagatccctgcctggcactggtgctccgagatttggggtttctgtgtctgacgatttctagaggtcggaataattgaaatttaaaacgcgccgccacctgccgcccccaccccaccccccgccccctctccatgcctgaaaacacggccacgatctccaggcctccgtctgggatggccagtgttggcgagtttacccccaccccgttcccactcagggctccgcaaacctcggcacactgcagtgcagtcgacctggaggaggccggcgctggtgacccagcttgtgataaactggtcggccagcgcaactaccggtgcggacatgttaagagggccccggggtgggttttttcggggcacgatctcaggcccgctgatgaccgctgtggtatgaatgaggtcaccgcattcggagaggtggatgtccagatgtggactcaggaaatggcctcatcccgaaagtctcgggctagtgggcgtgccctctggccagtgcctccacgcccgcgccagaagggcagcaggccctcgtagggtccggcgtctcacccacccgtgtctcctttgctgtccctagcctcggacgagagcagcctggagaccagcccgccagactcgtcgcagcggccgtccgctaggcccgcgtctccgggctcggacgccgagaaaaggaagaagcggcgggtgctattctccaaggcgcagacgctggagttggagcggcgcttccggcagcagcggtacctgtctgcgcccgagcgcgagcagctggcgagcctgcttcgcctcacgcccacgcaggtcaagatctggttccagaatcatcgctacaagctgaagcgcgctcgcgctccaggggcggcggagtcgcctgacctggcagcatccgccgagctgcacgccgcgcccggcctgctgcgtcgcgtggtggtgccggtgcttgttcgcgacgggcagccgtgcggcggcggcggcggtggcgaggtgggaaccgccgcggcccaggagaagtgcggcgcccctccagccgccgcctgccctctgccgggctaccctgccttcggtcccggctcggcgcttggcctcttccccgcctaccagcacttagcatcccccgccctggtctcctggaactggtgaggccgcagggcggcacctggggctaccctcgactttggagcgcgctctgcgattggagcagggccggagccgaacgcctggaacgctctccgtccgcctccctgcagccccatctccttgggcgccagggtccctggcgcgccctcatcagccgtcgcgcaagcacacacgagggacgtgtgccagagccccctccctcaccttccctccaccgccagccccagagttagattttatgcttgggccttatttgtatatttttaaatagcgatttgtataggaagcaagttatttttttaaaaaatagagtatttttcctcgtagttcgagaataaaatgtgtggggttgggtcccctgcgcgcctgcggggaacgtaggcgggagtcgtgccccccagaccggtgttcgcatcgctggctcgccccttgactggctaagtggggcccggccccagctggatcgaagggcgggttgcagtcccgacacggctttaggaagatacctgggggatggaggggtggtgatgtcagggttgggcgcgggaagaaaaggagaggaggaagctgaggcaactttgggattcttgtcagcgggaggcgtcactggccccagagtgactccgactctccgctgggctcccagagctgctggcgtttcgaataccgaaaagtcaaccctgtggaccacgacagggcagaaggagtttctccggagatgagccggcgaggccaggtgcggggcgcgctgcaccggagcagcccaggccgggccgc

SEQ ID NO: 5752 - DNA, 1627 bp, Homo sapiens
cgctccgggtctggagggaggggaggctctccggaaaggggtggcgagagacccccgccacgactcccaagcttcttcgcgcgcgctggaggggacacggtgggcgcctaattctcggcgtagcagtaggtcccataggctgcctgttggggcctggggaagccgaaactgcgcactccgggatccgggagccccccgcagcgcggcctcggcgtggtgattgggaagcgcacactgccgtcagccagccagccgccgtcgcactggtctagccccgaaaacttccaggcggcgtagaggtgcccaaccttggccaccacggcgccgcgtcgccggcacgccgcgtgggcttcagacagcgtcagccgcccgggcacgaagaacacttggcctggggaccacagcgggtcaccgaccgagggcagggtgggcggagaggggcggctgacacccaggaggcggagttggggtgcgggaccgcagaggtgctggatcgagcttgggtaagaggagttgggggatcgaggcaaaagtgcagggagggtttggagaggtgagctggagcctgggcgggcgggcgggctgatgggggggcggtgccttggagggacccggagaccctgccctgatctcaagctgaggtccactcctcgtcccccacatttttcagacccctccccaagaccctgccttcgtcccgcgcctcacccgccagcgcggaggtgaagcagaaggcgtcgtagcggtcgcgcatccggtcgcggggtccgtagctgcggatcccgggccggcctcggccgccgcacggggcgcgtgcggtgagcacagggtagcgcacggagccctcgagcagccagcccgcgttacaccagtccagaccctcggtccaagctggcgggagacggcggaggtcggggataagaggcgtcataggcaggagccagactgagctcgcctggcgccctctctcgggcccctgagacagctccgcggggcttgggaagtgctgggttcggccgctcaccctggtagagctgggagtaggtggccaggcgtccgtcctgctcctcgcacgcctgcttcgcctcgtagtaattgaactggtaccggccccggctgggttggtacggaaacaccacacctagggggtggcggggatcctggggagggccagcggatgggagcggagggggaggaagggcggcgcggcctgggagagggagctggggtccccaggggtgcggaggagatactgggaaggagccctgggagacccaggcgaggcggacccgctgctacacaggaatggggcgggagcggaagggcctcaccctccaagctcaaggtcagcgccacgctctcgtcctcgatgccgttgatgagctcgcagcggtaccggccctcgtcctccaggcgcacgcccgcgatgaccagggaggcgtctagtcgatgccccctccgcatcctggcgcgccctcccaggggcccatacccccgggcgtgcagtccgttggtgatgaggatcagcgtttcccggagctccccaggctccaccttgctccagcgcaccttgtagctgggaggcgtggtgcccaggacgcagggcagcgtggccgtggccccacga

SEQ ID NO: 5753 - DNA, 271 bp, Homo sapiens
cggcccgcggagtcagcgctcctcccgcgccgacctcgggctccgggcggccgccggggggcgccgggcgcatccttcgctgccaactccccgcccgtgcccccgctcgcgcctgggccccgccgcactccagcagaagccattacagagaacaaactaccttcttgtctccgagatgggtccccggggaggaaggcaaattgcctgcctcgtgcataataagccaggcgtggagagcagcgcggaggaggccgcggcagccaccgagcgg

SEQ ID NO: 5754 - DNA, 884 bp, Homo sapiens
cgtagcattttggcgaattccttcacgtccctggtgaagctgcttcgataaacccgaaatatatgctgcagcgtctcccactgctggtcgctgaacgtgccctgggaccaaggcttcagagagcggacggtgtccgagtcgttgctccagctgtgcgtctgcagctcccccagccacgccaagccgtcggtgcgcgtccagctgctattggcgaaggacgagatctggaggcagcggagggggaaaagcctttgcgggactgggagagaatgaagattggaggcgtgtagcaagtggccgggagagcagccagcataaagagaaggaagaaagaaacaagaggagatgagcttcaggaggcggctgatgccagcgaactctgtgccgcgctgcctctccccggagccagggagcagcgagttttctacctagatcgcgccagtgcgtcccgggtctcaccagtccccatcaggcgttgccctccccgtccctacccagctccctctctccgccctcccgcgagtgcactcaagcgccctcgttccacccaccttcagcgcttccccaagcctggaggagcgcccagagcagcagaaacagcaggcaccccatatcgcccggcgtggggacctcgcggagcgccgctgcgcgccgccctctgacctgcgcactcttctcccccgccgctcagctcacgtccctttccgctgggtgccagccaattcccaagcccagaccccggcagccctcctcgctgggcttgccggcggtttgctgcttctgccgaagggcgccctcgcccttagctgtgcgagctgcaaagaggtcggggtcccaggaatcctggcgccgccgctcacttcagtaggtttcacaaccggcgt

SEQ ID NO: 5755 - DNA, 1007 bp, Homo sapiens
cgcgggcttggccctaacccagcacgcggaggcttccctctccccagccttagcgaaagggcggcgggtgggaatcacccgttaccttggcaactccctcctgccgtctgctcacaacagtttgaattacacccctgccaggcagtcaccagtccgatttctttcctttctagctctcgttttccctctcagcgctcaggctgggggcggcgtcggtgccagtctagtccagggcgaagcttccagggccggctcgggccgggctgcgggacccgccgtggagcgcaaagtgcctgaagcccccgcgcgcattcggccctgtcttcaaaggccccttagaaatgcaagaggccaggcgcagaaacacacacggacggcagttttatgagaaaatgcagataaagagcccggcggtagggccatatgttccccataatctccaaagccgtcacttcaattagagcctcccctgagttctaatgcccaatcctgagtaaacaagccgctctgaaagaagaactcggtttccaattaaaagtgtactaacatttctccttcctttaattcccgcggagcaaagccccgcgcgggcggaggcgaggccaggtcgcggcgaggtcgtcccgggtccgcgccgccccgcgccgccgcgcgttcccaggtgacgtcaggcgggcccgggattagggcccaccctgcgctccccgcgccgcgccgcagagttaattaaaagtaatgccacggtaaatccaaaggctctccgctggcggagccgcgccttcgggccagcctgcgagagagggctttccgaggcaggtgctggggatttatttgtgtgtgagtgtgagtgtgtgtgtgtgtgtccgcgcgagcgcacgtgtgagcgcttgtgctgaaagggagagtcccctggattttttggagaccgagattgccttccctctttcgctcatgcctccagccctcctcgcacatgcactagtgaagaaacgcacggacaccgtcgc

SEQ ID NO: 5756 - DNA, 2191 bp, Homo sapiens
cgccgcgccctgctcggcctcacccacccggtggcgcttgggcccgccctagtcccccacccccaccccagggcaccacctaccagggccccgccccgcctcagccccacgtgcggggccccaccccggcgctagcggccctttaaacacccccacccttacacattaccccccccccacccggacggcagccgaatagggacaaaactcatggcgtacagccagtttcctccgcggagcacgtcctgtgctgctccagccgttggggctctccaccccgggccacagcctcctggcgccccccgggccgaggcagccgggccgaggagtgtcggtgtggtccggctacggggcggggccggcgggagctccggtcgccgccgccgccgctgctgcctccgcctgcctcttgggccgcccgctcgcccgccgctgggtgcgctgcacgcggggggcagccgtggtgcagaggttcatgcagcggcggcggcggcggcggctgctgctgctgccgccgcggaggcagacagaccgggcgctgccaccgccgccctcccccggctccatgccgccgccgctgccgcctcctcctctccggcgaggggcggggggctccggcccggggtgggcaccattcctcgcagcgccgctcccctccctgccctccgcccgggcgctggagccggcgagggcacccgccgcctcctaggagtgcaccctccgcgcgccctgccggagcgagggggcgggcgtgggcggacgtcggggcagcggggaccccgcgcggctgcaagaggagggggcttccccaaggatgcccggcggctccccgctcctaggtgcgagctgagtctgaccgggagcgagcggcgcgtcgccatgccggcgtgacgggcgcccccggctgcccgcgcgggcccccgcgctgccccacgccgcgccgtgccggcaccgggctgcaggatgggctgtatccaaagcatcacctgcaaggcgcggatccggcgcgagaacatcgtggtgtacgatgtgtgcgccaccatcgaccagtgccccacgcgcatcgaggagacctcgcccatcgtcctgcgctacaagaccccctacttcaaagcctccgcccgcgtggtcatgccccccatcccccgccacgagacctgggtggtgggctggattcaggcgtgcaatcagatggagttcttcaacacctacagcgacctgggcatgtaagcgactcgccgcgcggcacgggagcggactctgggcccccagctctgcttgccaccttgacccccctccccagctccttcctactgctgtccccatcgtctttctaaaccttcctcccgcctcctctcccacctccctcctccctacgcttttgtttcagtgacagggcgggtgtagggaggctccttgcgaaggcattttctcgtggtttgcttctgacttcccagaaacgcgaggagaaaggtgcggggcgggaagaacgcgacaaggagggttcgagaggcggaggtggggatggctggcgagtgcctggcgagtttcagggcgccgtctgtgctttgtggggctccccgggaagagtttgggggaaaccatagaggagtggagtggagtgccgggggcgcatgggctgtgccgcgcgtcctttggagaaaccggagcgggcttggaagagcaggtcccgggcatccgagcgggagttggtagttctgtccttgccctcgcgactgttgaagtttcgaacccttgtcccccgggccagggagcccggaggcgtttccgtctggaaccacaagccggacacagttgcctctctgtttccgcgccccctggaccagttctggtggggagctggaaggcaccgagtgcgtcccggccaagaagggcggatagccttgtgcgagcagcgttcggctggcgcggcgcggggtgtttcttatgctaaaggaaaggatggatctcttgtctgtctagggtccttactttttaaaactttcctaattgcggcactggaagggattcccctggcgcccaccgccgaattctatcggcgagctgggagctctccaactttcagcagcgccggttggtgcgcgccgggcttggctgctgcggtgaagaccaaggatcgccgcggctcctcaaccgccaggggccgcaggctacgggcggtcgcgtccgg

SEQ ID NO: 5757 - DNA, 859 bp, Homo sapiens
cggcgcgctacgcagggaggctgcccggggctggcgcgcaccgagggggtgggggtcgagcccggggcggacccctcccccgactccccgactggaggacagggaggaaatggctttgtatcgcacgatgaaaggcaggcaggagggccaccaggcggggggtggcaggggacggaggatgcccagagctggaggaccccgcccgccccacggacaccgccactctgccccccattccactctgccccccattccaccgcagcgcctggtccatccaccctctggctcccgctgcccgtccacgttccaacggcccgcagcggggtcgccccactgccgcatccttactccgcgccctgcgcgcttacctgcccacgaagttctcgagcaccgagctcttgccggcgctctggccgcccaccacggcgatctgcggcagctccagcaggcagctctgtcccagcgccgaaaacgcgtcctgcagacggttcaccagcgggatcagctcctccatctcccggttccccatcttgcccgaggggccggcgaccagctggtccctgctcgcctctacgacctgacagggagtaggggccgcgctgccctggctgctgctgctgcgccgggctcagccagccaggtcctggcgcagacgtcggagcccgccgccagcccgccgcttggctctgacagctaacgacccgcagcgcgcctgcgcgggcgggcaggggcgtggcctatctccgcgacgccccgcccccgccccgcggctgccccgccccgggcttcccatcggaccaccaggccaggcgcgcacgcactgcagcccagctgcggccagatgccacggcctctgcgt

SEQ ID NO: 5758 - DNA, 791 bp, Homo sapiens
cgcgcgactgcagccctggggggcgcgcccggaaccgaaatggctcaagagacttgaggaccggcgcgtctcctttctccggccccagtccccaactcccgccacagcgcagagggggcagtgcggtgggagggggggagttgtggggctggggctccggcctggccggtgaagccccaggacccgtccgcttggggttaaggcaaggggtgcggcacgaggagcgcagggagccccgagtcccaggcgcagacccagctgcggacccgccgtacagccctggtgttgcaagcgtggaccgtgggcgtaaggccccggcgggaggcactcggcccggccgcggccgggtctgcagggtcctggcgcagcggatcccggcgcgccctggcccgcggcccgcagggttcagacggggccgagacagccaagcccggttcgctcgcgccaggcgctggagccaaggctgacgggcggttctgaatcatgtttggaggagcggcgcggcccccagggctccgctgagacgcgctgcagggctgtccgggccctccctcggcgacgcggccagcagcccgcgccgcgtcctcagcggcggcaaaaactaggagtcccggggctctgccgggcgccggcactggagggcaagagatgctggcttcccccggggctcatcaccccggggttccacagcacttacgtgggatggggaccccggagtagaccacggacggaaaggaacggtggtttcattctctgcaaaagaaatcctcgcgcgcacacgggtgccccgg

SEQ ID NO: 5759 - DNA, 586 bp, Homo sapiens
cgggctgcgcgctccgagctgcacgggcaggcattttccccggctttgttttacaaggtggggagagcggggctggacgcgggagggggcgggggggggagcgtgagaagaaacgaaatcgcgggaaggaggggacaccggcgggctgggcagagggcgaggcggaggccaagttgggcttgggcgccgccgcccccgcgcgcgcctgctgccgggcccgggtcacccggagagcgcgggcgacccgggtcccgcgcctgcccgccgccgccgccgccgccgccgccgccacgcgctcagccccgggctgctcgctggcccggccccggcacggcgcggcgcgggggcggtgggtgcagccccagctgccgtgcgccccggcgtctttgtgcgcgagcctcgttcagcccctcttcgcatgtctttgtgtgtctccccccgcaatgccctccgtgccccgcggggggtgtgtggcacggtccgggcgcccgcagctctgcagccctccgctgctctcccttcccggctcgctcctgtcgccccttgccggctcgtttccctcctttcggaactccctcctcttcgc

SEQ ID NO: 5760 - DNA, 1678 bp, Homo sapiens
cgggaccgacggcggcgcttctccttcgcctcccgccggcaggagaggacggggcgggagaggaaggggttagttgtggttgtagccgccactccccggcgcccgggacccgggacgcccagtcgggccctgcagagggtgtcctacctgggcaccagcggcccctcgcctccagccagggcaccgaaggcgcgcccggcgggatgcagcgaactgcctcctgccccgggacagtggagcggcagaaggtccaaccttccggttcgcccacgcccgcaaggtggaaaaagtggggtgaaatcggggaaatttagcgaaattggggcgaaagaagagagaccaaagcgtgttactcacgtgccagatggcgaagaagatgagcgcagcgcacagcaccagagacagcatgtagcagaacgcagcgaaagtgaaggccatggccggcggaccccaatcccaccacacacgccaagaagcccctaggagcccgatgcctccctagaggaccgcactccctccaaggagccgcgtctgcacgctcctctccaggctagtgcccaggagggcgcacagctagcgaagcgactcgagggtcagcgaataagcgctggattcccgcaggctccggcgaccccagacccggccctccggcgaagacaggaaaacgtgtgtcgagagtcgctggagggaaccgtccgcaaatcgaagaagaaaccaaatcagcagcgaacacctgcaaattagtgccaagctgtgagcccctcgagaccaacacgacaagcgatgcgacgactccacggaggaccgagggaggaggtcccattcgccccaggaagagctctctgcttttctccactaaaccgctgaggagagacgagcgctccgctccggaccctcccgcgccaccggggcgcaaacggatagtgtccagcgaggtgcccgagcggcctccgagctcctcccaaatcccagagccgggcagcgctctttcccgagagaaggagtctttaggtagccgggaggaggtaggtcccgttggtcctgcgccccagacgcggcttccagcgcagccgtgcgctccgaggcgcgcccgtccccaaccgtgactccggccagccggcctccgcaacccaagtgtcccggaaaccgggggtcggaccggggcgagcactggctccacccaacgggccaactccagcccgggtggctgcagcagtgggtttcaggccaaacgctgtagctcgctccacctgctgctgccgctgccgccgccgccgccgccgcctttgccactgcgagaactgtagcggtgcgacccgggattccctcctctcggcgccccaccctcgactcctgttccgctgagcgcgccctccccggcgggcggagactgcagcgccgggggctgaggaaaggtgggtggcgaagcgccgccgggcgcttggtggccgctgccgccgccactgcagctgtgcacgcccgcctctcggaggaaacttgaagccagcagtacaagcagggctggaggccgagcggaggtggggcgggaccggttggagcagggactctttaaacacgtgcgtctggaggaggtgggaagctgcggaagggtatggtgtgtgcctcgcgcctaaacgccgcagccgcccctcccggttcttgcagtttcgcctatcgg

SEQ ID NO: 5761 - DNA, 1600 bp, Homo sapiens
cgagacggagttagcatctgaccagcgaccaacagtggaccggcgaggcgggctcctaattagagcgagattcccagaagctggacagcccctgtatttatgggagcatgcggcgcagctggcagtgacccccaggaaacctcggcagcagccgccgccgcgggtgtggtgacctcgggcccgccgcctacctggagcgtttcggcggcgcctggttcagaaccaccggggcggacagctccctggagctgcacgcggactgcggaaggggacagtgagcgggatcggcccgcactccgtccgcgggcccggaccgctggaagcacccgggtccccctcccctcctgttccccggtcccgccctccccctcccgcgctgcgcgtggcggtcccgggctgcgcgtccctgtaggaggagaccggcactgccgccggcggccctccccctaaccgccagccccggccgcgcgccccgccccgccccgcggaggagggtgggggcgttccccgcgccgggcccgcccagctcccccgcggctgtccgggccgggctccccattggccggcgggcgggaggtgaggggcggcagggcccgcctctggcggctcgcgcccgggaaggtcggcagccgagcgccggaggccgtggagagggcgggcagggaggcggcgggcgccgaggagacgcagcggcggcggtggtggcggtggtggcggcggtggcggcggcggcgcctggtctcggccgcagcctctgcgtcccgcccgctctgggtcgcccctgccagccccgcgcgcggctcgcctcccgccgcggcccgcagcctgcggcgcccgagctccgagggcgcttccccgggcgctgggcccgaggcggccaagacggcgggccggccgggcacggggcggcgggcgctgtgctgcgggctgcgctggtggggggcggcgggccgcggcgcgggcccagggcccggcgtgtgcggctgggaggcactgtgggggcgggcgcgcgggcggcggccggggccatggccgagggcggcgggggcgcgcggaggagggcgccggcgctgctcgaggctgcccgcgcgcgctacgagagcctgcacatctcggacgacgtgttcggcgagtccggcccggacagcggcgggaaccccttctacagcacctcggccgcctcgcgctcctcctcggccgcctcctcggacgacgagcgcgagcccccgggacccccaggggccgccccgccaccgccccgcgccccggacgcacaggagccggaggaggacgaggccggcgcgggctggagcgcagcgctgcgggaccgcccgcccccgcgcttcgaggataccggcggtaaggggctgcccgcgggtggatgtcgggggcggcgctggaaccgggcgcgggggaggcgtgggtgctggggcgggcgagtccagactctccgtgggctggcttgtgggtgtctctccggaaacaaatgaggctgcaggagcggtgatcggtctgactgctcctgggggctccgaacccgtgggtggagagggtaaggcggaggccgtggccagcacttttccagtgacaatgtcgtcgg

SEQ ID NO: 5762 - DNA, 2394 bp, Homo sapiens; identical to SEQ ID NO: 5751

SEQ ID NO: 5763 - DNA, 1160 bp, Homo sapiens
cgcaggatccgctcctcgatggacgtgagccccaccggcccgctggtgagatcctccacggagcgcgaccatttcagatcctccttaatcgcctcgtccaccaccaagtacttgagctgccggagctgggggctgatgtcggacagtctccgggggctgacgtccggtgacctcctcatgccactgcggtcgcaggcgccacgggcaggtgggtgggcagggggagcatggacagagaggaggggattcgtgaggagcagatcccagggcgagagcaagagcgcggccggggccctccgggggcgagcgccgcggcagagcccgcgctcctcccttcccgccgccactcacccacttccccgggcagctgtccccagtgccctatcctgggcgtctcggggcagtgcgggttggggcgagtggcgagggaaagaatgactgaaacttcccgagcagctccaccgcgcgcgccgcccttccccgagcctcagactgcccagtgtcccagctgcaaagggctaccccggcgctccggcctcccgcccgccggctcgctcacccacgcccggggcgctactcacacggcaatgctcttgcccctgggtgcgccgctgggaaactctcgaatccccataggcaaagacagagtgggaccggcagctcccagacttgaggcggaggggccgcgggccggagctccctgcagccgctagcctgggaagactggagtgcgctgcccaccgagggtctgcgccgcgccggccgccccgggccgctttgtgcgcgcccgcgcggtctgtacccgagcgcctccgcggcgtgcggcacgatgcaggcgcggcggttcagcccggtgactccaggccggcccgcgcgctcgccgcaacgacccggcagccgaggcagcgccgcgccccacgcccgtcaccgtcgccgccgccctagcacaccgcaggcgtgagtctcgccgcgaccgggagagccctcccagctgtgcgctctcgaggcacctggtcgggcggggaggcgtcgggtcggggcgcacaggggccaggcgggggcgctgctgcccacttcccgcctcccgggcgtgcgctccgccccggagcccgcacctcgcgcccgcgctccgcctggaagccttggggcaccggacgcgc

SEQ ID NO: 5764 - DNA, 588 bp, Homo sapiens
cgcaggcggcggcgctctgcactgcggagccgcgtcctgggggagcagtacccccagccccggcgccccgcagccagacagcccccctcagggtggcagcattccccggctagggtgcagggacccccggggcgaggcggccgcgcattaccttccactttggtaagggtcaggaccggactgttgcaggcgctgagcggggccacccgggccgagtgcttcttcatgatgagccggccgcctgcaggagcgctgccgccgatcgcctacatcctggggccggctggagcgcgtctctcccgggcccgtggccgacgcggccctctgccgccggggagcaccagcggctcgcccctctcagtcccggcctccccggctgcccgccgggctccggttgccgcgttgctcactgcggcggccgccctgcagcgcacatcctccccggccgcgcagccactccacacacacgcgcgcacagcctcctacttggaggttgctgcaaactccaacgtcacgtacaagtgcactccctgctcccaccccgcagctcacctgctccgccctcctccccgggacgcccagccccgc

SEQ ID NO: 5765 - DNA, 878 bp, Homo sapiens
cgggaggcgaaaacgaaatccacccccttgcgcccatttctgccagaggtttgcaggacgtgtctcaacctggcatcccgagtccagaacaaaagccacgggggctgcggcatgggcagggggaaggcgcgcggtggctgacgcggggcaggggccctggcgagcgcgggaggggcggtcagcagccgctcgcggggctggactgggagccccgtgcgactccgggtctggcgcctgggtcgggggtggttcccgggcctccctcgggggtcgccgaggcccggcctcgatagccctgcggctgctgcgagcgcctcccgagctcccgccccgcggtgctcgctccaggagcgggcgcggcgctgtgtccctttacctgcgcgcagagggtcgtccggtgaagccatggcggcgggttaggggcaaacgagcgtccgagcggggctggcaggcctccggggcgcgggaggaccgtgggaccacggggatgaaaagtcctgcggttccgacgcgcctggagcaaaccgtggctctgcgcgcccctgccctcctccgccttcccctcccttcttcttctcctccttcgcttcttccacgagctcacttcctgctttggcaattagcaaagccccttcgctgcgcgtccctcggtacctccctccagaggcgcggggcgggagccggggtgccgcgacccggggctgggacgcaaggcggggccccgagtgtcccgggcgtccccagcgcccagagcgcgcgtcctgcccggtacccacgtccccctgggcgggtcctagcggggggctgacacgactgccgcccgggacagactgcgagcgaaggactggccttaagaaacggctgcagtcgcgggtcgc

SEQ ID NO: 5766 - DNA, 561 bp, Homo sapiens
cgagtgggcgcgaacttctacagcagcgtcaagcagcaggactacagcgccagcgtctggcttcggaggaaagacaagctggagcacgtaagggcgactcgctcccgggggcctcggccaggcacctgccgcatgcaccctccccgtggtggtggcatgagcgcgcgcggggcgcggggggcaggcgaggggatcctggcaggcgccgacgtcctaggtcggattcgggggcttctctgcctgcagtttcttgccttaatgaccgggctgcggggaggggagggcaggttccctttcaggctcttggtccctgccgacccgacctgcccacctgcgtctcccggtagggttcatttgcacggggttctggaggtgcctgtgcagagtgagcacgaaggggaagtgccaccagcgtggctccgagcaacctggcgttgcatggtagtgggctttagagcggcgtttgcccgcgtctttgggggctgttttactcagtccaaaaactagcaaattaacgaatgagtaaagttggcgccgctagcgaccagcgtggacccgcgc

SEQ ID NO: 5767 - DNA, 1235 bp, Homo sapiens
cgagctgagctgtccgcgaggctgcggcaggaggcctcgtcctcccgggcagggtccctcctggaggctcccccggtctctcccagacgcacccgcgccgcgtccttgttccccgggagcagcctccctccagccgccggtcctgggagcttcaccgtccaaacgggagctgagtttgcaagcggccaggcggcggtgcggctggtgctgctgctgatgtcagagccagaaagcagttgtgattggatctaattagacgctgctgcagcaaatagacaagctccctgcgtgattggcttcaaagtggctggtgccaaacaactagcagaggcgcaaaagtagcctccctgcgctgggagcccagagcaggaggcagagcccgcgggaagctcggagcactcaggacgccgcgcgcccttccccgccctccctgaccagggagcagctcgctccaggcgcccagccgaggcccccagcccagtgggagcaagtcatagagaacaattcgagagacagagagacggagcgcgctttcctgctcagtcctgaaaagtgagccgctcccgggtttgcaacctcaagcttcgcagcagcggcggcggcggctgccgggaaggaggcaggtgcaggtgcaggagggaggcggctctgggctccgcgcctgggtctcggccatggcctcggtcctggggagcggcagagggtctggagggctgagcagtcaactcaaatgcaagtccaagaggaggaggaggcggaggtccaagcggaaaggtaaggaccgcgtggcgcgccggcccctgccccccttcacccccggcttctccaccccggcctctcatggggtctccgggcttgtccgttgtgagcagcttcactttggggtgctggcgggatggctgctccgtgcagggcgctcgggagttcagatcccgtggaaatgtctggggcctcctcttgcccagaggggacagtgagcagccacgctgcgacatgtttgagggacccggacgaagtggggcgagggcggcgaggagctccccggggaccccgcgcgtctccgggccccgcagtccccagtggccggccgggctggcactgccttccaccctccggaggccatctcgtctcccagtgccaaaggaattacccaaaaacgggggaacgagccctcgcgccagctactcccatccaaactgtcccggaggaagggataggcgaagccctgcgatcgc

SEQ ID NO: 5768 - DNA, 5964 bp, Homo sapiens
cgcggtggctggttgcagctcacgtctccacgactcctgcagaaggaaattacgttctccccttcccccccgcacccctacccctaccccaagcccccgggaagccctgcgctggcaccagggcaagcgcctgtcggctcccgggagctaagcgaggccgcgcggtctgggacgcaaatgggagggagcagccgctgtcgccctgcggggccagggccactgggtaggcgcagcgcgggccaagagtgggaggctcagggcaggggatccgcactcggggccattcctgccgcggcgcgccctgcgcttcagcagtgcacagggtggggacccctcgaggacagtggtgcgccgacgggtctctcggcccctccctttccacaggccccgctgtgtggtgaaggagccagaagaggcgacttgggtgttgagacccggggccaaaccgtggagagtgtctggagcccacactccagatttctggacgccgcagtcagtccagcaggttctacctggagccgcctcggggctcaaccgggaggcagcggggtgcaggcgagagggttaatgcgcccggttcggttggtttgaggagtctctgctttcagcgacccacagggcagagagcccagggctccggcttgatgtccccaacagctggggactggagagctggaggggtcgcagactcaggctagagtttaaagtgcgccgcgcggcgagtcgctggactcttctgggtctcacgtggctcctgtgtcacatggagtgacaggccggcggaaggcgctttagtcgtcgcccagcgttctccaaggtgtaaggaggcaggatcttcccatactggcggcgcagggggcctcacggctgcggacgcccgccctggatctctcagctcggcagatcctttgggtggagaggcgctctccagggtcgcggcgaaggagagcggcttctcggcacgtccctccgtatttcttctagatcagctccggccccaccgtccaggagagggcccgcctgaggacctctgtctgtgccgcgcgtggtcagccccggtcccctcactccatggctggcccctagcccttcagagcggacacctctccttagggatgcagggcgaggaagggcgggtggagctgcgaacccacggggacctggaggacctcttggccccctggagaggggtactatgagagggattcatgggacacagatttgggggactgggtaattttaccccctttggcaaccataaaaaccctgagcaaacgtgtccattcgctatttcgcagaaatatacaatgcaggcccacacaggcatctctgcgaggccccctagttaagggcgcagcgttcttcggaagctcttggtcttgctaccagggcgtcaccggcttttccgcactggggacatttcgtttgggctctgcgcagccgttgcacctaaggccctgggagctccgcgttcctccccaggcgcccgggacaaagtgcccgagggctccgcagacgtccagccctgcccggggctcacggccgccggggctctccaacggaccgtcgagggccacgttttgctggggtgtgagcgacgattcttttcccgccctatgaggcccgccactagctaggtgccccatgagacgccgtggcgagcacggctacctggcagctcgcccgggcagccccaacttaatttcctgcccctcggggcacctttccctcgaatagctctcctcggcccctccagccctgcccaaggggcctggaaatgttcgcagcttcaagaaaggctctatttaagcacaggatggggtggggcgggcggggccaagattgccctggggattgaatttatctccgctcccagcgatccccggcggataaagcgcaagtttgtgcacacggtcgactgagccattggaaacccagctcacgaaccgcagccagggaaacgggagtttgcccagttgtccttgcggaggggtgtgcggaaacgcccgcgatgggaactttctgcagatcatgtatggagggagctcacaaaaaggaggaaggggagcgcggtggggaggaggccgcgtgggcgtggaaggtcccagggtcctgggggtgcccgcctgcttaggcgcagggaatggcgcggagctggctggggaaggagccgatcacgtcccgcaggctaattggcttaagaaattttgcaagcgctggaaaaggtcgttgaaggagttcgctgcacgcgcacgcacacacatacacacacacacaaaatcttaaaaaaaaaaaaaaaaaaaaaaaaaaaagagcgccgagcatgcgcacagagaggatgccatattggaatgagctgtagtgggagccggaggaccggagcgggcgcgcgagggaggcggcgggcggggagcgagcgggcaagggcgggcgagcgagcaagcgagcgaggccggtgccctcccgggcggcgaccggggcctgggtccacgccgagggcaggacgaacttcaccaggtaggacgccgcgccggctgctgtccccggcgcccaggctggccggagagcagcccttcggcccgcaggttgagtgcgctggtcaggggctttttccagcctaggaaaaaaaaggaaaaaaaaaaaaaggaaggaagcctgagggagctggggttggaggtggcgggtgggggaaggctggggagggtgcaggggagcgaaagagaagggcaggagaagaaagcgactgcacttgagcgaagcttcaaactcctctgtgcgctccaggttgtcatttttgcttcccgggtccccttcgcctgcgtctccgggctcggaaaagccgagccgtgcgggagtccgtccggagttgcaaagtgtcctccttccccgggcgcagcctgtcccctcccgccgcccaccttcctcgtttctgcactcattttagcgacgcagccgccgctgctacctaccccgcgctcccgcgtctcctccgcgctggggtctcccctttcttttggtttgggtgggagaaaaagatggtgaggacggggaatcggagaccggcatgggggtaaaaatcgtgcagacattcggaatcgctcccttggaaacatttgcctgagcaactgaaataaaattggcagtagtagttttggagcgtgctccagcgaggatggtctttttgttcattattttctctttaaagtaatatcctgtcacttaggggctttccggttgtctcctcttattcgaccccctttcaaaattgctgacttgagctggttctggagtttattttttaatatgcgtgcgtgggtatgtgtatgtgtgtgtatgttttgcagaaatccgccaaaatgcaactgtaggaactgcgagatgtatttattgattttgaccaggggcggtgggaaggggctggagggagctgggggatcctggagggtgggaagtggctgattctcggtggccggacactcatccagagcctgatccgtactcgtgttttcttggaagcgccacaactgcggggaaggagtctttagaaaccgtgccagtttcaatatggcgggctaaggtggcttttaaaaactgaaaataaaggttttgaggtgggaaaaaacccagctgaagtttccaccccttagtttcgactctctttggctaccccaggaagcgctttagcgaattaagtggggaaaaaaagaaggaatgggctgtccggttttttttttccgtggttagagtctgtgtgtcaagtccattgctaggggggaaagggatggagaagtgcccctggcccggaccagggcaccgaaacgcaactgtcgtgtgtgcctgtggattagtgtgcaggcctgcgtgtgcgcagtttttttgggtgtgtgtgtcaaagagaaccaccccgaatgtgtgtgtgcgtcttggaaccagaccctgccatgatttgacgtgacaaactgcggacacgtggtgtaaagtacatgagggcagagggagtgatttattttgtctttctaggagacgagctagctctcgccttgtgtgtgctggatcctgcgcgggtagatccccgagtaggtggggcgaggaggtgcttattaaaaggactaactgtcccgggtattgggtgcaatcgggctgcagacgccagccggatttcgtgtgtgcagggggcgcgctgcacttaatagtgggctcctgctttcctccacgccgctctggggtgggaggtgggggaccgggaccgaagcttggagaagaccaaagtggtggtggtggtggtggggtggggcagaagggcgggagcgcgcggctctgggagacaagcacgtagggtcgaggcgaggggttgccttccttacttttgggtttcgcgctctagggaaggtgggggatggggacagcgtttggggaagaaattgtcccttgctcggcttaggaaccctctcggcgcatcggagaggggcatcttcttgtcttggcgggcatggaggccgggcagtcgccgggggatgtgagtgggcggcgaagtgcgggggaaaggtcggcgttccagggcggggaggatctgggagtggagttcggagacaaaatcggggtcaggcagaggagccagagggaaagccagcaaacgcgagctcgggtgagagccaccggaatgcgggaacgcagcttagccgggaacagggttcccgacaggggtcgcccgtggccaggacgcggccgctgaacagaggtcgcgcggcggttcctgcccgagggacctcgtgggcgggggccacacggaggccgcgcacggtccccggggctggcgggggcaggtgggaggacctcctccgggcccgcgaacctgatctggcagcggccaggtgcctggaagcgtttttaaatgatagggttacaaagacatgttggccaggtttgtagttagcgcagcaacgtggtttgcaggagcgcagaacgaggctagacagggtcactcggacgccgtgctgtcagtgggtgggggccgggagcaagcggcactggcttggagaccccgcggcaggtgacccctcccacctgggcagcgaggctgaacgatggcgacacgccggccaggacgcgtccgtggctcctccagcctgcgtttgggcgcgccctcccggggccggctttcccatgggccccgcgaggtggggagcagcctaaaatggctctgtgctgcgaagctgcagtttcagccgcgaacccctccccttgtcctcctgacgtcgccgctgacaagcgcaatttgctccaaggccccgaaacccgcgattttgcacgaggccgtgccgtggaagcggatgtacagttgattacaaagaacattccacagggttctcgaagggcccaagtttttccttctggtggggaggagggaggagccgagactgggcaggagcccggccgaccaccgctctggcacctaggggctcggggcgcaccagtagctggggctggggacctggatgcgcgaaaagccgagggagttcccggggacgcggatggggaccattcggggcaatagccacggacaccggtgctcgtggttgatggcgtttgtggtgtccgagaatcccgggacgacgctggaaagcctgggagaccgttctcaaacttctggagaccagctcgcagtttcgctttcggaattttcaggatctttgggcctttaaagttgggtgggattccaagaaggcaaggcgaggctcgtggccctgacgatcggccgcccgacttctcgctcaccccagccttctctaccttgtctccctgaaccttgccgaaccgagccgggtttggggttccggggccccgcgcaccaaccccagccgcgtcctgagggctcccgcagcacagccgcggctgatccgaggccattggtgggaaaccaatttagacgaggccgacccctcttggatctggctcggttgccgc

SEQ ID NO: 5769 - DNA, 5964 bp, Homo sapiens; identical to SEQ ID NO: 5768

SEQ ID NO: 5770 - DNA, 5964 bp, Homo sapiens; identical to SEQ ID NO: 5768

SEQ ID NO: 5771 - DNA, 703 bp, Homo sapiens
cgcttggggacctccgtgctgggcatcccgcacgctttggacgcgcgcagcctcaccgggagcgaactttgtctcgcctgcgggtgccacggagaggggctgggaagccgagccagctctggcggcgactgggggcgtccctggctttctgggggggcgggggcgcgcattgttgtccaggatcgggcggcgggcggtggcggcggcggtggcgcgcggtggccgcctagcacccgacctagcagcgcgccggggactggctcggggcgcgctgggcgcaccatgcggcgggccgggcgcgggcgaggggcgggccggcggcggggctcactggcgccgggccaggctcggcgcgagaggcgcgagcgggctatgggctgacgccgagggcccgcggcgggggcggcggcggggacggggcgggggctcgccagctgcgggcgccaaggccgcctagtaggccaagggccttcgcccgggcgaatgggacgcccgttccggggtaccagccgcttgcagccagaagttcctcggatcccttggaagcgcaaaaaataaaaggtaatgtgtctttgtttcccggtcgcggtggcagggaggcgactgacggcagcccttcgccttccgtgttttcacgctgggccggggaaaagggacgcgccgctgcttctttactgggggcctggagtcgtttatttcgcgt

SEQ ID NO: 5772 - DNA, 1315 bp, Homo sapiens
cgtgggcgtccgggggattcgcgggcactcgggacgaggcgagggcgcagaaaacttggagcccaatcagcacggagttgagcttccgcgccccaaccttcaggtgaccccgcgcggcggcggcggcagcagcagtggcagcggcgaccggagcccgcagcagctccgagcgcctccgggaggacaggcggcgagctcggcgaatcgtcatctgccagccgatcgcggcgctccgcgggccggggccgggagcccggggcgagcccgaacgcggcttcttctccgcccgccgcggagactctgccgggtgggctgcgggcgcccctcgctgccgcctgtgaacgctgtgggtgcgcggggctgcggccacggcggcggtggcggcggcggcgggagccgcgagtcggggccgcccgggctgtgcttcgccccggcagcagcggtggcggcggcgcctgtggctcaggatgcggccggggggcgcactgctcgccctgctcgccagcctgctgctgctgctgctgctgcgcctgctctggtgcccggcagacgcgcccggccgcgccaggtaacccacccacccgccggccgcgccccgcgccgcgcgccccgcctggcgcccccggacccccaagccgcccatcgcttcccctcgggcgcggagacttttggccgcggcggggagcagcccacgggcggcgacggcctgagagtggagtgggggagggggtcgcagggaggcgaccctccgaccggtggacggcggctggggagcagagggaccggtcagggctgcgggggctctagcgcgcatcgctgtgggcgaggcagctgtggagcgggacctgccgtcgggttccgcatcaggatctcatgctccccattctggtccttgctgtctcttccttcccgccctaaggctcttccaactctggggctggggacctggcctgggagccggggagtgcgagatctccctgccaggcaaggagcgcgactcccagcctttcagccaacagctcccggcggggtgtagcaacttaagttttctccccggctgtgcaggattctggtggaggaaagcagggaggccacccacggcacccccgcagcgctgaggacgctccggagcccggcgaccgcggtaccgcgcgccactaacaggtacagcggcgcccagcgcgggcggactggggctcgggagctgcgagccgggcatggggcgcggctgcaccggcttggactcgttgggagtaggcaggctgggacggcgcgagtgagtgtaagagtgtgcgtgtgtttgaagagggcgcgg

SEQ ID NO: 5773 - DNA, 1316 bp, Homo sapiens
cggggtctcccgaggtcgtttcgccgtccaggatggagcaggtctggcccctggaagggcgcgcgggctgcttggggacgggggcgccttttctcgcgcttcgcggtttcctctctcctactgcaggcagcgcgcgtttgcagcgttttgggaccgaactgatgcttctgggaaacgaaactaaacctctctgaagtttccagctcgggctttttttgtttcccgctatccggcgtggcccagtccgggcgcggaacgagggcggggccgtggccaccgcggcggaaacgacccgggccgggggcgggcggcgaggacaagggggctctgtgcggcacccgcccagcttgcgccctggggactgcggccgggcggcggggctggacgggagtggacggggctgggcgcgggctgggcgcgctgggccggccaggcggcgcgctgaccgcggtctccgtgcgtcccgcaggcggggagctcgcaccgccgcgcccgggccgcgagtgatgataacctaagaggccggcgcgggcgggcgtgagcggcggaggagccgggcgcggcgacacgcggccatggagcgggagccggcggggaccgaggagcccgggcctccgggacggcggaggcgccgagagggcaggacgcgcacggtgcgctccaacctgctgccgcccccgggcgccgaggaccctgcggctggcgcggccaagggcgagcggcgacggcggcgcgggtgtgcccagcacctggccgacaaccggctcaagactaccaagtacacgctgctgtccttcctgcccaagaacctgttcgagcagttccaccgcccggccaacgtgtactttgtcttcatcgcgctgctcaacttcgtgccggcggtgaacgccttccagcccggcctggcactggcgccggtgctcttcatcctggccatcacggccttcagggacctgtgggaggactacagccgccaccgctccgaccacaagatcaaccacctgggctgcctggtcttcagcaggtgagttgggcgggcgggcgagcgagcgcgcggtggcgcagggcagggcgccccgggaacttggtgttgggcacagtgattggcaggggctgggtgcttagaaggcagctccactcagggtggagggcccggctgcgcgggacccggtgccgaccgaagccacagcgccgccaaggcctctctgtgcctccgccgcagctaaaggggcgccctggatgcggggacgcgtggggatcccctgtcactccgtgtcggggccagaatgatcccaaggctagaaaccgacggccgc

SEQ ID NO: 5774 - DNA, 1110 bp, Homo sapiens
cgcccaccccggctcggagcgtggccaggagagtcggcatcgtagaaagcgctgcgggaagcgggccccctcccgcccacccggactcacgatcttcagcaggtccagtccactcccctgattcatgtctctccatgtgcctctcccgggaaggggcgaggagggccagctggagcaacccgggagaagtctgggaggactggcaggtctcccccgcccttccccactggcttttcggaagcagagaaaaatggaagccgaggcagagccaggaaaaggcgcaaaggggcagggtccccggcgccaggagaggagcagagggtgggcaggcgacgaggggaggaggtgcgaggctagagatccctgcagtggaggcgccgggagaacccgaggtcggtgccctgcccggcggctcacaaaggaaggagaaggcgccgcgctctcgctacctgtgcggcggctccgagcgcccccgcgggagccacgttctctagcagttccatctggatctcctgcgccaccgccgccgccgctgtgggaggcgacttggacatgtccctttggaccattggcgaaaagtcggctcggagcgaagcagccagcccccggcggcgggtcccctcctcctcgcccccgcctccccgcgctctgatcggctctgggggccgcccagggctcaggcccggccgttctcggcgcagcgccccgcagcgccccgggactcggcgccctgctgccaggcgctcagtgcgcgggacggggccggggcatcgggcgaagcgagccgctcgggaggcgggacgcgggggcgcggctgcggtgcctgggagaggggagccctcagcggggcagccggggccgggagagcgggcgcagcgcggcggggatcggagccgcgggcgccgggaaaggtcctcgccaggaggggagggaactccgggagcgcgagccagggggaggcgcgtcggaaagcgagagtgacaagcagcctacaagccgaaaagttcctcgcgggaggcgcgcgccgcgtgggctccgactcagccgctgcgcgtcgccgtggcacacaggctgaaaagtttgcgaagccacagaagccaggcccggcgc

SEQ ID NO: 5775 - DNA, 1655 bp, Homo sapiens
cgggtttcccatcggcgaactgaaactggtccgtgaagaagtggcaaagtaacataactcctgcagcggccaggtcggccttcgggaacctcgccatgccgccgccgccacctccctaccccacccgccagtccttcgccggtgctcgggggctcccgatgcaataggcacgaccgggccaaacgctgcggatcggtctcggtaggacccggaggcctttgtaaatgtcgctgcgatttcacagtagggaaccgagaagaggaagaagcgaacgcgagtaggagcgcagcgctcttcggacctctgaggctctctttgcaacttgccacactcgcagccctcacccgacactgaacaacaaccgcggggaggagaggccacttgcagccgaggctcgcaaactgtcggttccactcgggcagcgccaacccggtgcccgcggacggtgacttccgagccccagcgatgcgctccactgggttcaaaacagatctaattccacagccagcgccgctgcctgccccagatccactagggctggtcggctctgcaggaactttcctctgtctagggatggccccggcaggaggtttaggtttgcgggaaggaggttgatgacgaaaccctcccgacaagttttgcttcttttcttcgcccgacgcagggcgcgcgtcctttctcgcagccggaggaatgggcagctccaaagagctgagccctgggaaggttagggctgcagcagtctgaggtccgaagccaggaaaaaaatgtgtttaaaaaaaaaaaaaaaaaagaggaagaagaaaggaaaagggtggagtgggagggagtcacgctggaacctatcgggagagggttcctccgggctcaggaggaggtggccccaagcccccgcggagccccaggagtttggtggcggaggaggcgctgccgtcgccacgctcccccgcgctccttctccacactttgaggagggaaggcagctcgcaatttgccagatctgccgccgcaccctcctccctcctccctccgccctccccttcgctcctccaggcttctcccaccttcctccctgaaaccggcagcccgcacagacctgtccaatggctgcactttcctcggggctggctgaggagtcgcggccaacagattaagccgggggagcctagcgaaggggagggagagggccactccagccccgtgcgccccaggcagccggctgccccagagcgcggggagaggggacaggccggggagctatcgggggagcgcggggcggtacctccgcgccgccggggcgccatcctcgcagcctgctcgcacgccctgggcagctccgccaactgcgccccacacccacctggctcccgggccgccttcgcgcccgactgcggggggcgatcgcgccccgccccgaccctggcggggtctccctgggcacgaaagggttaaccacagctcgccccttcgcggaggctggttctggtagtggctagggagtggagaaagcaaaccagagccggttcggttaccgactctgcgaagccccctcgaccccagcccagcgcgggagggtggcggaaggtggtgcaccgcagcgtggtccccgccgctgccgccgcggctttgcaaagtgtcagcgggggcgaaagcga

SEQ ID NO: 5776 - DNA, 1655 bp, Homo sapiens; identical to SEQ ID NO: 5775

SEQ ID NO: 5777 - DNA, 304 bp, Homo sapiens
cgcggtgggcagggttccaggaggcagctcccgctcggcgatagcccccggggcgcaactccccgcaggacgcgcacctgccaggacagccactaagaggatgcggaggttgggggccctctcggggacaaaatcagggcactccaaggaactctctgcgcgttcaggcctgtctgtgaagctggcaggcggaggacaatgggagcaggggtaggtctccagaggcgagcccgcctccacctttcccacctgctccccacctctgcgccggccgcatttaccccgccccccttccagcgcccgc

SEQ ID NO: 5778 - DNA, 1666 bp, Homo sapiens
cgaaaccgcgcgagtggcaggagcaggccaggccggaggcccctccccggcccccaatccggcggcctgccctccccctcccggggcgtttgtatagcagacacctgcagcacgggcggccgcccgggttcccgacacaaggcgctggtacctgagcccttgactggtaatgcaccataaaccgctcctttcaggccctttcagagcaggagcacggaggtcaccgtgcctacaaacccctctgtgtccgccacgtctcctgggccctgggcgctcgggcctccagccgcagagcacgcctgcccgtgggaatcccaacacttgtgctccgcgaggccggcggggcgggggcgggggattgggaccaccctgccctcccccagcccggcctcccccgccctgcccgccgctggttcacagagcgcagcgagtggaacgaattgggtgcgccgtcctcagacgctggcggaaatcaaatgatgaggcgaggtgggacacccgctctccgccccgcggccgacgcccagcccacggcaaaggtatcacacggtgtcccgcctcgcggcgacgcgagcggcgggatgactcggcctgggccctggcgcagccaaaggcccggctcgctggggcgcgatcccagctcggcgcgcacagccctccgagttccaggttggattgggtgcggttgtacctgtggagtgggtggcccggtgactgccacccgggccagtgctgccagcagatgtgcacatcctgggcgggggctggcggccgagtgtcactagtaggggcggcggctaggcagccattcgccgccttccaagcccggcgctgcgcgcagggcttggagcactcggtgctgagacgcgaatgcgcataaagagaaaagtgtttccagtgtttccccaaaatggggaacagggaagaaggacaagtatcatgcaagactgccactgccacctgtcttttgcggaccatgctgccttctttcccgctggcctggctctgagcactgaaagccggggagagggcgccggccttagagccagccgcactcggggaccgcaggcggcgctggcccgggccacccaagcccggcagatgagcctttggcctgcgggggaccgggccggaggccagggggacggcagtgtcgccggagggagcgcgcagcccaaggccggtgctccggccccgcgcgccccctcccgggtccgcagggaacccgggttacctggggagccgggctttgtcggccacgctggctctccgcggccccagaactaattaaacgcctcttttggccaagggaagtcttgcgccggacgggggtgggggcgtgtgggggcggcatgtgggcaccggaataatcagccccattcttgcgcttctacagaacccgcggcgcagcgagaagtgaacagcggccgcctgaatggcggtttcaaaaggcgacacctgcaagcgcggccggttgtgaattgaattgagtcaaatgcggcgcccgctcgtacctgagccgcgagctattagtgtcaggcgcgcccggtcgtccgggcggggaagcgcgcggccaggccgtccgcgctgaatgcggcaagctgcggcgcggccgctccatgggaatgtcgccacttgtgctgctagcggtcgggagggggtgcgc

SEQ ID NO: 5779 - DNA, 5030 bp, Homo sapiens
cgcgtcacagtggcctctcccgcctagccacgcgcagtgaaatttccggcaatcgggccagctaagacacgggatttgcaccgcagcctctcagcttctggagccggagccgagcgctcccggcagcttctccaatttctctcctaaagtgcgaagggaaaagccccgtctgctccacgactgcaaggccggcggatctgggagccgcgcccggctccggaggactcggcgggcccggggctccccggcagcggctcctctgctaggggttaacagcagcccccgcggccgggcgggcgcggacgcttcctctccacccgcccgggaacgtggataccgcgcccgcaggatgttcgccggctgggaccggcagtcaggaaacatgagaaggcctcgctattcctgttcccgggcggcgcgcgccgggctgggtaaataaagccgagacgacggcggtggcggtggtgagcgcgctggagcccgcgtggagaacatgcggcggggatgggagtgcgcctagtctcgaggcgggagagccagccgccctgcagccggccgtcggccccgcagccacaggtacagcccccgcgtcgccgagtctcagccggctgcggcggaacgccaggctcgctctggcccctgcgccctgggcgccggtgctctcccgcccttcccccaacttccctccaaggtctggtggagaggcgctcgggtagcggccaaggctggcccaagggtctgcgcggagcttgggagcccacctggccgcgcctcctttgctttaaaattattcgccggcgttgggggagggggacacttctgcagggagtgacctccccggccacagtctggagtgaatcggggtaagtgatttgagaagaggcgcgggtggccgcgcgcgggagtcctgggagggtcagcaagtgtggttcacacgcccccggaccccttgcgacaggacagcgctcggacctttgccatcgcttgcctctgagcctgctgcctgcagacctacagcgcgccgggtgtctgtgtctgcgatctctgcgtgggcttggggctgccggggaagtgtccgaggtggctaacctcgtgatgacttcgctaggaaaaacacgtcgtcgcatctaggaggacgcgctggggtggctcggagaaggccgggccggggaagggtgtcttgtacaaataaagcagcatgaacacacatccctaagggcatgattttaaaagaaaacaccaacgcgagtcttgactgtagaacaggggctgcaagcacgaaaattctctttgacacttatcaccgaggctatgtgcacaccccaggcacgtacctgtctgcgcgggaggacgcagtcctaggggacacacgacatccagcagaggtctgacttcacttccctacgaacacagaccgtagccgtcgtttgatcgcggtggtcacgcgtggtcctaaatgtcacgcgtggcctctgctgcggtggccgaagggcggggcgggggcgttggcgagtgtgggcgcttggcgaggcaaagggtgtgtgtgtgtgtgtgtgtgtgtgtgtgtgtgtatgcgcgcgcgcgtgtgttagtggagtagcagcccatgccgcggctggacgggcaaagggggcgctggcagcgaagctgaggccgctcggaggaaacgggagctgtcccgaggcgcgaggcgaggagatggggcgggcgaagtccgccgcgcgccttggggctgtaactctgcggctccgcggccgcgcggacttgctcctgacgccggtgcgcggcaggcagaggctcagggcctccgcgaccccagaggtgagctgctggctctccccgacagtggcagcagtggcccgggaggtgcgccgaccaagctgcctcctgccttgggcttctgacacctttacagcctctgaaagggtccccggagaccccagagagaggcgggtgtcgaggggctacgagctcgcggctgacacccgcgctgcggaagagaatggcactgattgagggctctggggacctgggtcctggcgccttggaccttaggaccatgcacttcccggggcgcgttgggggatgataggaagattctgggagagaagggggagaagtggtgctttcgtcctgacgccacttaactttttcctgtccttgaacccaacctcaccccgggggaccttggcggacagaagatgcgggggtttcaaccaaaccatccacgatctagaaaacacgaaaatcccccaaatcccggtatggcctgggactcatgagctggggggtcttgtggatacggttggcacattaccccaaatcttcccttccatccaacccctcctgacgccccgagttggggttcctagaggctttagtcttctgctgtgattgaagaaccacgcgcggcctcacgccggtcgcgctccgcagtccggagtatgcctctcccagattcaaactgaaacccagaggctcgtttgggaattcgtttcctttgcctctgcgggtgaatgattcccggttgtagttctggggagtgaagggattggggggatcgatcgcccaggcaaggaagagggcaggtacctgtccggggaacctgcaggggcgggggcgtgtagccaactggggagagccgcagggtccctgccagttgcggcggcgccgctcctcccctcggctccgcagcccggcgacccggccaagttcaaggccctgaacctgcaggggtctgagcactctcagccagtaagtaacgagatgcaccttcctctcctagaagccgagccccgctgcggagctcccggcggcccagccccgaggctctgcggccgcgccgcgcgtccctaccaaccgacaccatgaacaccatcgtcttcaacaagctcagcggtgcggtgctgtttgaggacggaggcgcctcggagcgggagcggggtggccggccctacagcggtgtcctggacagtcctcacgcccgccccgaggtgggcattcccgacggcccgcccctcaaggacaacctcggcctgagacaccggaggaccgggtatgcgcactcccctgggggccctgcccgcctgcggcccggaggggtgggggtggtgagctgtgacggggtcccgtggcaacgcgggcgggtggacgggaaagggcccggagttccctgggagtgcaggtctgcccctccagggctcgcgcattctcatgttaaggggctcctatcttaaaacatgagggatcaattcgtcggggcagctccaaagagcttggtggagactaagggcgccaggagctgcccctcggccctccgctgcctggacctcggagttgggggttatttgcccctctccggactgtgggtgccggtgcgcggctgagggcgaggaaaaaggactgagctcggtgcagagaaacaggcgaagccgagcagtcggggagtccaggctcaggctccgcggacttctcttcggtcactcgagcccctcgccagagccccgcggctcgcctggcccaaggagtcgggaaggtcgcctcccgccagggagtcccgggcgtgagcgcggctcggctgggcccgcggcgaacccggagggggaggccccgggcctgcggggccgggtttgagtttagcggggtgaggggtatgctggggggggcggtagcttgcgggtgggccagctgctcagactgccggtgagtggagggcaggctctgcctggcccgatccggcggctccccgggcgccccgccggggaggggcggccgtcctagccgcctccacctgaacgattgcatcagctgcttgttctgcggcgtcgctgcttagtaaaacagagattcggtttcgtcaaaatgttactaccagtcgtttcgggtggaattgcatttcaaagtgtttaaagaggcagaaacccaggaggctccggcgcaggcgcgcaagcctcggggagcggctgggctcgctggcggccgcgcgcgacacctcccggacccgtgagggagcgcagcgccccaggccacgctccaggctcctggctgcctctgcctcctccccctttgaatgtgcttttcctgaggtctttttaccttacatgatgggacagagcttgccgtacttttaaccctcccttagtcgggaaacggcccgacggtgtttttgggttctgcagctttcctccacaaaccaccaactcctttagaaagtttcccccttttcctaaaagatcaaaggaaatagcttaaagagagccggggcggcaatgctcctttgctttattccctatgtccagtcggcgacctttcccctgaccacaagcgacggaaagcctctgggagcagacaagagatccccgagggaagtttcgagagccagccgcataccctgccaggcctgccaggccagggccactcgagggtgcggcgccagcgggtgagggaagggtagcagttagccccgctgcccagatacgcgactggaatagcagtattcttcaaatcacttgaccttcgtcttctaaacctctaaccttggggtattgggttcaaggtatccccctattcaagataaacctatcgaaatgatctccccatccagaaactgtgtggctcccacttcctgcctctcccaaacactctgggcgcgcgcaaagcaggggcgcaaggcaggaatgcgcagtttggatgcggggcccgggcttggccggggcgtggagcgtccgggcgggcaaacgcgtcgctcaccagggccgcctcctctccccatgtcccagcgcccggcagaatggcgggaaggtgaggcacaagcggcaggccctgcaagacatggcgcgacccctcaagcagtggctttacaagcaccgtgacaacccgtaccccaccaagaccgagaagatactcttggccctcggctcgcagatgacgctagtgcaggtaatcaggacccattaacaccctgatccgttttcccgcgaggggctgaagagcgggaacgcttagagttcgtgtggctctccacgtggcgc

SEQ ID NO: 5780 - DNA, 2868 bp, Homo sapiens
cgcgtttcgcatcccagaggggagggagaaagggagcccaggcgcggggggtggggctgggggagcacgagagagttttctcctaaacacgtatttcctcgttttctcgacgctgcagcggtcccattatagacgcatttattgcccctctcttaaaagtcgttttaaaaataacgcaggaaccaaagcgagcccctcggtccgaaatgtacgtgtaattccttatatagcctgggctgcggccggcggcagggccgttgccgcccattattatacaaacaggtaccggggcggcgcaggcgggggctgctctccctgcgctcccgccgcccccgggcggacaagtctcgcccctctcgccacaggaactgtccagacaataacaatcagcagacatttcgctgctgcacgagagggagagaaagcatagcatcgccccgagataaccagaaatacaatcaacttacaacgtctctccaaactggaaaaggcgactgtgcaaccaccaccacatgttcaggtctcgatccctcgggctgtctctctttttttttaactctcacgccaggcagaggggtgtgtgtttcccttggcacagcagcacaaatcaataaacactgcagctgcggtgcaagtagcagccccgcgcgtccgtcggtccgtccgccccctcccccaccctccttccacccgagacccagagcgccatccaagccccattatccggcttcagcgctccgtgcgtccggcccaggtaacaacttccccaaaaaccgaaagagaaaagcgcgaggcgcacgcacaccggcccatcccggcgcagagacctcgtctgccccgggagggggatctgtctgtggtgcttcccggtctctaagcccaggtaacaactccgcaaacacacccgccgcccagctcgcccccatccgcgcggctcccggcggcgttaagtgggtacctttcctgccttgttccccgcgccgccccgccgcgccccgccaaacgtggaccccactcgcggggctcgccgcggagtccccaggccggggctctgggccgggcagcgggaggcgccagggaggaggggcgcttagggacccgcgcccccgcgcctctaatccccgttacgcgagcgcgcccggcccgcgggtcccaactttaccgccgccggccgaaccctgtccgcccgcggcgcgcacagccggcgcccgcgcacacgcgcgcacaaaccccacgcaacccgcggccgccccgtcccgccgccgccgcagcccgcctgccgcgcgcccacagcccggcccgagtcgcggggcccgagcgacagcgacggcgccggccggggccgcggcgcgcggaagccactttgcacggtcagcgccgggcacaagtttgttccgcggctcccgggggcctgggcgctgagggagaatcgcgctgagggggccaggaggagggggagagggaggcgccgaagggcacaagagtggggaaaagtgcggaaagaagcaacagccgctccacccgggaccagaaaagtggccagtgcgtcccggccgcccgccctgcgccggggatgcggcggcgtcggcgccggctaacggtccagggaggcggcaggggcggcgggagccgctaggcggagagagaccaggtaagagacataacggttcagggagagcgagcggccgcggcgcggctccggcagcggcggcagcggaggggggcagagagcactactttctactttcccactccactttgccgtccctgccccggctgcccccagcccggctcgcccccctcacccccgggggcgccccggctgcccagctccccctgactccgccgctccccggtcccctccgccactcaccgttattgcgccgcgggttcgcctgctttctgcgcttacacctggggccatccgccatgatcctctcgcttgtgtctaaatgctcgagtcacctcctccccctccctcccccttcccccccacccctccgcctccacccctcccccctccccaccgcacctggtttacgacactcccggctttacgacatcaccttccttacacctagaggctctcgctctacggccggaaccttgttgctagggaccgggcggtttgcggcaaccgtgggcactgctgaatttgaattgaggggcgagggaaaagttttcctcaggtgtggtggggagagggaggcggatgccgggaaaccgtagggacgcggtcagaaaggcgacgggctgtcggagttggaaaggtaaagttggaggctcggcggcgtcctgcctccgcgctggccacacccgccgcggctgcccggggcagggagggatctggctgattctccctgtaccctgtgccctcggagctgcccctccgagcgcccagaggtccccgcctgcctgcttcctggaggcagggctaccatcagtcccacgcctcgcgtgtccgccccccgcaccccggggccaaggaaagggatcgcggtctggactccccggggagttcccttgatgaggggaagggcaggtttggggacggcgaggacacgcggcgaccggagagaggctacctgacccgcgcagcccggactcccttcccttcccttccagggacgcctggtttccccccaagcgaaccgggatgggaagtgacttcaatgagattgaacttcagctggattgaaagagaggctagaagttccgcttgccagcagcctccttagtagagcggaatgagtaatacccacacggtgcttgtctcacttccccatccgcacccggccctcacctgctgtcacctcggcctcccacacccggtccgcgctccccgccctcttcctcgcgtagaaccgt

SEQ ID NO: 5781 - DNA, 2678 bp, Homo sapiens
cgagaggcgatggcgtttgctttggccagatttaagggcaagcgaggctgcgcgcggctcccgcagggtcggatctccgagctccagggcgcccctccacccgggtgtagatttcccgcggaccccttcgccctcccgggtttcatcagctgcgcaggaatggagctggccagagctctgggagcggggagggaggcgccgccaccagagggcgccggagccccagcgctgcggccggtgagcggccaggctccccggcccagcccagcaaaggcctggggacgcccgacggctgccttcttcactggacctcactgccttcagttctttaagagcagggccaagtcagtggggttcccggctccaagcccagtgcccagggtgggtgggtgggtgggtgggtgggtggatggatggatggatggatggatggagtgccggcccacagccatctaacggccaaagtggttttggaaaaaaaatgcacagaagacacctactcccaccagcggagttccggagccctcgcagcctcctgttgaccgctcccgcctaatgcagccgctgaccgcccactccccgacggccaggactccccagggacagggacgtgtccccagggcaggcccctggatggacgcggcgactgaccccacttcgctggacgctgtgctgggaaggacacagagaggtggctggggcagcctgcggtcacaaagcgaggcccaaaggggcgctctcctcacccccacgtctcctgggtgccgacctgcaccctcccttcgccaccggactggggccatctgggatgtctcgggggtatccggagggctaagcaccgccgagggacggctccgtgggaagagttttctggacccagaaggcagacgccagtagtactgtcctaggagtcggaggtcggggtgggggagttctcagctctttgggtcgcacggagcttttcttgggtaaggcagtaagtacttaggtttaaaggacttacttacagctaccatttattgagtactgtctgcttgtcagacacgatgcagagaatttcgcggcgtggggcgggtctcattgaatctcccgtcccactccgcggggtgggcctgtgattagctcatttcaccattgagaggtcggaagtacaaaggctacattcgcttttactgagagccgccggcgccttctgctttgtttgtacaggcgaggaaactgaggctcggctggtggcgccgtgggcttggagtccgagccacgctgactgcaaagacgggtctcattcccgcagatcgagctctgccggcggctgcgccgcaagccgggcaggtggcgagcttgagcccccacgcacagaaagcaggaccccctcggctgccttgggccgccaccgccagcaggccctccgcccgggactaacttgtttgcttttcattggttctcattcagttcccgccatcgaaaggccccgtcccgcagctttccacgcgcgccccactttacgcctaaggtcctcagtctctccagtggggccctgtcacagggacaataagcggccctccagccggcgtcgctcaggctgcggacctcactgcagaccgggccagcggtgcggggcccagcggagcctgagaaggtcaaaggccggagcgcactgcgcctcgggagcacagagggagcggaggaggggcgaaggggatgggtggggggtgccgccgagggagtcgcgcgtcagagaccccggccacggccagcactcggctccgggcccgcccctcaccgcgcgccccgccccgccccgcctggctctcccctctaaagcgcccggcgcgcgcctcccaccgccgcactttcactctccgtcagccgcattgcccgctcggcgtccggcccccgacccgcgctcgtccgcccgcccgcccgcccgcccgcgccatgaacgccaaggtcgtggtcgtgctggtcctcgtgctgaccgcgctctgcctcagcgacggtaagtgcgctcggcggggaggccctggcgaggctctgggcttcggctcccgcccggcgcagagccgcggctcctctgcctgcgcccgcagtttgcgccgcccgacacagtgggggtggaggcagctcgcttagctgggcgctctggtgcggtgtcgcgttcaaagccctacttttgcgccgagggtttgtgacctgcagagagcgaccgcctgacctcaagctggctgcagagcgaggtcagccgggacaactgggcaggaacgccccaagagagcgttcgggactggcgcgggaaggcgcgagggtggggagccgcggaccccagacccctgcctgcccaccctccacccactgccttcccgctgcgggctcggtttccacaggcgaatgggctccgaggtcctgctgcgcacagtgctggaggtcgggcggtgcatggcgagagcgcgctttgcaaagttcgcctcatgccgcgacttgaggctgtgaggtccgatgcagccgcgcagcctccgctccctgcgaagccgatcctctccccacaccctcgcggggctcttggccaggcgcgggcgggctgcgcggcgcagctgtcgggcttgtgccacccgccaggccgcgcttctgcacagctccgcggtccgcagcgacgcggacctgggcgcgcgtccagccgc

SEQ ID NO: 5782 - DNA, 2756 bp, Homo sapiens
cgtcctcgcacgcatcaaaagggccaggcgggctgcgaggctcgccgtcctggccagacacaggacgctcacgcaggcgcaccgcatcgtacagaccttgcggtggctcatcaagcagcacatcgcgctcggaacgggagcgcgtcaggaggcccacgttgcggagcagcagcaagacgggagcatagagcaggttggccagtcccatgccaaggctgagctgctcaaagcccagcgagtgcacaatgtggcctgccactatgggcccgagcgcgtaggccaccgaataggagatgtcggcgatggcgtagacgctgccatagactgagacatggcgcacgtccaccaggaaggcgagcgtgggcagcagtgctgtgtcgactagggctatgccaaaacagaggccgcatagtgagaccactagcggcgcgaaggagcggcaggcgggcacgatgcacgagctggcgccgatcacagccagcccaagcgcgccgtacagccactgcaggtgtgggtagcgcgccgccaggcgcacggtgaggtagacgcccagcacatgaggcacgaaggccggcagccaggccatgcccatctcccactcggaagccgccatcgtatgcttcatccacgtggcaatggtgggttcgaggaaggcgaggggaatgttacaggtggtgagcgcgccggccaccacggcaatgtaggggtctagcatgaggcggtggatgggagtgcccactggcaggttggcccgagcccgtgcagccgccgagaagggtttggccactgccagcagcaacagcgcgtcaaagagcgacacggcagctagcaccaagaagggcacgcgcttgccggcgaactcatagaggatgcccccgaagggcggggccactaggcttccgaagctaatgaaggccagcgccacgcccagtgcacgactgcgctccggctcctccgggtacttatcggcgatcatggctatgccagacgtgtcggcgaaggctgagcccaggccctgcaggctgcgcgccgcgaacagcgtggcgtagtcctcggcgaaggcgaacaggactgtagaggcgaacatgacgcccaggccgatcagcagcggcacgtcgtagctcatgcggtcgatgaagggcccgctcaaggggttcactagcagctgcaggatagccttggaagcaaacagcaccccgatcttcacgtcttcgctctccgtagggtagcggggccgaagggctgagcccgctggccacgcagctgtcggggacgccgaggtgttggccgtgtaggcgctggcattggccggagtgggcagcggcagggtgggctcccacacctcgggagtccgggtggggccctcgccgcccccgcgcatgtgggcgatgtagtcgggcactatgggcacgatgaccatgtacagcatgttgtccagtaacagcgccacgcacacgataacaagcaccaggcgcctctgccgccggggctcctgcagcgccgcgcccacagcctccgacagcttggtggccgccgcccgggcctggcccgcaggttccgcggattccatgcccccaccccgatgctcttccgaggacgcctccgccagggccgagcgctggcgtcccgcagtgcagaggcgagggcacgggacttcggggaggctgtcctggccgagcagactcccctgtgcctcaggtggccgcggagctcatggcccagcgtcccgggaaaggaaaggactccgtccggcgaggcgttgcagctactcttagccgatcccgggacccgcggctgctgggctcaggggcggccgggaagtcgggcgcgccgaggggccggggccggagactgggcgcacttcgcccggggcgcgcccagagcagcccccgccgcgctaagaggccgcccgcgctggccgagggacatgctgttgccgcccgcccgcttgcccgcccgttagccccgccgctgcgctcccctcccctcgcgtcggctcttgcctcctccgccgcctcctctttttttttcccttccactcggggctgtgacgcggcgagtcccagcccccgagtggtgcccgggccacttacgtcgctcatgctaatgcgacgtcggcggggcgggggccgggggcggggcgtggccgggcaggggtccgctctccagatgctccagggctggaggcccaggaagggctctcggtgtggaagtcttgaaccagcccctgggatgggcgttccgcgccggtagctggccctctgccccccgccccctgcctgccccccgcccgcggttctaggactcgcggggtcagcgcccgctcttctcctcttggggaagggggcgcggcagccggttcctcgaggccccttgggagaggcgggagccagaggcttgcgatctccgcttcagcctggacctcggcgcacagcgagcaggaagcccccgaggtgagccgccgctgcgtccatctgttctcgcagctggattgtggagccgcgtccggaggagcgctggacacggacacccccaaccctttctccgactccgccccctggccccttgcacacacactcccgccaggaggggaggggaaggctcagcaactgcctggcctggctctgacccaccggcccctccgcagaatttctcggccgcgaatcgcggccgggagcttgtggggactgagggcagaagttgccgcgccccagtcggggtcgcgaatattagcctggccgctgccgccctcccgc

SEQ ID NO: 5783 - DNA, 990 bp, Homo sapiens; identical to SEQ ID NO: 5553

SEQ ID NO: 5784 - DNA, 829 bp, Homo sapiens
cgcagcgatcccgcgcaggtgagggtactggggagcccgtggccttctccgcccgccggctcctccccatcagccgtcagccagggctctcggcgccggggaagcctcccacagggtcccaggccacccaagcgcggtcaaacgccggcggcccggcctcgcttacctgacgcagccgcgcgtccgcctcgacccatcaggcgcgcagggcccgctcccgaaactcgcgcgggctctcgcagtcggccgcgcggcccttagccgcgaagagagcgtcgcgcacggtggcgccgccacagccgtgggccgccgcgcccaggtagcgctccagctgcccgcaaagctcctgcagcgccgcctcgccggggcccacgcgcgccggccagagcagcgcccaccgcccgagccccagacctcaggccccgccgccgcccacgtccagctccggcggcagccgtgggaagcagtgttccagaggcggccacagcgccgctggctgccggcgcgcgccgcggaaccccgcggccgagagccggccggcccagctgggcggggacacggcggcctcgggcttgtgctccagccccagccgggccccctcgcgccgctgcggctgctgcgcggtgcggtcgtgacaagtcacagcaaacttgccctccgcgccgttccaagccaccaggaagcgcaaccggtgcctctggggatcggcgaagaggccctcccggagcggcgcccagccctccaggctgtcgggctgctcgtcctccatggccgtcggcggcagcggccctagggcttggcgggcgcgggcctgacctcgtcgcaccgc

SEQ ID NO: 5785 - DNA, 4119 bp, Homo sapiens
cgggaaaggtggcagccgaagacctcgcggttttccctcgctcaggcaccccgccccgcccccagccccggtcctgccctccgcgccctgctggccgggcactcgggcgtccaggagctccccctcggggtggcgcgcggcgaccgccggcgggtttggcagcagcgccagtcgcggggcggcccgggcaactcgcccgcctgccggtccgcccacgtgcgcagagaggagcgaagcgcgagcagtcgcctcgcccgcgcttgctgccggtgggtgcctcacctaaggggccggcgggggccgtaacccgagccccatcgcagggatccgcatttgcataattcggctttcccccgttctttcggactcagggcccgagatgcgagtcggactcccttccgaggcgtcgtcttgcccatggtcagcgcgggggccgcgggacccgccagagcgcaggcggagtgggctggcgcacgtggtaagaacgcagctatcttttcttgcttttcttttctttctttctttcttgagaaataggactttgcacatttttgctggggtggggtatctactagggtgctaaccttgctgcgatttctttccatgtccttttcatccccaattggaaaaaagcgcacagcgcgagcgagaaactttcccaaatgtgctctgggtgacttaagtcagagagatggccggccgctggataccggctgttttggagggagggggagaagcagcgcttcagtggaagagcagagggagagaccgctcccggcagcctcagggccctgaccgcggtgcgctgggcccggcgagagctggcgcacggctgcagcggtcgaggcaggtgagcggctgaagacccgcctgcagcgccgcgcttcctccacggcgtggcgccgtggctcccgcccgccccggcccacactaagctagggccgctccgggcccggggtgaaaaagggacaggacaggcctgcgaggctgaccctgcgcgttatccctggcctccgcggctttggagcgggaaagggctctggggcagttcgcaacctgcacaaacgaccatgaatgagtcatgcaggcggcggtgcgctggacttgggcacccgggaccagcctcctgtggggccccggacaggcccggctatccattgcgggctggggcgcactgggaggtagaagctttgcgcccagcaagccagaacctgctgctatttggactttggaaaagtttttaaaaattgctttgggaacgaaacagaagggtttctaccggggtctcgcaaagtaaaacgagtgggttgggggatggggatggcgtcttgaaagtgattagagatgctttcggccgtcactgaggaccgcgctgggctcaccgaggtgttttttggggagggagagaaaatatttattctagtacgtgtattctggctcgggtgcgggcagggcgcggtcctggatcctgggctatgggggtcagggggattctgtggctgcagggaccggtagtgaaggttaggccagtgtcttcatagaacctcctgtccagcgagcccggagcccgctctgccgccgggacactgctggcaacgacggcgcgcggacgcagtcaacagggaggtgtgtagtgtaaggtgtgtgagcgggtgtgtgaagagggcagcgggggcgggagtgtgtagcggaagtggagcgagtgtgagtgtgtgtgtatgtgtgtctggaggggcagggtgagtgtccaagcttccatctggacgcccccacgcagccgaccgcccagacgcgccgggaagggcgcccgctccgcgcagcagctgaaggggggcggggagcgcgcgggcagaggaaggagggtgtctccggctgaggatttctctcgaagctccccacagtaattctgctcctcctagggtttaccctcccagtcccaaggtgcccaaaatacttaaacaaacaaacaacccaaacctgttccgttttcgctcctgtataaatagaacagactttccaaaaaagcaatacgcattcactcttatcaccagccacttctttccaccaagtaattcagaaaaaagcagtcagcttccgtgaatgcatgtagctttttttttcttcgctgcctccttttgcttgcggttttgagctgccaagaaagtgagtaggggtttgactgtagtgtctcggctccgctcggtttctttccgaagtttaattttccggaatggctcccaaacaagggctagggaggcggagccgccggcaccggatcttcgccttttttggaaagtcccagagaaccggaattcctccccgccccgggaggctgagccgcagcctggagcagctcgctctcctgctgtggctgtgactgggtccatggcgcgccctctcccccgcgatccctgcgccccggacccaggctgcagctagggccgcgcgcccgggaccccagcgatccccgccgcctgcgagctggaagtcgcgagcccggcggagtccgcgcggccgagcccgtgtatgcaaatcagccatgtgacggcaaaagccgcctggcccagccctgttcctcagtccatatatgggcagcgacgtcacgggtattgaagacctgcccataaatacttagagcaacactttccgtctaactgagcgaggagcaattgattaatagctcggcgaggggactcactgactgttataataacactacaccagcaactcctggcttcccagcagccggaacacagacaggagagagtcagtggcaaatagacatttttcttatttcttaaaaaacagcaacttgtttgctacttttatttctgttgatttttttttcttggtgtgtgtggtggttgtttttaagtgtggagggcaaaaggagataccatcccaggctcagtccaacccctctccaaaacggcttttctgacactccaggtagcgagggagttgggtctccaggttgtgcgaggagcaaatgatgaccgccaaggccgtagacaaaatcccagtaactctcagtggttttgtgcaccagctgtctgacaacatctacccggtggaggacctcgccgccacgtcggtgaccatctttcccaatgccgaactgggaggcccctttgaccagatgaacggagtggccggaggtaagccgcgtgtcttcgcaggcccggacctgcgcggcccggaggtggtggatggggtgcagtgggtgtgcgggaatcgcaggagaggattggggctccaggtggacggtgctgactgcactggctttgaagactggaagtgggtgcaggaggaacctgcgacagctgagaccagggcgcgcgggcagatgcgccaggtcgccagcaaaccggcgtgcgtgcgccccggcgcgcccagccccgggcgagcgcagggatgggggtggaagaggcgtccccccgggtttcgaggcttgcgtaggccctctggccggcagcacttcgacctcccctctcccggggcaggggcaaagtgacggtaaagttcggggctctcggggagagctgcgcgcctggagagccgagcggcggagaagcgccaggggaaagcgtcggtagctccctcctgggcagagccgaccccgggaaaatctcggagcgctcccttcttgcggcctggaggcgcgcccccacctgcccgccgcccgcgaagttgagggggttagtaaggcgggggctccggccggcggaggcagcgagtgggtggtggaggagggcgcgcaacggcgggaagcagcccccggactgccgagggaggcccgcgggggcaccggcgacgccggtttccttggcgatgctgtggaaagtcgtctctcgcggcccccgcgccttcctcgaggccgggccactggccttgggctgaggcggggacgcgcggctgtcgggaaaggcggagaagattgggagggcacggaaacctacggactccttcctctacatcccccattcgctccagcagccctcggctgaagcgcagcgggagagggagggagaaaaaggcacaaggcgccggggatggggagcagccgggaaatcacccacccccttctcgggctctcctctcggtttggcaccatcacgg

SEQ ID NO: 5786 - DNA, 1575 bp, Homo sapiens
cggcctgggcctctgggcgcgcttgccgctgcgcgggcgcggggcggctgtcacaccaccctggccgggtcccgaaagggaggagtggagcttgcccgcctccgcgagcctccgcgcgcccagccttcctccacctgcccggcgtgcccagggcgctcccagcgctggaagccgggggcgcttgcccgaggcgggagtcgctgggtcatgctcttgcccaccaggtcctccgaatccctggtagggcagcgtctgtccgtgtccccgacccctcccgcaggcaactcgcgcgaacctggggctcgcagagagcgagcgcccgcggacaccggctgaacagtctggaggctgcgcgagggggcgccgcggggagggataaaagccagcaacaaagagcacagacctcgtccagcagttgattgactcgtcccaaaatagccgtctccatttgctgctccccgcgctccgcttccaggcgcagcacccgggcctgcagctcggccgtccgaaagtgggcgagcaggctgagtgccagcgagcagagggccagcgtcagcagcccgcacgaccctggactcggcagccgtgcgccgcgctccgcccgcgccgccaccagagccaccgtcccgggcgcgcccaactccccagggccgcgggcaccggtggctgccgctttgtgggtgcgctccgctaccatcctctcgcgtcttgagaaccaataaataaataaatagaataaataaaggcgacagccgctgccaaaaggctctatccaaactgcggggcagggggaaagggcttgtatcgctggaaaacgtccctttccgctgctcccggcaaagaggacggaaaaattagcagtaggagaggaagtgccgaaaaagcacaaccagcggtaattggggtacacctaggtgagaaaaaagttatttcgaagaacgttccaagtccaggaaagttaggggaatctgaccggctctccttctctccgcccagtctttcccttcaagtgtctgcagagcagttggtgccgcgctgtcagtccttctgggcgcctcgtgtctcccgggccagtcagtttcagtccccgggcgaaggggcgcacacggagggccccatgggcagaggtgggtcgtggcggctggcgaggagcgcaggggccgattccggcgcctctgtaacttgacacactccctgcggcggcacggatcggatgagcaatccgtgctacttcccaaactaatctctccctcccccctccctcctcctcctcctcctcgtcactcctcctccacctcccgcggggccgacggcttggatttgtttatttatgcaaactcgcccagggtggggggcgtggtgagcaggtccggcggccccagcccgccggcccgggagcccctctgccgcgctccccgtcctctttgaagtgacacttggggttatttataggcaggaagggggtgtggagtggagctggcgctgcacttccctctctttctccggattcacaccgagggctcgtttggccttccacggaggcggtgaggcgggcaccaccttccatggacgcgt

SEQ ID NO: 5787 - DNA, 2401 bp, Homo sapiens; identical to SEQ ID NO: 5563

SEQ ID NO: 5788 - DNA, 1579 bp, Homo sapiens
cggcccggtgcacgccggtgccactctcgcggccaagcctggggctgacaccatgcagcacacggcgctacccacaatgcaccggccctcctctgtcacacacaggcacgcacactcacccccgcgcccggagggagcccagggcccggcccgtgggcgcccaggcgccgacccctccgaccccgcacttacctagaagttgcaccggtcgcgatcccgccctggcgccctcgggggcttggggcccggccggcggcggccgcggcgagcgactccgggtaggattcagccagcgccgaacaaaggctgcgcgcaggcagcgggcgccgcctgcatccccgctccgcgccccggcggcggcggcggcgcgggggcccgggcgggtccggcgcccgctcgctccgcgctgcccgctccgagggcgctccggctcccgcgctcccgctcgctgctgcccgccaccgccgccgccgtccggctaccgcaccgcacacatcaattattcatcgcccgtctccagcttcccgggcgaagccaatcataggcggaggctccgctaatggggccgccgccgccgccgccgaggaggcagccagccgcgcgcccgggcgcaagcgacagctctccagggacggggatgggccgggggcgcgcggggggcgggggcgcacggggcgcgccggagaaacttcccacggcccgcgctctgcgccgcgctcgcggaccctgcgggcgtgaccacccaccctgcgtgtgcccgcgtggggctgggggctccgggggaggccaggccagccgcggcggggggaggggagggaggaggaggaggagcgcgggaggaagatgaaaggcgagcagacctgccttggcgtctccagggagccccggctcgcgcgcgccctccccgccccgcgagcctcgccgtccgcaccccgccccccagcccgccgcccgcactcactcgcgcgcgcagaccgtcagcccagccacttcgctgcgagggagcgcgagcgagtatgaatcggaggcagctcacatttcaaacttgcacgcaggggtggtgctggtgcacgccgctgccgagcgaacgcacgacccgacgagcagcactccagcctccgggcgggggcggcgacgaggcccctttccttcccccgcccaggcaattaattggaagcaacacttgtgcgagtggggctcccggagcgctgtcgcccgaggaggccgccgggaaggcgctggcggtggatgacttcgggtgtctcccgccccccagcgaatcctcccaagtgggcatgctaatgagggtccacggcggggagggggtggaggagggagctgaactggagggggcctcggccggggggaggggaggggaggggaggggagggcggggctaggcatccagattaaatctcggtttaaaggattttcggaacgggctacggggtggagaaggtaggcggcccggcatcttacttccctgaccctgggtgccctggcacccccgggattccccgagcgaggggcccaggacagggtgaacacgcgcacgtacgctcccgctccccgacttcgg

SEQ ID NO: 5789 - DNA, 919 bp, Homo sapiens
cggctcacccaccccgcgcgcctccacatacgcctttcctcgacccctcacgagcacacgcccgtcccgcgtgcccgctcctctctgcctcccgccccgatcctacgctccccctcctccctggaccccgccccctggagcgcgcccgcttctctctgccacgctccccttctttcattccctctcctctctgcccgttgccccctcgtgcgcgctctccctcctgcacaccgcctcatctctgccgcaggcccgactcctgaacgccccctcctctctggccccctcccctggcgcgcgcccccttccgcacgaccccttctctctgccgggcgccccgcgcctgcacgccccctcctctctgccgcgccccctctactctgcggcgggctcctactcctgcacgccccctccactctgccgcgccccctctactctgccgcgccccctctactctgccgcctgctcctactcctgcacgccctctcctctctgctgcgcgttcccccttcgctgcccaccgcgtgccctctgctcacctatccgcgcgccccttccgctttgcggcgcctacactggctcctgaggcgcgagctctcgttgcctggcaacgggacgccgctcctgggtggcgagcaggcgcgtgtgtaggggtgagcgcaccggaaaggcccgaactgtttttgggatttgttcccctagcttcgctgggtccggcgggcagaggcggttctgaccgttgggccttgggcgtcgagcaggactcacctgaggcggagagaggccgcttcgcgcctggggctcccgaaagcggccagctgtcctcctgctccccctgagcggggagcgctgcgtctcctgcgggctgcgggagacccttccagactcccgggtgggaaaaccacactgagcgccccgg

SEQ ID NO: 5790 - DNA, 944 bp, Homo sapiens
cgctgggcgaggccagggctgcggcaggggagccgagccgggagaggggcgcaagacctggcgctgggcgggacgctcgggcagggtgcgggaggggctgagggccgcccccactgcctccccgccttggagctggggccaggcggccggagattggctggggcgcacggcgaggcccgggctggagccccgaggtgggaggcgccaggatcagtcggggcgcccgcagcgcaggctgccacccacctgggcgacctccgcggcggcggcggcggcggctgggtagagtcagggccgggggcgcacgccggaacacctgggccgccgggcaccgagcgtcggggggctgcgcggcgcgcacctggagagggcgcagccatgcgggcggcggcggcgggggggggcgtgcggacggccgcgctggcgctgctgctgggggcgctgcactgggcgccggcgcgctgcgaggagtacgactactatggctggcaggccgagccgctgcacggccgctcctactccaagccgccgcagtgccttgacatccctgccgacctgccgctctgccacacggtgggctacaagcgcatgcggctgcccaacctgctggagcacgagagcctggccgaagtgaagcagcaggcgagcagctggctgccgctgctggccaagcgctgccactcggatacgcaggtcttcctgtgctcgctctttgcgcccgtctgtctcgaccggcccatctacccgtgccgctcgctgtgcgaggccgtgcgcgccggctgcgcgccgctcatggaggcctacggcttcccctggcctgagatgctgcactgccacaagttccccctggacaacgacctctgcatcgccgtgcagttcgggcacctgcccgccaccgcgcctccaggtagcgccgccgccgccgtccccgcgcgctccgacgg

SEQ ID NO: 5791 - DNA, 1096 bp, Homo sapiens
cgagcatcaggaaagcgaagccacacaacgcggctcctcctagccccggcgcggcagcctggaggggatgtcttttttgcaaagcgagttctccaactttcccgggccttggcggagctccgggaccgcgcaggggtaagtggagtgccggggaaggggcgctggggctggggtgccggggcaggggtgccctgtccgcacgtacccacgacagtgagcagcatgttgtccagcagcagcgccaggaacacgatgaacaggatgagcttccgcgagcggcggctctcctgcagccagcggaccagcgccagctcgctcagggccatggctccggggctccgctgcgggcgcggtgcgcggtgaggacccaaggcggccgtggaccccccattctcccgtcccccaggccgcggaagggcgggtcagggagccgcgcgcaccggcatccggggacacccccgggcgccccagcctcggctcacctgcctcgagcgcgtccccacgagagcccgcgctccctggaaagagcgcccgcgagcgccgtcggggacccaatctggagacccaacctagaacccccaggacgctgccctgatccccgccgcccccaactgtgccacctcccaaactgcacgctcggccccgtgcaccttgcgccctgcgccctgcgccccggctgccccggggtccccgcagccccgcccgcgtagctctgggggcctccctgcctccctgcctcccccgggcccgctcccctccggcaccgcgccctgcgagcagggaaccggggccgtgttacctcggggtcgcttgcgatgcctgcccgggtcctccgtgcccgcgccaacgcccgcaccgcagtgggctccgtcagtccgggcggctccgggtcgcagtctccgccccagcgccccgccgccgccgctcagtttaccccgtccggctctgacgtcacggccggagggagcgggggcggggggctggggcgccccggcctccgcccgcccgcgccgtcgctgcgcaggaggggctgccgcctccctgtccccgcctcggccgcggccgcgcctcttccccggacccagcgcgtggccga

SEQ ID NO: 5792 - DNA, 4048 bp, Homo sapiens
cgcacgcctagatgggttcctcgcgcccgggccgcagtcacctgagtttccgtgaggctgaggctgtgtgccagctgcttcctttcggcgcccaccacgtagtgattcttctcaaaggcgtgttccagccttagaagctgggacggggagaaggcggttcggatccgcttgggctttcgggccagcgcgttgtgcaaaaggaaactctcggggctagtgtcgttccctgcggggagcacagcagaaatcccattagggggggctgctctgaccggagccgcgcacttctcccgagccgggctggcccggcaccgtgctcagggccttcgcatagccgcgccgctcgacctgcgggggccggtggtcctcccaagggctcacgaagggaacgcctgctcagctgcccggcccggaacgccgggtctccaccggtgcggcacccaaccagccgctgtcgcagaggagccagtccccaggctcctgacctcggccggctccgcagccgccctggcgccgcgggcctcgccacctcctcgccgggcgctggaggcaggggagggagccgcagagcctggccaggggattggcgcccacaacccgaagaaactactttctcttctttctaacctctcggggaactttgacccacggtggaaaggcggcgggctgctctccagagttttcatggagatttatttttaaattatttgttttattgcccctccggaaaagtatagaggcggggcgagtcgttgaagcccgatcgggacagaaatctggccggcgggtgtgcttggctacagccgctgctgcctctcgcgaactgggctccggggctcccggctcccgagaactagaagagaaacgcgagcgaagggatcgaaacccggggggttaccgacttgcagacaccgccaggacagtctgtaacgcaggaagatcccagcggctccgggtctggtgaggggaccataagcatgactgatagcgaatgaggaagggcagccctaaacttttcaagcaaagcctcagagttttgggttcactcattagcataggaaatcgattcaccgaaaacccaaacaaagaaaaacaagccgacagtccaggcaggatgcaggcaaatccagttcgggattaagggtaaaaggctttttgggttttttttcctttggtttgattttttaaaatatggggaggggggtgacatctacccgattctaggctccggcaggaacgcaatgggttaatgaatggacaagccgcggagtattgatcggctgccgccggaggtaggtcttttactgactccaatccgtaaactaattactcctttttctgaagttttaactctcctcctcccaccccgtacccagagaaaaacaaacaaataaaaaatatcgcaagaaatgaaaacacacgaacagatatttccctctaagacagtttcctgaccaggttctttttttttttttttaaagaaagaaagaaaaacaaaaaccagaccgaacctgccttcccgctgtggctgctcggcgccccaattaagcaggtcgcggcgagagcgccaagccctggagctttcctcccgcacgggttcccgcccctccccaggcctccgaaaagcaggaaagaaaaaacaaatcccatacttttctcccggggcgcgaggatcctctcgcctccagaagagggtggaagactaagaagccgcgggtctggactgaaggggcgcaaagtgggtggtgaacagggtcgaacgcagtcgaaagcaagcctggcggccgagtcctgtccgcgcccctcggagccaggacggttgggggcattgccgagggtaccaggagcctggggatcccgcgggctctgggctccgcggcgccgggcacgcacagcccagcctgctctgattcgagcgcactgggggacaacttctccgttcgcaccccttcccaaagggtcaagcggcccgcaggccatcactccaaaccagtcgtagcttcggagactggggatcgacaccacgcccggccccgcgccgcctagtttcccaacagggcgcgctggcccgcgagccggaggaacctccgcccaggccttgccaagcgcccacccggagcaggccgggggcagtgaaggatgcggcgggagcggcgcgctgcagttccgcgacgtggcacgtaccttggaagcgatgacccagatatcggtagcggtggatgagccaggggtagaaggtggacggatcccgctgctgcgaggcgaatagggggtgtggcgagtgcgaggagggtagggggtgggcggccagggcgtgcggcggcggcaccgggtgcactggcacggcggggttgggcgggtgcgagaccgcctcggcgaacaccaagtccgggttggagtagacgcccctaccggcggcggcggcggcggccgagtggaagccgttgaggaacggatttatggggctggagttagcgtagctgagtgccgcgggacggatggggtcctcggagcgcgaggcgggcaggggactgtccttggccaccagcgactcgatggtgaagcagcgcttgggcgccggctggaacatgctgcgccgaggagcgggcgccctgggctcccagctcctggcgaccgccgcacgctgcctccgccgcccgctgcccgcggcgaggacggacgagaattggggactcgtttgtttggggtgggggtgggggtggggggaaggaaaggaagaaagaaaggaaaggaaaggaaaaaggaaaggaggggggagggagagggagaggcaaagccgaggatcccgagaatcttgcaccaaacgcgcccaacctgaagagaggggggaaaatccttccagaagaatttgcaggcgtggattggggtaattttttttctttttttttctttttttttcttttttttttttttttttttttttggcgagatggcgtggggggatcggagttagaggcagggaggagaaggggggaaagttctcgggggaggcaaaaaaaaaaaaaagttttttctcctctgcaaaaggcgggcagggcgccctaagtccaaggacaatccatggaagtgttcgcttcttcacaagttgtgcaaacgatttgttagttcatgagcctaattagtgcggggatcacataaacagcttcctccgaagcctggtaaatggcttgatgattggtcgctattactcgccctgaggtggaaggggggagactctttaaagtgcgtcagagggaggtgagcgcctgggaacccggaggcctggatccgggccgagagtggaacggagtcggcgccgccgcctcggctgagccttctgccgcccaccgggcggccgggcttctccgcgccttcgcccctcgctcccagctcactcgctcctgcggcgcccgctgcggcttctcctcctccttcgcctcctcctcttcctccagtttcttcttctcctcctcctcctcttcttcctcctcctcctcttcttcctcctcctctttccccacctactccccctcagccaccgcctcctcctccaccagcaccactccctccggggcaccccggtccctgcagagtccctggccggcgccgcctccgctgcggccccctgaatcccgagcctgcctcgcccaagctggtaggacagaaggacagacagattcctctagcctagcgctccgccgctgctgccttacgcggccccgcgtcgggagaactgggatcgccccaagagcaccgcgagggtaagcgggcaggggctggttcccgggctaaaggcgccgttcggttataccaatccccacacttagcaaaactcccagcggtttcctaggccaggagggatcctggagtgaggggtacggggtcctcccaccccatcaaccacgcttagcctcgaggtcccagggtcggtgcgttcgcgattcttgacccggctcgttcgtttgcgagttgagaccgggagctgccgaccccgccggagcagtgggcttccaactctctccctctctcgccccacggtctctagcgt

SEQ ID NO: 5793 - DNA, 3292 bp, Homo sapiens
cgcgcccaagccccagttcctgaaggccgctggacttctcggcgccctcggcccggcccagtctcctccggggtccggacaaggaggccgggcgctccctcccccacccctctggggcctcagaccggccgtagcagcggcacggaagagaccaccgggtgcgagtagtagacggggtgcgggaaggtgagcagcggctggctgactggcaccggggcccccgcggctgcagccgccgcgccctcggccgccgagttctcgtggtagaggatgggcacccgcacgatgcgctgcgccgcggcatggctcaggttggccgcctccagctccgccgccagctgccgcttccacttgttgcggcggttctggaaccagatcttgacctgcgtctcggtgaggtgcagggacgcggccaggccggctcgctccgagctgctcagatagcgcttcatgtcgaaggtggactcgagctggaagacctggctgcgcgagaagactgtgcgcgtcttcttcttgcggcacgccggcttcttctctggactttcagcgcccttcttccagtcttctgcgcccggagtggccgccgccgcccctacgctcgccccggccgcgcctggcgccgcttcgccttcctttttgctttcctcggagtcgctctcctccagaatgatctcgtccgggctcttggagtccagctccttgtgatcggggtcggccttgagcagtggctccggagagtcgcggtctgtgccggaggcgggggaggagtctctcagcaaggccttctccgaggctggggagacagacagacggacgcacacacatgcacaccgacacagccttgagcgaggcccggcgcctggggacggcaggctcaacccgcgccggcctccaggtcccaggccatgaggcctcaccattcccgcgggctgcctccttctcggctgggccagagaagggacgccgagtcctgggatccccctcctcccgaggacaggcaagcagatggtggtagcgcggccacctccttccattccctcagcttcctcgccaggggccggcagaacggttccctttcggcttaggcgcattggaatcaccccctccttccaggccgtgtcccaagccccggccgtccgaagcctccctattcacgcccgaggccacttttcccgggaagcaccgtgcccggggctccaattccacttcttttctcaccaagtgggattggattaacgggcagcgcaacccagcgcgagggcaggctaggggccgaaaaaaactgaccgagcagagggtttgcgggtgctggggtcccagaactgcggagggaagcagcgcggggcggggacggggcgggcgcgcagggggacaacgaaagttcaaagagaggtcggtaccttcaggtcgcgggaggtggccgccggcgggggtcagggtgtaggggtaccaccaggctggggagcgctccaggtagtgcgcgggcagggcaaacctctgcgccgggatctcaaagcgagggaaagccaggtcgcccacctgcgagagcgcgaagcccgcggcgccctccagggcccccttggccgccgcggcagcggcagcggcggcggcggcggcagccgaggctggcgcgaagagcgtccgtgggggcggctgaggcttagggggcggccggtggtggtctccgttgagcaggttcttgatggagaacggggactccttgggagcgggtggggggggcggcggcggttggggctgtgcgctggcggtgccggcagcgtccggcccgggttccggcatggtcccctctcctccgggtccccgggagggagggagcgggacaggcgggcggcggggcgagcaggcgagaggccggaaatcagaccataaacggaactcaactacggggcgcaaagtcgggggccgccccgggcgcaaatccaacggcgggagggcggagtgaggacccagacgggcgggctcgcatgagggaggggtgcggaggggcggggagcggccctgccgcggcaccgagggatcgaggcggctcggctgcggctgcggctcccgcggaggaggcagcaagagcagtccccggctcgaggctgcgtcaatccggcgccggatgctaatgatgaaatcaaaatgtcatccaagttaaatgcggggagtatacggcgattgggcgcgtacaatggcaaatgggattaggcaggcgaaggctcagccgagccccggccccgcagccgcctccgccaccgccccctcctcgccttccctcggattttggcgctttggcttcgggctataagagcccgcccgttattggctttatatagtccaattaggcagcaaatgaggacaagcctattagcacaaaaggatattggctcccgctaaagaggcactcggagcgctcctgcgagcgcaggaggcgagcgagggacgcggagcaggcggcgcccttggccgaagcgcactaacggccgcgagcccggagaccgcgcctgcctctcccccctgcggcgcagggacccgcttcccgccgccaggcctgcgggaggggggaggggcggaccaggccctcccgggtcacctcggggttatctgcgctcgcagctgccgctcccccgccccctggggctggacaggggcccgccgcccccacgcagctggagagccacgcagcgccggcccaagaggcaggacgtgacctcggccctcggagaactcatcattttcctaccctttggggtccggcgacctcggtatttttcctaaagcctgctaggaagggcgaggccaagaagagagggatttgggttccccacccaccatccagccgatagtaagggaatccaggtgtaagtcctcgcactgcgtcttcggactcagaaatccgcgtggccttggcctttagccctggaaaaccgaagagtgagccttcccccgggaccaggagtgggtgtgcctgtgtgcgtatgcgcgctgacccggccaaaacccgcgcgtcactcggtggggctgctggggcaacagcttctcggcaccgacggctgctctcggaagggcacccctctgctctggccgccggtgcccaaggctcgcggatcaactccgagtctgtgaccccgacgacagcactttctcccaggaagtctctccggccagctggcgtttggagctgtctaactaacgctttaatgggggcaaggtgaaccgaaggcgcagcggcgtagcttcctccgccgcggcaagcagcggcatccgctgcgcgtctcgacggcagcga

SEQ ID NO: 5794 - DNA, 3753 bp, Homo sapiens
cgcggctattctctcggtgcagcgccctcccagcccctgcgcggccgcaggtgtcagggcgaggaagtccgtgggcgcccccgccgcgcgtcaaggttccattcagagcaagcggccgcgtgctagccggtgatccagccacacgctgaaccaatgcaaactattaacaacaaaagagtgtagggaagcgcctttgcctccctcaccttctttgcctggtcccgggcctcggatctctcctgagccgcagaactgcctcaccgcgcccagttccctctccgcgcgagacacataactctgccaccggccgggtagctgggcgcagcgacaagctggtcgcgccaagctcgcggcgagcaaagtggaggctttactaggtacaagcagcgccatcgcctgctttatacccctggagaggaagtgcgcggcacagggcatgtcatagcgggagctgctgtggccaagctcaaggcgagcccagtgccgggaatatgccgctgggcacccagctcgcttgttcccagaaggcaatcgcttaaatggcgaggcctgcctcccagtctttgtctttctccgcgcggactcttgagctggattccagccggggtgcgccccagcccgcgcgacgattctgggcgttaggagggagagtgggcgggcagctccagccacgtgcagtctgggcggcgccaaggtcccgacctttaacccctgaccccggtcccaccctccacgtggagcgagccaaacttccacagacagacgcatgcaagtctttccaccgaaaaacctgaaaaccttccgtgcgttatcatgccgggtaaccaagcccaccaaagttagcaaagatgtttaaaatgttttatttttttttctttttaaaaatatttacagatctgaactctccccttttcgtccctaccatcctcgggatgagggaaacgaaaagaagcaatttagtaattgtccaaagcctctgagggcctggcttggccgagcgtgtatgcatgtacatatatacaggtgtatatatgggggaggagtgtacctggttttgtaggtgttttcctgatttttttccctaccaaccacagcctgtctggccaaaactccctttcccaccaccacccgagaacatctcactccgaatggttttcaaagcgtactggttcggtctaggtaggaagcaggctctctgacttagggaatgccaataaatacccgaaacaatcaaaacaaaaagtagggcagagaccataaataagagctaatgaatacacatggtgtatttcttcatatttctggaaacacgccgccttgctccggagccctgcttacagtacagtacgcgcccggctctgcgggcagctgggggcggcgcggggcggcgggccggtcagtagtcgagcttgttgtataggttgtagagaggtaaggccgagaggttgcttcccgggtagtagagcggcgcgggaaaggcgagcgagcgcggcaccggcacgcgcagcagcgaactgtcccggaacaccagcggcatgctcaccagagtctgcgccgacgcgtgcgccatgttggccgcctccagctcagccgagagctgccgcttccacttgttgcggcggttctggaaccaagtctttacctgggtctccgtgagctgcaggctggaggcgaggcaggcgcgctccgagctgctcaggtagcgcttcatgtcgaaggtggactcgagctggtacacctggctgcgcgaaaagacggtgcgcgtcttcttcttggccgcgccggcctgccgctcagcgccgccgtcccgcggccgctcggaccccggcgagggcgagcccgcgggcaggagcctctctttctcttctttaaagtccgagtgcgaaggagagaggaaaggcgtgcgctccaagccgcccgggcccgagcctccgctgcccttgggggtacctgaggagcgagaacagacagaaaggccatggagttggttggggagcctcggagaccgccagctctccctgggaccaagcggttggcaagcgcctgcagccttggtcccaccttaccaatcccctcctcttatccctctcactggccccccaaacccagcaccccgtcctttaaaagcgacaagagagggacccagctacttggagtatggggtctctgtgctcccacctttatgaatgggccaggggcaacagggagaggaggtctggagggggaaacattagcatggttttaaaaggcgaatttgcttggtggtaattgagctggaagagttcctcgagctttatagggtggcatcatttcacaggccgtttgtttggaaatcacgctaaggactaacgcaggactccccttcgtcaaatgttgtaaagaggaaccgtctctgaaatgcaccattgtcaatcatcttggagtgctaatcattccaaggaggagagagagagaaaggcagagatacggagcgagtgaggaagaagactcagaaagagattacggtggagacagactgcccagacccgacttgcagatctccacctcgtgtccggaaagaaagtaccagatgtgcagtgattgaggacagccgggtgtaaggccggccgcgtgtccctctcgctgtggtccactctctcaacaactcaaccttccccaggaagcccaagccggcacgggtctgtgttcgcctgctcccaggggcccaccgggcggaggaggcaccacagtgcgcgcccctctccccgcggtcccgaacccccggctgccgcagctctggccagagggggcccggcgcgggagtcttggcggggcgctcagcctccctcccctcgcgctcgctcgctgccacactggcgacgtgcgatccttacccaggcaaggaaaagggatggggggatggtgcttggggccctgctccttagggccgtgctggtctgggcagaagcaggcgggcgccttccagccgtcgtccggctcctcctcctccgaggacacggacaggctgcgcttcctggctggccagccgacgggctcccgcggtgcctccgaggggcccccgcccaggatggactggatggtgaagctggagacgccaccggccgccggacaccccttgcccgcatcttctttgctgcccatcctgggttcataagaaatcgaaggaaaccaagaactccctttagagacgatctgggtgatctgggtggaaggtggtgcagcaggcaggcagtggggaggggcggggaggaaatctagggggagggggcgccgaggctggtgaggcgtcccttccgcgccagggacatgcaggcaccggatggctgcgcaggggttcctgcccgcctggctctgggtgcgcccgcccagccccggtgcaaatgccccttcctcgcccgccaactcgccgggtctccggcggcgcggaggcggcgcggcctcatttgcatagaggttacccgaacgcggccaatcgcagcgccgccgagcggccccggaaaatttcaaaacgctccggccaggcacacagcaccggtgcgcccccagagcgcgccgagggcctggcgggcatcagcggcgtctaaccaggggcagccagggctgaaagcagctgcagattctagcccgggttcctggcggctgcggcaactccgactccttggaccccttggacccttctctccagaggcaggggcggtgcgggactcggagctggagtggctcgacgcctccgcaggcgacgggtctccgcgc

SEQ ID NO: 5795 - DNA, 829 bp, Homo sapiens; identical to SEQ ID NO: 5784

SEQ ID NO: 5796 - DNA, 1328 bp, Homo sapiens
cgggcgagagatgcccctttgggcgcttagggccgggcggggtcgcgcgccgggctgtgggccgcggtggagacctgacccgcactccgagggttcccagagagccggggagcgagtagcagagtcatcgtttccagcttcagcctgaaaagctggaccgtgccgccgcatgtgcgcttggcagccgggcgccccgggccctgcggccacatcatcctggggcggggacgtgtgcgctccgggcgcccggacgccactgagccacgtctgagccgcccaccctcgggggtgagcgagccgcggctcggggcgggaccctggcggggggacccgagcggtctctaggacccgcgggacgccgccaactggcgggggtgcgggggagacaataatttgttccgcggtaataagaacggtgactgctggccgtggatccatttcacaggcctgccttctctcactaacgctcttcctagtccccgggccaactcggacagtttgctcatttattgcaacggtcaaggctggcttgtgccagaacggcgcgcgcgcgcgcacgcacgcacacacacggggggaaacttttttaaaaatgaaaggctagaagagctcagcggcggcgcgggcgctgcgcgagggctccggagctgactcgccgaggcaggaaatccctccggtcgcgacgcccggccccggctcggcgcccgcgtgggatggtgcagcgctcgccgccgggcccgagagctgctgcactgaaggccggcgacgatggcagcgcgcccgctgcccgtgtcccccgcccgcgccctcctgctcgccctggccggtgctctgctcgcgccctgcgaggcccgaggtaagtcgccgaactagggcggctcgctgcccgccccgccgagggcaccgcacgctgcgcctgggcgcgccgaggtccagggctgccccgaggggcgacgcgccccggcgcatctccggagccccggggcttgcgcttccagcgcggcgagaccgaccccccccccccaggtgccaattccttggggaagggcgacacttggcccgcagccccacaggagccagtacctgccccggagggcacagcctcgggaccgctcccccgtcctcaccctcttgggtgacatttgcagatgtctctgtatcttgacatttacacgtgtcactcgggacgatgcgtgtcgggtcctcttgctggccctatcccgcagtgaatatccccaccccaggctccgggccagcccttcaccaggtttcctttccagccccgcctcccccgctaacacacttaggggggcgcgcagcggccccgc

SEQ ID NO: 5797 - DNA, 2957 bp, Homo sapiens
cgagccgcccccggctctgcgcttcctcccagggcaccaaggccttcaacgccaacacgtggggctgtcaccaggggaaaccggaggcctgagctcagcacctctggacccgcacccggctagcctccagcctcccttcaaacttcggtcccttcccggctgtagaggaggtgactgaggcggaagccggcggccgcggtctggtggccaggggcgaagccaggggaggggttaagggtctggggagcgtgggtggcgactgtcggtggccgcctcccgaaagaaaagtcgcccgccaggcccccggggaaggtgccaaggccgccagccagagcgctcatagcagaagcgaaaccggagaagcaggtggcggcctcgggtgcggatggagagggcgaggcctgcaggtccaggcaagccgcgctcgggggctccagcgctggcgcctcggcccctcccacgctcctggctcccgagcgcacggccgcgctggcttcagctctcctcttcctcttccttcggaagttcccgttgtcaaacatcttctcgcagttggggtccagggtccagtaattgcctttacctgcagaagaagaaacagcccagttcagaaggttcgagctttgacgggccgtggtgtgagccagcgaggaggtcagcttcagaaagatcccctgctggcccttacagagggtctgagtcctcgcccccattccacccttgacgggcactctgtacccgatgggcctccacagcaggactgggaagaaagtgacaatccagaaaggaggaggaagggagccctgggaaaggccgagccccgttaaggtgaaggaaggcctgcgagatgctaatggtgggactccgccagccgctctgccaaggacagcgcagaccacgccaggcccccaggtaggctccagagctttccaaacgggcatcctatttgttttgcccatccttggggtaggcgctgtcttccccattttaccaggtagggcactgaggcccagggaagttgagtcactcccaaggtcacccagcttgctggctctcccgcttcttcctccgaaggagcgcacagagattgagagccccgggaccgccgcactgtaaacgcgggcctgtggtgggctcagccgctgtctgagaacctgtccatgcccaagcacttcttccccttctccctcctccccgggtatccccaaccgcgcagggagaaattaggttgtctaaggtgctcccacccccggagtgcccgcggcccggcgggaagatggggagtcctggacggagcgagccggcgcgccgctgttacctgggtcgtcctcgtcgcggggcaccttcttgaagcagtcgttgagcgacaggttgtggcggatggagttctgccagcccgccttgctgcgcttgtagaaagggaagttaccagccacgtactggtagatctggctgagcgtcagcttccgcagcggcgcgctctggatggccatggcgatgagcgccgagtaggagtagggcggccgcaccagcctcagcagctcctgctggccggagaggctcagccaggcgaggtcggcgcccgccaggccgcccggggcgccgaggagcgggccgggagccccgtagctcggggccgcgtagggcggcgcaggcccgggacccgaagcgtaggacttggggctgagcgctggcgcgttcacccacaggagggggcccccgcccaccgcgcccagatcccctggctcatagcccggggggtgcgcggtggcctgggcctggccgggcggggccgaggaggggcccaggtcgtcgcagtaggtggccatgtccagccgcgcccgggcctgggccagcggtgccgcaccgaaactcactggcgacccatccagcttggccgccagcagcgcccgggtgcgaccagcccggcccagccctccgccctttaaacaccgtcggggccagagcccatggagagtgacggtggcgagcccctcccctggcagccctggaggagcgaaatccttgtcctcgccctggtgtcagttttccgccccgcccaggcctgacacgtcctggaccggacgcccctctgattcccccttcctcctttgtgcgatccgtcccgagtccacagtcgctcgcggtcttggttgcagggaccctaagtccgtagcctcgtctggcttcacgggccccgcagccccgactgccctggaccgtaccacgactcctcaaggcccccagggctgtggcttgggagccccgtccaatgcgcggcccctttgctcggctcgggacatctcgccccaaagaaactcgcctcgccggggcccctgggttacccgggactcggggctagggatagagggcgactacactgcgcaagagatcgcaatgaagtccgtagatctccaggctggagccgcagagcgaggtggcgaggtggagaacgcggggctgggcctggacagcggccctggggtcgtctggagtcctcgctccctcaacccggaaggcagcggactgacatctgcgccgaagtcgcgcgtaccccacggagggtcgggaccctggaaatttcgaacgccccagcagttcagggcagtcatcgcttttcccaagccggggagtccggggccccgccaggtttctccgcgctgtgacctcgggcgcgcagagcggagagcgccaagctctctgctgggtgtcggaggacgcgccgaaaacagggacgtctctgcagtgcgtccgacaccagctctccagtcctgctgccgcccggggttgctgcagcccgggttatcccggccccccaagctgcccggctttcggcctcccctgctccccgcgctgtggggtggcggaggatggacccaggctgacgctgggctgggtacctggaaagagggcccgcctcccggactccgagtcgggcacctgtgcgaaagaggcga

SEQ ID NO: 5798 - DNA, 1860 bp, Homo sapiens; identical to SEQ ID NO: 5570

SEQ ID NO: 5799 - DNA, 1422 bp, Homo sapiens
cgcggggagcagaggtgcccagacacgcggcctgtccccggcccccactccacagagcctcccaccccggcactgagcccggaagcccggtcaccagctcgccattccacaacttttccagcctgggagtccccatacgggtggccgcccccccgcagcggcctagcccccagctgcaggacccccgggacccccgtactcaccatgagcgctgcaaagttgcggaagcgtgagcgccgctggaggaggcgtccagggggaggcgatcaggtggcgccctgctccccgccagcctccatggcctctggaaggtcaaagtcccagacggcggccaggaggtcgcgctcccgggcccctggcctcagggtgaccgcggcggggcgggcgcagtccgggagctgctcccatctgtgaagacagcggcggtcagcggggcgggcggagggtccccgcggagggcagctcgcagccccgaccccgccagggagcagccgcggcccctgtcgctccctcccctccgcgggcggcctgggggctgcgcctggggctggcggaggcggtgccggtggggaccggtggggggctcggaccgaacgcgccagcggcagatgcgtctccttctccatatttaaaaatcaatctgcgccccactcccggctccggagccaaactcaaccatctcgggctgcacaaagccagaggcgcgccggggggtttgcaccgggaaccggcaccgagtgacccgcccgccccagcccggccgcggcgcctgctctgcctggatgtggctcgagctccgggccgggcgcgcggggcgggggccctggattatccgtggcgcctcccgccccagcggagccgaaagttactcggagctgctttcctcgcggccagtgtcacctcggggcgcgagcttttctgccgagccgcggccccgcgcgtccctcccgccgcccagacccgcgcgtccttcccacctgctgtggccgaagcggctgccggggcggccgggccgcgctcccggagacagacgcgctgcgctccccccgccggggacccgctctccattcgcgagggcagcggccgagctgggaccgagttatcaacagattgcggggctgcggcgccggccggtgagtcacagccccgcgcacgagcggcccagcccggccagcagcgccgccgcctctgcgcgcacctcccgcggcgacagcggggacccggggccggaggcaggcgcgtaaccatggggaccggggcgggcgatggcggcgggcgggctcctgccgcagggtggggatggctcttccagccgggcggccgccgtcacactgcagagcgtatttaaagagacacctcgctccgcgctcgctccccagcaccagaccctcgcccgaaaacgccgccgggcggactgcacga

SEQ ID NO: 5800 - DNA, 1479 bp, Homo sapiens
cgacgagtctacgaaccccatcgtggccggcggtagtcgctggtcgagcctagcgcccaggcccaggccacctccatgccgtgcgacccgccgggaacgggttcaggcccgtctgcccaaggccagaagcaccctgtccccggcccaacgccggatcgcgtcccgcccttctcaccccataccaaggaaaggaactagacgcttgggagaaaggatgagcagcacccggtgggattcggccccaacccggggccgtccccaactcccaacttcccagagtttccttcggcctcgtcccccttcccacggctccgaggccgccgcggcctcccctcgctctgagtgcagatagcccgggaagtggagagcgtagctcggagctagggagccgcccccaggagccttggcgatgggagcgcaggtggcgggcgtggtccctccaaccctgccctagccgacccggagtcggcctccgtgcagtagccaccgcccgggtccccgcctggttacagcatcaggccacagtgcgctggttcttgatcactctcctggctcggtggccgccccccgccctctcccagtccgcgtcgctgttctgcctcaggccccggtgcggccccaagtcccagcccagggcccttaggtccctccaggcggcggtggcggcactcacctgggtcgcggagccggggtctggcacggtcccgcaggtggtaaatgaaatcctggcagctgtcgtgctccagggccccacgggcacagagctcggccagcagctgcagcgcctggtgacagagcgcgtccctggccccgggcatcgcccccccgcatcctcggaccgcgccgggcaggcgggcgcaggagacagccctccgcctgccagctcagagccgccgcctccgggccgtccgcgctcaccgccagggacctgccgagaaacggtgcgagcctgagcccgagccccagacccagccggcccggcctcccaccggttgcatgcagctcttcgccagccggtcggtcaggctttctctctctcccgcccggtccctccgtccctccccagacaccgaggagaggcggtgccgcacagcccagagcgcctctctgcttgcgctccgcccgctactcgcggccgccggggggcggggccaggtcaggagtgcgcgccgcagggtaggatagcggcggccccagaccggggacctggggtactccccggctcctggccgagcgcgagacttggcttgggacctcgcgcccagagcggccgcgccctggcttggggagtgtgagtgagtgcgcgctccgggcgctttcgctactccacccctcatccctgatgcaaaccaagcacccgctcccaccgccgagtgtgtccaaagcacgttcttggatgcctagtgcgaaggttacaatctgggcacacccgccagatgcgcagaaccgagtccctgcttcgaacttggaaagagccgc

SEQ ID NO: 5801 - DNA, 446 bp, Homo sapiens
cgtgcgcctcgcgcaccttgtccctcgcgcgacgccgtccgcgccgcccgcggttcggtcgggagcggcagcccgtgctccggttccggttccggttccggctggcgtctgcacctgcgaccaccgtgagcagtcatggcgtactccacagtgcagagagtcgctctggcttctgggcttgtcctggctctgtcgctgctgctgcccaaggccttcctgtcccgcgggaagcggcaggagccgccgccgacacctgaaggtaagagcaggccagctccctctgagcttcccggcgccgaagagtacggagaacgctgcttgagggaggggtgactctgagagtctgcagccttcaccgaaatatccaccaaactgactggagagggcgggcgagacggcgttgaagggccaatgcccacggttccgttgttatcagcgggtggcgg

SEQ ID NO: 5802 - DNA, 2991 bp, Homo sapiens
cgcctgccgcctacaggcgtcgctgagggacagctggcccagtttgcggattttcctccggatcccacacccatgtccagggaaagccggagccacggcggtataaattagcgcctttattttgatcacctgagcgagcgcccgcggctcgcccgcctgcggtataaacgtacaaattccctgtagcaccacacaccatgcctcagagataaatacagccccaggggctcctgctctggcaaagcaactcttatttacaggaatagattacaaaagtattacaaaaagtggtcctgaaccgggaaacgggttgggggtgggttacggttacacctgctacatttgggaccggagtgcactgggtctcacgcccccccaaataaccggtgcatcccggggcagggcttaggtctgcgagggtctcacccccatgggggagggcgcgagaaagctgaacctagcccctcaaggttcagctctggcccaccgaggaacacggagcggccatcgcaatgggtctccgagaagggtgctgcgtggaaaaaaccgcgctgtgtccttgccctgtggggcgggggcggaaacttcagttctcccgcctctcctacctcaagagaggtcgcttttaaagcgctgttgggaggggggcatttaagttcaatcttttgggcgcgagggaccctaggggcaccatccctcgggcgggtgggcggccaccatcccctcagagcacctggtatatcgggttggggttcgcacccgcagggcactgcggggcggcgtccggtgactgggtggggtcgccgctgctctctccctcgctgggggcggcagcctcttgcctgcgcggaggcgactcagaaggcacgtccgccagcaggagggcgggcgccgcagggctctcggtggagatgcgctccacgatgctggacaggcagtctaggctcgacaccgccgcactcttcccgggcctgggttctgcgcggggagggctcggttagtaagcaggggtggggccgcgacaagcctcccacccccgggcccagtactttgagacagattggaaactgaggactttagttagagtccgggacaatccaaaagacagggagctacttgcttagtatttcatctcctgcaccacttcccaggacataggcgtgtgtgagtgggggtgggagcgtcctagatagaggccaggacagctccatgaaggaggaggagcgagcagggagaggcccggaatacccaccgctgggcgcctcgttgtagtaggcgccttcgtagcagttccgccgccgggcgccgctcggggggccgctgtagtccatctgcaaacagcaagggcgactgagtcaggcccgcgggacggctcgaggcccgaacaccaattcctgtagccgccccctccctaactctagcctaaggctctagttccgggcccagacctgtcctggttgggggggtaattacgggtgggtaggagatgaggtctgcaacatgcagggccaaaccaagggcggacagtcaccaaggggcgcaaatttacattttggaagtagggataagtagagaaaaagatcttcacgttcgcgctgcagtgttctaatagcgcccccaatggggcagctcgaacgcttgcccgcacacttccaaaacaggctaccccagtgacagctgcccaggacaagggggtcctctctctcgggaaggatcctggcccaaacctcccgcaaggccagctccccgccctcggaaacgcgtccctgatatcccgagcgccgccctaacttcctcacttcctggggtcccggccttaccatgccgtcggagcagttggagcgcgggctggacgcgtcggagtcgccgctgtagtgctcgccgccgcggcccgggggcagcgggcccggcgcatagaaggcggctgcggcgccagggggcgcggcgtcctggtcgcgcagcagagcctgcaggccctcgatatagcggatggcgttgcgcaggatctccaccttgggcaaccgctggtttggattgctcgacgtgcagcgcttgagtgtctcaaaggcctcatttactttgctcaggcggcgccgctcgcgcatggtggcggccttgcggcggtcggcgttggtggtcttgcgcttgcacgccttgcaggcccacagtaggcagcggcccgcctggtggtgcccgctgggcgcgcgcacatgctcgtcctcacgtgcgcccggggccgggtgcaccgccgcggggaagtgcgagtgctcttcgggtttcaggagcgcgcccacgtgcatcaggcgcgggtccaggtcttcgaagaagcgcaggtccggggagtcgaaacacgggtcgtcatagaagtcgtccgttgtggcaaaggagcagagagagccgtcgggggccgtcaggtctacgtcgcggagcggtggcgacagtagctccatatcctggcggtggcgcggcacggtcctggcttcgcccaacccaagcggcagagagtggccggaactttctgccgctcgggagccccggctgtagatagcaaagtgctggcagtctgaatgcccacccactgtcccccacccctccctctcctgtccggcctgatttgtggttaaggaaagcggcggcagcgccccagggcttcctcacccctagcttctcgccaggcgccctgggctatttatccgtagtagcctaaacgccccggagcccaggcgggcagctgggggagggggagtccgaggccaataggaacactgcggggcggggcttgggggggtccccggggtggccgcaggggcccgcagactggccagccagcccgcccctccacactggcgtgcgcgctaggtcccctaccgggcagggagggagggagcgaccggcagccctaggcggctgcacttggctctccggcacgccctttccaaacctctccaacacccgactgctgtatccgcgggaaacgctggctgcgcgcgc

SEQ ID NO: 5803 - DNA, 928 bp, Homo sapiens
cgagcctcgcagccctcctccttcgcctcgcccgttagctccctgccccccctccccacaccccccaccccaaagccaggcgtcgggcgcttttccctgtcgccgcccggcatccggccaatctttccaaaatgcgctctcactctgttggctgctccggcagggagcatggaggactgggggtccgaagcctgcaaagggtgaccttagcgttgcagccttcccgaaacggagacttgccatcttttcagagggcggggaagctcacaccactctctgctttatagtgtccgtttcgcctcgcttgctggcccttcgcttacccgagacattccaggcacggctcgcactggagagggccgcgctgctgctgcgaccgcacggcgcccggggcaggaacatgctcgctctcccctgcgcggggggaacgaaacccccagagtgcgttccgacacgctctttctactatccaaggcaggtttcggcagctttggccacctaggcccggggagccccagccggatctgctgcggcctcccccgcagcgtaggcaaggaccttaaaccccaaaccagggactccgattctctcttttcccctcccgtcttcttttctcttgaaagagaaatagacagaaagctcagccttgagacaaagaacgcgagtgatttctccgaaataaacttgaagataacgacataacagtgaatggcaggacgcacaaaaccccatgggctcaggtcaaatggcattagtcacaggtcttagccgcagccgccgcgccgcgcagctccttgggctatcgcggagtttgaaaagacgcgttcaaggagatcacttaaagtaagatcctttcgtccgatttcttgcttccttaggatttatttttcctttcacgggcggccagccctcgccccctcgcccccgc

SEQ ID NO: 5804 - DNA, 1267 bp, Homo sapiens
cgcgggatcccagggttctcccgcagctctctgccctcgccgcaccgcgccctcccgggccccggccgcgcccgccagccggaagcgctccctctgcgggtgcgactcccgcagctaccccttcccagcctggcgggggtcggcgagagtggtttccacagcaccttacaagttcgggaactcggggcacgcgggcccgccctgctgcgggtttcgactccctgggacggaaagccggttactagcagcaagagggtgcgcctactcggccgcgcccctcactcctgcgcccctgaggccgggtcccctgagaaggggcactcaacggggacatcttcaagcccgtgagtccctattttcaccctgtcactccgagcagggcaaagagatcccaggaaccggtccacgctaccgccgttccccagaccagcgcaaagctcggctccaggtctccccacgccgccgtggtctgtgggcacccccatttcccggatccctctaaccgccacagtcatgcttacctgtcctggcagtgcacacacagaaccacacaactaaaatcaaatccatcggcatcgctctcgagggtccccgcctagcagggggcaccgaagctaggtggaagcaaatgagcctggatcctgaggcgcgcctggcttggagccgccaaacttgctagcgggcggcgggggaggtggctcggcagcgccgggtgctgcgctcgcatatgcgcccgggaaggcagccccggccgccccgcccccagcccgccccccaccgctggcgcggcggcggcggcgtggggctcggggcccggccccccgctgcggctgcgttcgtctgggagcccgggcaggagcgcggggtttggctactgtggcttgttgcgctccccactgggggccgattccgttcgcctccttcgcccgcagaactgcgaggatctggactgcaggcgccgcagccgctatcacccggagcaccgaagtcggagtcccaggacctgcggccgaaacgagagagcgggaggcgcacggcgcccccacggcttcacgcgctccagcccctccgagccgcagtcgccaatgttgccctctttacttccgcaccgcggtgggggctgccgaagttgccacagttcatccccgccgagtcgaaaagccgccgagccctcgcgggtgggtatttttcctcgggggaacccagaccgaggcggcgccaccgagcgcgcacggaccccctcggaaaacaattactcgggattcgc

SEQ ID NO: 5805 - DNA, 1225 bp, Homo sapiens
cgccggtcgccccctggtgcttccggggctggtaagcgcgtagctgaggaaagggcacaaaggtggcgagctttgcgggagtagttgtgcagaacctgccggaccccagggcttggccggtaggctcgccttcggcggctgggctctccccttggagctcagactccccagccgcaggctgtctctcgggcgggccccagccagggcgcgcagccctgagcgtttgtcgctgcggcccggctggcaggccccgaggggcgcggggtcgcgggccggccggcagggctttgtgccgctcgttcccgggtgtgcgcgaggcgcggagcatccaaattgacaccatatgttttcctattagttgcttcgcggtcgagttctaggcgcataatcatcgccagtgggcgagagcgccagcagtccctagggaagggacacaatgattgaggcttaacctctgaaggggaatttggagctgcgctttctctctgccatttcgatgctgggagtggcgctctggccctggcgtctcctgggcaagcaccagccggcggtatctgcggaggtggctggcacgttgttattttttgaaatgagtgaggagggaggtctagatttaggcggccttacgcgcccgccttggcattagcagactgggaattgccgtggctatgcccgaagtttggaaagtctctctcggtctctttctgggacagcctttctttttccgggaagcttcctgtgcctagaggtggggctctgtagctggaggggtagatggaacttgcgaagcaaaggaaggcaataaaaggaagttaggagaaaccggaaacgtgggccaggccttgctctgttggagaagcggtgtccccgcaaagtccctgcttgcgctggtcccggccggagcccagatcccccaaacgcctgtcacttctcatcgagttgaggctccggcccccacccgcgccttggtgagggccccccctcagccccaagccttcggctaccctgaaaacgcggctcccctcgaaggggaaacaagtgcagttcaatctcgtctgagtgatctacaaataaggacggaaagggtcgttttatcacggtcccgtttgtcgtgacgatgcaatttcccggagcggagcactgtcacaaagtgacaaggctgccacaagcgccccgactgatcttttcaattagccttccatgcatgatccggagcgacttccgc

SEQ ID NO: 5806 - DNA, 1627 bp, Homo sapiens
cggctgccggcgcgagcggcggctccctcccggctgcagaacgcctctcgttgccggagaaggggctcagcaaaattgactcttccttatttgtttccatccataattgatggggagatgagaacgtaacacatctcagcaccgagctcttgtcgcctggcggagaccctgtccaagacgcttccgtaaagcatttccagtcggggaacaaagcacggaaagttgctgggtagagcggccgggaggagacaccgggagccgggtgggcggtggggtggccggtgggctgctccgggcccgggagtccgcccgcagcgcgctctgccagtaaggggagagggacggtgggaagcggccgccctccgggcctgggccggggatggggatggccaagtcacccgagctcccgcccctcgccggcaggcactacccgggggccgtgcaatccgggcgctcactgacaggtatcctacgcccgcgaggggctgctccggcctcaactgcggcgctgcgccccttctccaggacgcaggctaatgctcgcccgcccgctcctagccgggcgcagagctgccagaccccgggcgtcccagcgtccgctctggggccaacgggcgggagggggcggctaagcccgcaggcggctccttcggccttggctcagctctccccggctggctcctggagacgctgtgcccggcagagaagcaacccctgctaaccccagctatgtgcgggggacgccgagctggctctgcctggcaagaaacttttacttgatgccccctccgctttttttccaagggggtgcacagtggaggagggcctccaagtccacttgcccctccccctaagccgccagctttgccagttttgacgcgtccgccaaacctctctagccctttgcgcgtcccttgcacggcaggcagagagagcagcttggaaaataaatcaactgtccagtggcaacacacacacacacacacacacacacacacacacacacacacacacagcgattcgggatctcaggttccgacccccaccgcgcgcacacacacacacacacacacacacacagcgattcgggatctcaggttccgacccccaccgggcgccacaagagcattagcaaattgttgaaaacggtcttacctcattggggggaggctggtaagaaaaaagaaaaagaaaaaaaaaagcttgccacgcgcaaggaagaaagaaaataaagaaaaatattgtaaaaatagatatccctctgtctccttaggtcttggcttccttgatagaatcctgaaactcgccaccaccccttgcagcagcagcagcagcagcgggacagagcaggagcaaaacaaaccgatgcacggcaaatggtgtaattcgatccatctccaagtcaatccatcaggcgagccggagcctggctccctccacgcactcggcagctcccggcgcgggtcccacccccgggcacggacggcaggaggcgcggccggccgggcgcgctcgccctcgcgggtgaaccgtggccagcgccgcctggaggcccccaccctggcgccgcggccctgctgacccctcggtggcctccgcgtccctcctctccggcgctctgctgcgc

SEQ ID NO: 5807 - DNA, 1857 bp, Homo sapiens
cggcggccgtacttggccttacagtgcaaaatgtgcttggcgaggaagtcgaggcggcgctgtagcagctgagcgtgggggtctgcaagggcggccagctcggggaagcgaggctcgtggcgccggtagaggcgcagcagccgggccgcggcgtcctgtccgcggtgcagctccaggacgcgccgcgcggtccgctcgcggaacacgcacactgactgcaacagcggctcgttatacttgtcccacatgcctgctacccggtagccgtgcaccaagcccgcctcattgtccagaaagaccagcgccccgcccggaccgcggtgcaggttgctggtggcacgctgcatgacgcgcgggtcccactgcaggctgaagaggttgcttacgagccggtcgaagttggccgtcaggtagtcgaaaaggattaagtcggtccattgtactaggtccaccagctccgcctggctgaggttggccagctcacccccggcatcccggagggggcgcagacggccgtcctccgagcgccagggcgcgggcaccaccacgtccgtgaggttgggcagccagcgtgtcaggctcaccacgctgccctcggtccagtgcgcagcgcgcagctcctcctgcacctgcgcccactgcgcgccccgagcctccacccgagccagtgccagcggcggcacgtggcgctggaggcccagcaggcgcgccagatagtaagacagggcctcgccctgaatctgctccgggttgatgccgtagcgcacgcaggcgcgggtgccgtcggcaaaacgggccagtcggttggagctgcgcccgcaacccccgcgctccagggccaccatccgggcgccgcgagccgcctccagccacgccgccgcctgggcctccgaaaagcccgggggcacctgctcctccaggccgcggctccagaagacgcccccgtgcaccgcggcgctctcctccggccggggctgcctggctgacacgtgccacctgggctcgctccgggactgccggggcgggccgtccgcgccggccgccagggtgagcagcgcccggaaagttttcagggagccgccgcgggcgtcccacgccaggggcgggggcagagggaagcgaggcgcgggcgcggggccgccgctccgggccgggcgccgtgggagtcggtcttcgggcggccgggaggcgggcagctcggtccgcggcggcaggagccctccccacagcgccagcagcgagcccagcgccagcagccagagccccgcggtggcggcggcgccccgcatcctcctgcccatgctcccgcggctgtgccggtgcgccgccgccgcttcaagccgagcccaggcacccgggtcccggcggcgaggcgggcccggcagtttgtgggctccggggcttcgggcgcttcggccccatcgcggccgcggggcgctgcggggctctgtccggcgctccgcccggcgctgggaactcgagtccccgccgcttcccagctgcttttgtatttcgctgtgagaccctccggtgggcgcgattcacaggcgcccggaccacgtgggagccagggggatccccctccccctcctccgcctccgctccccgccccccgctcccccgcccccttcctctcctcttccacttaaagcggcgatggctccttccgagagggagaggcggccccacactcggtccgggacttgggggcctggaggaagccggactggctgcgcccgcgccggggcgtaggagggggtggcgcagagccggagtctggggcctggcgggagggacgcgccctgggccctcgcgggggtgtcttggtcgccgggtccctttgcctaggcagcgcgg

SEQ ID NO: 5808 - DNA, 2423 bp, Homo sapiens
cggagcgcagagaacggctggagacatagcggccgcggttttccccgcagcgcaggagcgccaggcactgcgctgggtcaactgcggtcagggagtcacctgcccgcgacagcgagcgcgcacccacactctcgaccaacccaggctggcctccagcccactctcgggtcccaacgcccaaacatctcgcattgctggctccgacatctccccacccgccgccaggaatcagcgcagagggagatgcgtcttctgtggcgggtgcggggcgaggaccctgaccccagctctgggaagtgaactgtacggaggagagagctctccatcgtcagctctgcctccgcccctcctgcggcttcacttcagcccggatgccggcgatggggaatagaccagggacgcaggagcacactggaccgggggtggatccacttggggaggcaggcaaccgacccgcgcaccggtggcgcaacctcgttccggtgaccgaagcttgtggaggtagctccactcccggctccctggtccgacatccccctgccacctcctcccccacctccccgagtcttgggagcctggaccccgaaggtgcaaaaagtcaagagcctggaaaactgcactgtgcaaatatattgactttatttgtctcctttcaggagcctcacagacatatccaggtaaaaagatcgttaaataaatgccttcagccatcgcaatgcaaaaataaatatcaatcctccagacgcagtagcagccgcgctgcgcccaaagtcccaacggccacgcctaacaattataaaagtgttcagcgagagtgttggcgtgagtgtgaatgggtgtgcgctggggggcacggtggagcggtgtgcaaaatcggagttgcaaaccatcggacaagggcatggagtggctacccgccgccgactcagcgcgggcgcgcctccccgcacacactcacagcagagttcgcactgggaagagttaaaaaataaacatttacaaggacgaggaaagcggccccgctcccggcgctcccgggccagggcgagcgcggcgaggggcgcaccgaccggttcgcagcggggcgggagtccgagcgcgcgaggagcggcggtcccgggtccttgcgggtcccccgggagcagggcgcgggcactctcggggttcacacgccggtccccgcgcggaccgcggacgcgcgcgtcccccccgcgggcggcgccccttacagggccgagtcggagtcgctggagtccaggctgttcctcagtttgcagctgctgagctgctcccgctgcagcgacaggctctgcgtgctgcggcgcaggcactccaggctctgcaggaacgacttcttggccttctcctcctccatgggggacaccccctcctcctccacctcctggatctcgtcgaaggtcaccggctgcgtcttgaagcgagactggcgcggccgccgcagccggccccggcccttgggcagcttggcgggccgcacgggctgcgggaactcgtcggccaggcacacgaagtgcggcatcaccgcctggtaactggagcagatgcccatcagctcgccgggcttggcggccatggcgcctccggcgtctgcggggccgggcggcggggcgccggggctctccgagggcggccgctgcgccggggccccccgggaggcagcagccgggggctcgccgggcgggggatccaaatctgctgcggggtggcggcggccctcgcgggcccgggccggcgctcctcgggagggcgggcgggcgggcggacccgtcggggggcacggggctcggggggcgctgttccgccgcgctccgaggcgctcgccgccgctgctgtcgccgtctgccccgcggcggccaggctcgcggcttatatagcccgcggctgcccacacggctctgagctcggatgacagcgaatgccatttaaagcgtgcgcgccccgcgcccttccgcctgacgtcgccccgccgctctgggaaagtaacggccccttccccggcgccgcccgccccccgccaaccggctccggaaggcaggccccgcccgcgggggttccgggagaagccgcggccccggagcacgcggctggcccgagctgcgcccggacagggaccctcaatcgccgcgactgggcgggcactgtcccttctgggatccccaagtctgcaccaaccgggttggccgcggggccgcaggtccccctcccccgccccctggtcccagatgcacacacttgaggcgctggttattccaccgccggttctgcgcggggcgcgaggcagctctcagctctctttgcagcctggcgagcctgagcgcccggctccccagagctgagctcggaagaaggggtgggctccccttctggatccttgccacccccctccgcaggcgcgcgcgcgc

SEQ ID NO: 5809 - DNA, 1146 bp, Homo sapiens
cggcatctgggcctctgcgcgcctcgccccgcggccgggcccatggcactgtgagcctgcaagggagccccgctcagcgcggggagcgcccggccccctcccgccccatgcgcccgcggctctgaagcctgagcgggggccgggggccgggcggggccggggccgccgtaggcatggcgtccgggagccggtggcggccgacaccgccgccgctgctgttgctgctgctgctggcgctggcggcgcgcgcggacggcctggagttcggcggcggccccgggcagtgggctcgctacgcgcgctgggcgggcgcggcgagcagcggcgagctcagcttcagcctgcgcaccaacgccacgcgcgcgctgctgctctacctggacgacggcggcgactgcgacttcctggagctgctgctggtggacggccgcctgcggctgcgcttcacgctttcgtgcgccgagccggccacgctgcagctggacacgccggtggccgacgaccgctggcacatggtgctgctgacccgcgacgcgcgccgcacggcgctggcggtggacggcgaggcccgcgccgccgaggtgcgctccaagcggcgcgagatgcaggtggccagcgacctgttcgtgggcggcatcccgcccgacgtgcgcctctcggcgcttacgctgagcaccgtcaagtacgagccgcccttccgcggcctcttggccaacctgaagctgggcgagcggccccccgcgctgctgggcagccagggcctgcgcggcgccaccgccgacccgctgtgcgcgcccgcgcgcaacccctgcgccaacggcggcctctgcaccgtgctggcccccggcgaggtgggctgcgactgcagccacacgggcttcggcggcaagttctgcagcgaaggtgagccccggggagcggccgcccggtgcctgggcgcgggggtgagggcctggggcgcttcgtgggggtcggagtgtgtgtgggctcctgaggcacgggggctgggcacgagggcttgtgagtgggtgcgagcgctccagggctgcggggacgcgtgtccgggcgagggcgcgtggggttggcggtgggcggggcgagtgggcggggccggcttgggcgtggtcagcgtgagtcctgcggcga

SEQ ID NO: 5810 - DNA, 577 bp, Homo sapiens
cgctctccctaccctgcgcgccccacgtgcctcctgtaaacaagagaacgcgcaggcgccgcaaaccagcgcccattggtcggcgtgccgtcgccccgctggagggaggactcaggccccgctggccgcgggctcggtacccggtgggtcggtggagcgtctgttgggtccgggccgccggcttcgccctcgccatggcgccctggctgcagctcctgtcgctgctggggctgctcccgggcgcagtggccgcccccgcccagccccgagccgccagctttcaggcctgggggccgccgtccccggagctgctggcgcccacccgcttcgcgctggagatgttcaaccgcggccgggctgcggggacgcgggccgtgctgggccttgtgcgcggccgcgtccgccgggtgaggacgcgccgggggcgggggcgccaggcccgggtccaagggataggagctttgacctaacattgggatggggcctgcccgctggacgaaccgatctctggtgatggggaatgggcagcgccgcacgggcggggccttgggcgccgtcaagggccgactgtgcccgc

SEQ ID NO: 5811 - DNA, 1721 bp, Homo sapiens
cgtgagcctccgaaaggcgaagggcaggcagcagccgctggcttctgcgcccactaggagcttcggatgcccgagttagggctgcgccaaggcggccggagcagagagggagacggggacggggacaggcagggacaaagtgcaagaggcaaaactggctgaaaagcagaagtgtaggagccgccaaggggcgggacgaacaggtccgtgggccgggcggagccaagggtgggggccggggtccctccaggtggcactcgcggcgctagtccccagcctcctcccttcccccggccctgattggcaggcggcctgcgaccagccgcgaacgccacagcgccccgggcgcccaggagaacgcgaacggccccccgcgggagcgggcgagtaggagggggcgccgggctatatatatagcggctcggcctcgggcgggcctggcgctcagggaggcgcgcactgctcctcagagtcccagctccagccgcgcgctttccgcccggctcgccgctccatgcagccggggtagagcccggcgcccgggggccccgtcgcttgcctcccgcacctcctcggttgcgcactcctgcccgaggtcggccgtgcgctcccgcgggacgccacaggcgcagctctgccccccagcttcccgggcgcactgaccgcctgaccgacgcacggccctcgggccgggatgtcggggcccgggacggccgcggtagcgctgctcccggcggtcctgctggccttgctggcgccctgggcgggccgagggggcgccgccgcacccactgcacccaacggcacgctggaggccgagctggagcgccgctgggagagcctggtggcgctctcgttggcgcgcctgccggtggcagcgcagcccaaggaggcggccgtccagagcggcgccggcgactacctgctgggcatcaagcggctgcggcggctctactgcaacgtgggcatcggcttccacctccaggcgctccccgacggccgcatcggcggcgcgcacgcggacacccgcgacagtgagtggcgcggccaggcgcgaaggggcgggggcggggggcaacggccgccgggccaacccgctcagtcacactctgagaccctcggcgggcacctgctcgggggccccgggaaccggggcggactcgggctccggtcccttctgacgcggggctggggacgcagacactcttggctccggcagcccagcgcaacccctgaggtcgggcgccgcctcccgccttcagaaactcgggctccgagcgccgaattccagcgccttcgcccgtgggcacagggcgcgcggtgcagccacagggggcccgagacacgcgccccggcctggcccaggctggggaaccgctggggtcgggctcgcgtctgaaggtccgggactgggtgcggccgccgggggtcccctacacaggcaagctaatctgagctagcgcaggcttgggctccggaggccctagagggcagcttgggctctggaggcccttgggggcggctgcgccgggaaccctggccctttatccccaaccccaccccagaaatagggtccccggaggcgaacaagccgaggggcggagtgggccagggatcacctgccccgcaatgacctgcgccccgcccccaggcctgctggagctctcgcccgtggagcggggcgtggtgagcatcttcggcgtggccagccggttcttcgt

SEQ ID NO: 5812 - DNA, 1721 bp, Homo sapiens; identical to SEQ ID NO: 5811

SEQ ID NO: 5813 - DNA, 615 bp, Homo sapiens
cggagttccgggcacgcaccgccgagcgccttaccctgagccttcccggtacccgcagccccgacagctcagccttccccacctgaaagttccacctgaggtctccctcaactctgccctcctgcattcttggcgtcgcggggagtcaggggttaaaccccgtggcccgcgtggccccttccccctccgcagccccctcgcctccactcggcgccgcgcctggagcgtccgtcccggagacccgcacaagagaggaggggaaaaagtgggcctgtttctcgggtggccaatccaccgagcccgcggtgccccagaggaggcgccagcgctaggccagcgccaggccgggctgcctgcttcccgcggcaaagtacaaatgcgcccgagcgcggcgcctgaagcccttggcgagcacagccggcccgcgctcagcctccctccgcggccgccgcgccgccgccgctgctgggaccgccgccccgccgggccccaggcccccgcggcccgaccccgagcccaccgagcagggggcgccggccgcctctagcccgcgcgcccgcaacacccgctggtcccgcgcgcctcgcccggcgctgcgcgctcggcagacgccgg

SEQ ID NO: 5814 - DNA, 1542 bp, Homo sapiens
cgggacggtcgccgcgcgctccctccctccgccccttgcttacaagacctaatgagctcccccgggaggcagcgcagcgagccaggcccggaactagtaggctgcgccgcgcgcgccgcgccggggcgggagctgggtctgggcggcgggcaggagctggcgggggcgcacgggcagcgctgcggacagcccgggagccgcggcgatggcggtgcaggcggcgctcctcagcacgcaccctttcgtgcccttcggcttcgggggctccccggacgggctagggggcgccttcggagccctggacaagggctgctgtttcgaggacgatgagaccggggctccggcgggtgcgctgctgtcgggagccgaaggaggggacgtgcgcgaggccacccgcgatctactcagcttcattgactcggcgtccagcaacatcaagctggcgctggacaagccgggcaagtcgaagcggaaggtgaaccaccgcaagtacctgcagaagcagatcaagcgctgcagcggcctcatgggcgccgcgccccccggcccgccctccccgagcgccgccgacacgccagccaaacggccgctggccgcccctagcgccccgacagtcgcggccccggcccacggcaaggctgccccccggcgggaggcgtcgcaggccgccgcggccgccagcttgcaaagccgaagtctggccgcgctcttcgactcgctgcgccacgtccccgggggtgccgagccggcggggggtgaggtggctgcgccggcggccgggctaggaggtgcgggcactgggggcgcgggaggggacgtggcaggccccgcgggggccacggcgatcccaggggccaggaaggtcccgctgcgggcacgcaatctgcctccgtccttcttcacggagccgtcccgggcaggcggcggcgggtgtggcccgtcggggccggacgtgagcttgggcgacctggagaagggcgcggaggccgtggagttctttgagctgctggggcccgactacggcgccggcacggaggcggcagtcttgcttgccgccgagcctctcgacgtgttccccgccggagcctccgtactgcggggacccccggagctggagcccggcctctttgagccgccgccggcagtggtgggaaacctactgtaccccgagccctggagcgtcccgggctgctccccgaccaaaaagagccccctgactgccccccgcggcggcttgaccttgaacgagcccttgagccccctgtaccccgccgctgcggattctcccggcggggaggacgggcggggccatttggcctctttcgcccccttctttccagactgcgccctgcccccgccgccgccgccccatcaggtgtcctacgattacagcgcgggctacagccgcaccgcctattccagcctttggagatccgacggggtttgggaaggggcgccgggggaggagggggcgcaccgggactgacttcgaggcacgcttcccttcattagagacggctgtggagagcgccgcgcctccgt

SEQ ID NO: 5815 - DNA, 1542 bp, Homo sapiens; identical to SEQ ID NO: 5814

SEQ ID NO: 5816 - DNA, 1768 bp, Homo sapiens
cgcgtctggagtgggctctcgacacccagggcaagtgggggcggcagagccctctcctcggtcggcacagcagcctctgccgcggtcccggcctgcgacgcgcccagtcttagcctcccggcctccggcgtctgctgagtgtccggcgggagaggcgcagggagcgcgctaccgggaggcgcgggcagcggggactggttttctctcgggccagggcctccggggcaaccgtctccagcgcgcattcttggtgcaggtggaacagctttctgctccggtagggcttcacctatcgcgggagaggttaatctcggatctaaacctcgcagccgcagagcgggctaaaaccgctactccacctcttcccatttctcccctccccacctcaagacaaaaagtcccaggccgggcaggacctgatcacctctgcctcctcccactgcgctaatcctgcgagcgagaggccccgcaccgaggcggaggctggcaaaggggagtggaaagggaggatggatggggccggggggtggggtggtgatgagggcgacgaaggagggggtgtcattttctttttctttctttttttaaaaaaagtatttctctcgcgagaaaccgctgcgcggacgatacttgaagaggtggggaaaggagggggctgcgggagccgcggcagagactgtgggtgccacaagcggacaggagccacagctgggacagctgcgagcggagccgagcagtggctgtagcggccacgactgggagcagccgccgccgcctcctcgggagtcggagccgccgcttctccagtgggtgcagccggggtcccgacgggggtcgggcggccaccggggctggagctgcggccacggaggcttttgcgtttgcgccgcgccgagggcagggacagggactggggtgaggggctgtcccggaacgtccacagctggcgctggccctcccctgcctgacagcttcctggcccggggctcttggtgccgggctccgcgtcagatgttcggggggcggtggcatcgcccggagtcggcggggacggcgcggctggcttccagcctggcggagagggcaggctgaggagtggggcgttcagagcgcgcatcgcgcgcaattcgtgccgctaaaaaaaataaacccagagagctcgcccggggcttaggaccgctggggatatgggtactttgcgccgcgctcttctggcggggcccgggaggccgagggatcggccggggctgctgccgccgggggcctgggctttccagccagctgtggaccaaacggtcttcccttacccaaattaactgcgccacgcgcaggcggcgcacgggttgggcttgggaatggggaccgcgaggcttcagcatcccgatgccctgaaagtctccccgcctcggggatttgtctctgtgttgcagctggcaggggccgcctgaagtgggagcagcgcctggagaaggcgggaggagcccggcccgggggacgggcggcgggatagcgggaccccggcggcgcggtgcgcttcagggcgcagcggcggccgcagaccgagccccgggcgcggcaagaggcggcgggagccggtggcggctcggcatcatgcgtcgagggcgtctgctggagatcgccctgggatttaccgtgcttttagcgtcctacacgagccatggggcggacgccaatttggaggctgggaacgtgaaggaaaccagagccagtcgggccaagagaagaggcggtggaggacacgacgcgc

SEQ ID NO: 5817 - DNA, 2656 bp, Homo sapiens
cgcacaggaaccccagccgctcaagccccgggtgggcgcgtcgcacctccccaggcactgcccagacagctcgccccctccccctgggcgccctccctagtctggctggggccggggcgggttgggggaggttctcgcgggtttgtctgacacttgtaaatggaagtgggatccaacttggaaaacaaacgcgccagagtctgggggcggagaggagcgggaggaggggagaggggggaaaaagacttcaatcattaccgcggtcccagcgtccctccctcccgccgcggctgctgcaggttcgcccaaacccgaagctgagtcccattgggcgcgcggcggcggcgggatggagctggagctcccggccgaggcgctaggagtccaccagattccgcgtgccagagccaccggccgcccacgctccgggccgcaggcgccactccctcccgggagcccctcctagtccttcacggagacctcgcagggtctccgcagcctccccgcccccgacgtccattccggggacccctctccaccgcctggtttgagcccattattccagcgagctgcagcctcaggatgtcaccgccagcacacccacaccccgggagcacccctgttcctctcatcccgagcaacccaagcggctctcttagctcgcagccaaactccggccacccctgcatccttgccccaagcacgcccccgccaccccccgcccacaagaggagaacggtggaaagtgaataaaagttgctttccgcaaagcccaatcatgttcaatgttaaaccatctcggaaagcacatgtgacaaaagtcaacgagagaggagaggagggaattcagatcacagcacagctaaaaatatccgggctcgccatcatgcaagccggggggccagatgcactttagctcagcgactcccactggcggaatcctcgcgctcaccgcgcgccgcgccaagatggtccaggccacctctactgcctccccgccagcgcccctcagccccctacacttgccctgcacacacactggcctgtagaggggattcgtcccgaaccgcccgggagtggggcctgagctcggagctggtgcccctggcgttctcgcccccaatccggagacagctcctccgcactcctggggatggtcagacccgcgctgctttcttttcaaagacaagcagccttcccacacgcccgccaaaaatcatgcactctcgcaaagcattccggttccctctccttgtcaagatagcagggacagtctctgtccccaaccactccgtaaaggatgtcgtccccagtcgaagagccgccgccgccgttcactacatctcaccctgaccacaagccccgcaagcccgagtcaggcgtggggaacggacccgcagactggtaaccctttccctttcctagcgaaagtggaggctgggctccctctctgcgccgcgcctcgcctagcgatgacccaacttgcacctcggggtcccctaagtgcatcatccatcggcatctgaacatcccccactgcgcccgagaggcaccggctgccaagcaggctcgccacctgaaccttctcatccacctgcaggggcggctgggagccggggatgggtgcactgatccgcaacccccctcgcaacccctccccagatcctcagccccaaacttggccaactctccgtgtaaacctcccggctcccgccgcggggccaagccaccctcttctcctgtttgcagcggtagcaacggcggctcggggctgcgcggaggttggaactttacaaggtgaaaagtttcccccacgcgcttcgtcggctctcgcctccccagcccacctcgcagcccatttgcacccagcagctgaggctgtgctccggcaggcgcgctccagtcggtgcaccaggcagccaaatcatcacgctacaaatccccacgcacccttgcctccgctggcgatccacggctctacgaggcgcctcccccgtggtcttcttcacccggtgctcggcgctcttgctccgggcgagccggtcccccggctgctgccgccgcagcgcccaccgcgcgctagccgggactgaggccgcgagcagaagcgctctgcgctcgggacgccgccgccgccgccgccgggggttcgcaagcggaggaggggagccgagatgaagagaacagcagcgggaggagagggacgggaggcgcgagatcccaatccgcaggccagttcacagcgcagcctgcggggaggagcgccggctctcctgtctgctccgagctgcagccgccgccgctactgctcgccgcctggctgctccgggctccccatcacagccgacgccgacgcacggccaagcccctctccagtctccccctcgcgcttgtctctcgcagtctcctcctcccaaaccgcgagcgaaaagggcgagggggagaggagcctcggcggcggggatgactagcgatctaggagcgtggcgcaggggagagggggcgcgcgggagggggcggcggaggaggcgcggcgaactggagggcattcccggcgccgggcctggaagcggctaattttagagctcgagtcttccctcagccctctggggctctaggatgacaccaacgtactttcctgccgcggggagagcgt

SEQ ID NO: 5818 - DNA, 623 bp, Homo sapiens
cgacaccacgcgagtgtgtacgcgctggggactgagcccccgaagcgaagccctgtcggaggagtttcaggcgggagtgggaacggctgggcgtggggtcagcaacggcgccacccggtagggtggggggagccaggcttgtcagagccagagcgcgtcaccgtcgccgcgagagacgccgcgctgcccaataggcagaggcgctccctagcagcctggtgggagcagagatataaaagtgctccaacaaacccggagctggcgtgccgaccgcgggctggtggcgggcggcgcggtgctccgcgcgtccgggctccctggctcctcgggacggccttgtatgctgtgcgccccgcaccccggctgcgcgctccgatcccagcgggaggggacgcccggcccgcaggctcccaggggaggggtggctcctgcaaaatggtccctcacctcttgctgctctgtctcctccccttggtgcgagccaccgagccccacgagggccgggccgacgagcagagcgcggaggcggccctggccgtgcccaatgcctcgcacttcttctcttggaacaactacaccttctccgactggcagaactttgtgggcaggaggcgctacggcgc

SEQ ID NO: 5819 - DNA, 1967 bp, Homo sapiens
cgatgatggaaaggaccgccaggcgatcccccaaaaggcccaccaaatatccgggctccattgtcacgctcccacccgggggcgaggatgtctcaaaaacaccccccttcccccgccccatgtggacaggtcgcgtcgcggcacccacgggcaccgcggaaaggggcataaccggggtggcccccgcccaggtggcagcggagacccagggccaggcggactaggcttggtccccacccctcctctccgggccctgccacggccccgccccgccgtcagtagagcccccggcccgcggtcggccggtcagcgcacgcgcgtaggtgtgcctgccaggatgccctccccggcgacgcgctcaggcccggattccgcggcgcgagagtgagcgctggcgggggcggtgggatgctccaagtcggcgtgaaagaggcgagagtgggcgagcacgggcggccggaccaggagcactcccggtgaccacctagtctccattttatttcctcggaaactgccgggcaggcgggggaccggccgcagggcggggtttctcttggcggtgagtgagcgagaccgttaggctgaagcaccgggagactgtcctggcagctcctggccgccacccgcgccgcaataaaagcctctcgcggcttcccgcccagccagcttcgcactgattggtcgccgtgggagggacccgagttggctggaggcggcggccgagcgctgctcttgtgccgcccgcggagggggcgcactgggtgctccctggcccgccccgtgcgctccccaaccgggggtcggccgtccagggcaggtacaacggtacctggagctgcgaccgcgacacacagcccctccgcccggctttcctcgatcgcttcccagcacacgccccccgcccagaatgtccgcccaacccacccagctctctgcggcccctgcttttcttccttccctcccgtccatcagagccaaagcgcaaatccttgggtggaggtggggggatgacagctggaggggagggtgggcacgcacagaagaattttccagggaggccgggatggaaatagccaaaatgaaatgcacctccctgcacactgccgaggttctctgggcggcggcgcaacccccgccacccgcggcagcatcactactgtcttcctcccagctccctattgttcacactttgccaggatcgggaacctcgcccaaagaaaggagacagggcgaggtgtttcgggcggctacctgccattcttctcccgccccgtgcaacactgggcacgcggcgcgtgtaaagacacacgcgcgcacacgcgcgcgcacacaccaggcagccccaatcacgccctcctcgccctccgcccctccgcacttcctcctgtcaaaacgcggcgctcgaccctcccatccttcagtgctcgcggccgagggtaggctttgcaactaaccagcaatttggcaaatgaaaaactaacgtcatgtcgactggggtgcaacaacggtcacaccaacaacaacggccgtgcgattctgcccattttgccccattttgcaaaccgttattcttctggggcgggggaagcaaagcagcgatcctgactttattagacccaggaatataacgatctggggcggctgccctagccttattgttcactcttcccggagccggggctgacaagccacttccccctcggaatccgagcccgtgcggcggcaccacccgagccgcgacctcccccgccccgccgcccgcctttggggaaggagcgctgcccatcaccagcgcggccgctgagtccccaggagccggccggctctgctcccaccgccgcgggcgcacaaagtgggaagggcggacgcgccggaggggcgccgggcgctggcggctcggggaggcagccccgtgcagcgcagccctggagggagcggggttcggctgggcagcaagggcgacgcgc

SEQ ID NO: 5820 - DNA, 2558 bp, Homo sapiens
cgccccggggtggggacggaggccgtcaaggttgggatgagcattcagccgagccgagccaccgcgtgctttcccgcagacatcggggtttctgagaactaggagggaacagccaaaagaatggaagcttggcgccctgaaacaagccttttgggtcctgagggaaatctgggcgcccacgggcagccgtctcccccacccgccgctcggcgcccgcgatccggctggcgctggctgcagcgtccagccaggcggcgcggggaagagccggcgataacccgcccgagctccggggatcgaccgcgctctcacacccccccagttcccagcgacccccaccgagacttggagacgacttcagcaaacttggggaagcaacttttcccgaggagctagactcctgaaagaaggagagctgagctagggacgagggaaagcgaaagagacggggaggaacggcgacagtccgggcgggctggactccgcggcgagagcggcaggggaggcggacccgccccgcggcgaaggggaagcacaaaagccccgcagcgagttgtgggaggaaaggcgagaaggggtctgcccgccctccctctccgacccagggccgtgaccccctgggagcgaccggctgggtcccaggcctctggccagcggcgccagcggccagcgcgcccggcccaagcacggtgcgagcgtctcggggaggcggcgagcgagtcggtgcggagcgctccgtgcgtccgggtggttccgcgggccggcgggaccgtgcgcatttcaagcgcgtgcgggagtgtgcgaggcgctgtgcgagctagcggcgggcgcgccagggtgggaaaggcatcccgaacgcatcaggtgcagagaccggcacccaccgagagcggccgggagcgcacggcgagctccggtgtcaccgccggtcccgccgagagccgaggagggcccgcagcgctgcagaccctctggagcttccctccctcccctgcaaaaggggggtggggatcaagtccaatcaagaaaaagcccaccacgttttctcaaagagaaacaaaacgtaagcagtcccagtcctgctcccctccgcccccagatctactcgtcagctcctccgattctagcttcccagccggccggcgaataaacacacaaataaataaaccacaaccttatcttgcgcccgcgcaccggtccgcatacataagagcacccacgggctctgttgctccgccagcccctggcggtacaaagcctccggatccccgacccctctgctcacgccctcagcccccgcacaccgctacgccccccacctctcaccccgaccgtgccctgaagaggaagggctggggaggcagctgcgcccaggctgacagccggggctcccccttctagccgacccccaaccggtggcggcgacggctgcagcggcaggaagggaacacgccaaataaaaaaggcacaagcccagcggccgagtggccgaagcgagcgcgcgccccccagacctctccagccccgggaagccccggcgcgcggcgctcgctgggcggtgcgcctcttcccggcccctcactcaccgcagccgagccgggcactgtggggtgggtgtgcgtgcctgtcggggggtgtgtgcctgtgtcggggaggggtgttgctggggaactgttgctctccgtatcacggcggcagcgacagcatcgcccggcagttcgcagtacccgctctcatcgccctcaactcctctctgctgcgaggttagcaaatcaccaccggctgctgcgcctccgccgcgtcccacgtcaacgccgagccccctcccctgcaaggccccggcgcctctccatctttagtgctggcggccgagcccggctccctgcccacagctgccccccttccctcccccctcccgcgccgtccccgggctcagcccgcccaccaccccgcactggccgagcccgcgcgcgctccccgccccacccctcctttcccctcccctcccttcccctcccttccccgcgctccgcgctccgggcttcgcctgacatctagctgctgctggggcgccggcggccgcctctcaccggccgagcggagaggaaggaaggagccagaggacaggagtgcatggggactcagaatccttaataggggaactgagggtgaagggcgcgcagcagcccccacctactcccaagattttaatttgcactggatacgggttttgtccccccctccccgcaccccggtgctcaagcacgcagttttgtctcctcttccaatgtttgccccaattcagtgcgtgtcatctcgcctttaacttttttctcatggctcggggctgcagtccccctgacatctgttttaaaaggccgctttcctagcccaaacccggccctctcatcctcctggttactgcgcgcctcccggcttgagcatccggatttcaataagtctcccgaggcagagttcgcgggcgctagtgaaccaggtgccagaaggtccgcggggatctattgtcgaagcgagacacccgtttttagctgtcgcga

SEQ ID NO: 5821 - DNA, 2558 bp, Homo sapiens; identical to SEQ ID NO: 5820

SEQ ID NO: 5822 - DNA, 1508 bp, Homo sapiens
cgcctctcagacagcggagccgggtcggggcggtctggcccgggccgccgctcctgttcctgggcttgtggggctggggtccgtctgggctccgggctcgcgcggcgctcaccacccggggtgccgcgggggggcggggagagcggccgcctagcccagccccgcggatgacaggagccggggagccgaggagggaggagccgccgccgcagccgagcgctgggctgaggagcagagagagcggggcgccgagtgcgggcggctgggagcgcgctgagcgggggagaggcgctgccgcacggccggccacaggaccacctccccggagaatagggcctctttatggcatgtggctggtaactttcctcctgctcctggactctttacacaaaggtgagacctgcgcgggcggctgggcggcggaggcggcggggccagggtggcgcggctggcggcgaggcggggtgcccggcgggctccaggtgcgtgggggaaccgaccggggtgcaaggccccgggtggggcgcagcggggaggggcaggcaccctgacaggggccgagtgagagtcagcccccgaccgctccgccagccacccgcgtctgccgttttggggcgcgcccgtaggggtggtggcaaaggagcccctcatctccctgctccctgcacggcggcagttctgccctggacccctcccccagccccttgccctcttcctgcggcttggtggcactgggaccccggagtgccctccgagtcgaggggtcctcaggccgtgactcttgacctaggagtccttgcttattcaggcctcggactcggcggctgattcctccgctatgtccgtgcgtccctctcccgccgcggaccccagccctggcgcgaatgttggcgcaccgcatggcgcttatccgcgcattggctggaggcagggtggggatagtgagagtcccgagagctggaggtccctcggatagcaagtttgttctccaaacccagaggtcaccctcccccggccctaccccacccctctgccccggctttagccccggcttggtgcgccaccgtggccacctcgggcagcgcgccccaagatgcgagattctccgcttccgcgcctggccagttggacctggggacaagtcttcaggctggggggcgtgtccctcttcccggagagagggggttgctaggggtgggtccaggtgtccggcatgtccagacctgcggctggggcgctgcgtacctgatccgcgaggcagccgggatcgggaggttggaagagggcagacatttccgactgaagccacctgggcactgagtcgggaccaggcaggcgcaggtagtctgggttccaggctatcgcagaggacgtgcccccgggcgcgcagatggcgggagatgaggcggccgaactccgcgcccttgcgtggtggagcacacacgctccaacaagctcagcgtcacctgttcagccctctaacttttctccttctcgccccggggcgg

SEQ ID NO: 5823 - DNA, 1119 bp, Homo sapiens
cggtggcgacatggcaggcagtcccgcgtggcggcggccgggacagctgggcgcgctggcaggagagcaggcacagcgctccccacaggcaggatgacgcgggctccgcagcccgtcctcccacgctgccccgcatcactgcctcggccctgacgtgcgtgcgacagactcaccgcaaacagtccccagcgggagcacgaggccgggacaggaggtgggcggctacacaggacaccccaccccccccacccccccgcagccggcggagccgatcgccggaaaagggaggcggtgggcgaaaggaaagcggggagctgggagaggagctgtaaacaaagagctgcccttgtgcgaagtcctgagccgggtccagtcagcccgcttcctgtggcccacgcactgcccgccggcccacgcgggagcctcgaggggcgaggcggaggctgggcgcagtccttgcagccagcagccacctccgcgcgctccgccgcggtccagctaattacctgctgcggcggcggccgtgccctttagggtgcattagtattcccgccgcgggcgctgccctcgcggcgtcggcaccgatgcccggccacctccaggcccgaacgactgcggctgcgggaaggcgggtcgaggggggctacggcaccccagggagaggccgggagccgcccggacctcggaggggatggggtcctctctgggaggcacccgtctccttcctgggtcctaagacccttcccagccctgcgctccgaccccactcctcccgaaacgtcggggaatcgggaaaggagggccacgggcaaagcgggggcgggcgccccctgattagcatgcggcgccggttgcccgggcccggattcccgagccccctccccgcgagcgcacactaataagtttacaaatggaatccggtggcgccgcttgcaataaaaggcagaagctgcgctccggcgcttcaatgagagcattttcccccgtaacaaggggctggattcagctgcctggtgccgtctgagcggggcgagttgccagagtaaccaaggcctagcgcgcacgtggggagagggagctggctggggctccagcgctagccgccgcctgcgcgcccgg

SEQ ID NO: 5824 - DNA, 1119 bp, Homo sapiens; identical to SEQ ID NO: 5823

SEQ ID NO: 5825 - DNA, 653 bp, Homo sapiens
cggaagtaaggcgggccagccaccgcctcgagccaaagtttctgcagccctggcaatcccccgcgcgtttctgctcaggagccccacacctcagagaaacttcccggcgtccccagcctcgctgtctcccctaggctttgggacacagctttaagggactgagcggcccggacgggatctgaaacctttggaggaccagccacgtccgcacagcccgcccatgcgcgctggcaccaggacccgcaggctgccagcggcgagtccccgccgcggttcctcagggcacccccggagaagggggcggccctgaggaatctcctgcactccggatgccctattttccccgcccttagcgccccagggccctgctcgggtcctggccgcgcgtggtgttcttttcagccgcggagctttgtttcccagtgtcgctgaaaggaaagagaaagaaaacgccttcggtcctggaggtcctgccccttcctgaagcgatgccatttcctccctccatctctcttttcttagattcctcctggggccccggcagaggcggggcggctgcgccccgagtccctctccggcggcagcgcgggagcggggctggaaaagagggcgccgggagccgccccgcccctcatcgctcctggcttctccgc

SEQ ID NO: 5826 - DNA, 1768 bp, Homo sapiens; identical to SEQ ID NO: 5816

SEQ ID NO: 5827 - DNA, 1101 bp, Homo sapiens
cgctgcgaggatcaagggagatggaatgcagcgtaaagccccacgtaaacgtgtcgtgcaacatgaagcccctcaccctgagttggggagcgggtggcacgcgtggaagctgaatgccaccatccctgggaccaggcgcagcgccctccagaagcgcctctggtgacgggctcctgttctcccccaggacgtttcccccagaatgccccggggccctggacggctctggagaggacgggagggaagggaaggagacgggcggaacggggacgtacctgctttcactgcactccttccgctccctcaccctcagccacttgcggaggaggaagcgttttcggcgcggggacgcgctgggtgtggagcagttggaccacggggtgtcctcgtcgctggagggcgtgatctcgatggacggcagctgcaggaactccttgccgggggccaagacggcgggcaggtcccgggccagcccggcctccaggctctgctcctgtacgttcttcatgcggcgcatcttgaagcgccggcggcgaagcgtgggggtcgacgaactggaccagaccgggctgccctcgggcgcaccctgcggctcgggcacctgcagggcgggcagcggccggttctccatcatgttggccgccggcatgggggccgtcgcctctgcgctccccctgagccctccgccagcggcctggttcgcgtctccctctggctgttccccaccctcggccccgcggcacactccccaatcctggggccgaaggaacaagttcctttcccggagcgcagcgaggaagggacgcgaggggacgcggcgtagcgcgccgccgcccggagtctaacttttcggagcgcgcgtcctccgggccgtcagccgccggcgaggccacccgggaggggcgggagccgcctgccagccactcggcagccctcctggggctcccctcgcgcgcccgcttgtttttcttccgctgcgcttcctcgcttgctggcgtctttgccttagcgggactcggcagccaggggccccagggggcggtgcagcaaactctcagcggtttgcgttcagcagaccaggttggggagccggcttggcgc

SEQ ID NO: 5828 - DNA, 1101 bp, Homo sapiens; identical to SEQ ID NO: 5827

SEQ ID NO: 5829 - DNA, 2341 bp, Homo sapiens
cggcccctgcaacggaggcggctccgaaggacgcaggaccctttcggaggcgacagctccaggagccctggtcctggagccggcgcacgcctaggcgcgaagggcgggggctcggggcgctagggatctgtgcggacgggggctggggaaggttccccgccggagaggcggcgaggccggcccaggagtcccgcggagccggcggctctccagcgcctagagccgggcgactgagtgccgagaggaagggaaagcgctgacatgtaaacaggggcttccatctggaggagcccgctcagatagatcccccgacacactcacttgcacccctaccctcgtgcaacgaggccacttacccaccccagggcccaccaggcagggacccgagcccgggcgactgcagcccccgcccccgccgtgttccgcctctgcggagaggaagcccagtgcctagcgctggggccacgggagccccgggtgtcggtgggagtggtggaccccgaggtctctcgcccttgactccgttccgtaccctggggtcccccggtttcccgccgtcccctcctgcagccccggcgggcagcgaggtgggaggggggccggggctccactttgggggctgggatttcgggggagggtcgccctcaatgcgggcgcctggccggctggcccgcgagtaggactcgccacccgagcgccggaggagccggcgcgaagccggggcgcggagggaagggagagaggccacgtcttccgggacgcgggccccgcacctacccgcccgccgcttcgcctccccggccggtccccgccgcccgcgtccgttgccccgccgcttaccttaatagtcccgtccatttggccaagtctgcagccgagccccccaatattccacacattgacccggttacagcctgacctcgcagccccttcggattagcccggcgcggcctccctggcgccctgggccctccctgcgtgccccctgcgagcgccctgccctcactcccctgtgcacgtttgttgttgtagcggagcgaaagagacagttaaccggatgaaacttttttttcagctaattttgggaagtgacttcactttgcgaatcggggaggaagtcctatctctctctctctctctctctctctctctctctctctctctctctctctctcgcctcgagctctcctctctcttctctcccctctgctctccctcgtcttccctccccccccacaccccctcttcctcccctgctggtcctgcttttcgcatcacacactatataaatatacgcggagatgcccagacacattcatgcgctgcgcacacaggatacttgctcctgggagataagagctagccgggaacaatgacggggtccacgcccagcgtccgcgccctgattcccgaagtctgaacctccccccatcaccttcccccaaaatccaaagccaaagacctttggcttctttgcttttcctgaggcggttggccgaaggtggccctcctgactcattcactttccgtttcttcccacagatacgttcattaatgctttttccagccggagacaaactttttgggggtggggtagggggggtatggagggagagttggctagggctgcgggtaacccagcgcctactgccggggaagactcggacgaaaaccgaggcaaaccaaccattaaaaagtgcatccaataagaatttttccactcaggccctccgctgccgagacgcggcagactcccagagcggctcacccactcatcgaagcggattctgggcggtttcgggctgacccgcgctgtcagggcgcggactccattccgggcgcattgttaggagaaggggcccctcggggcggcgcgcctcgaccctgggctcccggtgcccgcagagggcggagatccgcggcgccctaggccacctatccgcatcttctcgagccaaacccccagcgcttacccggacccgacggcccaagcactgactcccaggcaagagtcgcccttcctggtccccagggaactgacactaccgcgggacgttccctctaggacagtcagcaggtcccaggagcgcagcacgcaacagcgcagagcagacccagacttttcccggggtgagacccggaggcccgcgctctggaccgtcctccctacccagcctggaggccggcgttccccggcccaacccggagacctccccgcctccctcctgggccgccgcgcgccccagttggagcagcctcgaggggctgggccctttcggccggactcccttctcccggacatccaaaacaggttaccttgtccacgctctccggaccacgc

SEQ ID NO: 5830 - DNA, 3857 bp, Homo sapiens
cgagcagaaaccatcgtgtttctgggggctcttcgggcgccgtggggcgacgcggtgcagcgtctagggccgccgcaggccgggggcagggctcccagcggttcccccgcggccagcggccacgcaggaaaaacccgcttcctcgcccctgcatctgctgacaagccgcccgaggtgtctgcgctgagcgtggccacaccgatgcagctttctaggaaatggcccgggagggggagggggcgagtgagggattaggtccggctccccctcgctccccctgcgcaaacaccaccaccccttcctttccccggaggcatgaggcctccacgctcggtccttcgcccgcatcctcgccgacccctccggtttcgcgcctcactcgccaggctttctccctgggagccgactgcggtgaagtcgccgccagcacggtcggccctgacacgtgctctaacgcatgcttgagtcaaggctgtctttacaggagatacgatctggtggcgtttcttcacctccttcctcccgtcaccccccacccccaccgcgccctttggtgtatttcactccaggaggaaggggagagaccagcgccctgatgtgctggccaagctggcacgtgcagcgggcatggcgtggctcgagctctctgggcacaccgaggccgactgagtgcctccctcaccgagagagggggcccgggcaggggcgcggagagccagcaaggcggggtggggcgcgggctgggtgagccgtacactaggttccctgcaaggcggaggaggggagcgaataaactagaggtgcaagcgattaactcaggccccggagccagcctctttaaacgagggtggggcggaaggggtggtgggggggaaaggaggggatatcgctttaaaagggtgaggaagagtttggggcgccgtctcccctccctctatttgcatagccaatagctctggggctcctgctactgcgcgctgattgttaccgggcagattactttttttttttttttttttttttttttttagtaggacgcgttccccactacatcaaaaggaagccaagggagggcggagggagagcgggcgctggggcgggcgaaagctggggagaggcccggccgcctccgaccttatcaatagcagcgggaatgagtatcccatctcctatatgtaaagaaaggggagggaaggggcgggcgaggaaaatgtctaattgctgtggaagccattagctttcaggaagaaaaaaagctcgctgaaaaacccaagttgcaaactcaaaatgaaacagtccagcgccgcggatgacacccgggccgaataccgtgtacacccgcacacagtcggccccgaacaatcacctattggttttagtcacgttgggcttcccgacttaagcttttgagtcaccccggataaggacattcacttacattttaagacccccataagggaattactccaatttcacctaagccacctttgagcggatcaaagaaagttgcagcggggagaggcgagagaaggagggagggcgggaggtatttttaaagtataaatctaacccgacaggcaagggacagaggccgccggggctcccagcctctggacatcacttgatatagctctgcgagcaaggtctcttccaccccgactccgcacacccccccttctccggggaaaggcatccagagctctgggtctcccgaagtgggggcagcgggggcgaggaagaagcgggtggtcgtcccggggcccagcccaccccgaggagaatgcctgggtggcgagtcctcacgtctcgggagtgagccgagggccctctcgccccttccctctccccctccccctactccgtcttgctttacagagaaattccagcggggaggggggcagcgaatgggaggggcagagagggtcgcggccggatgcccccccttcccggcgccctctgcattcatggagacccgcaagttcgggcgcttcccgcgtggcaggctcgcctcttgaagttcccctgtccacttccccttccgattactgactgttcccgagcgtgaagctcgccatcgaatccaatccccggtggttttgcagactctcacacgtggggtggggcgtgagagggtgcggaggttggcaggaatgtctctaggaggcttggactggaaactgagttttcccttttggtcgccactccagccatgtgttaaaaccctaatgtcttgttaaaatgcactccacctagcacgcgggaaaacgcatgttgccttctaggcaaaagtgcacactttctttcagtgtagacttcggtttcaagaaaaagcgcaagagcctgtgctctggctttgaagtccaaactgatcaccgtggcgcgggggtggggggcggcgggagggggtagattgttggttcttccttatctccttttcacccttcacggaaaaaaaaatacatatatatatatcccatgtaggactggtgataaactttagcgaacgccagttttattggacttttattctttttccggccggctccccaccctctacgctagcgttttggagtttcggttggaaagtgtacaaagcctggaggtggagggtgcagcagggtgttgggtgtttataggcacttttctgcaggagcctgcagcactaagcacacatactcccaagcttacctggaggatgcctcccagccaggtgattccgcggtcggctcaaggcccgggagcagcgcgagttcgagtcccgccttctccgcgcaggggcgcctaggccaggtggggagcgggtagtgactgagttcaggctcagaaatgggagccactgccttcccctcggctcccccaaagagtggagctgtgtttgtgtttctccgtggagggatggacggtcaatcaaaaccgaaaacccgactggcaaaatgcgaggggacacataaatccgaggggacacataggaggcacatcaagaggaaggagggagtgcaggcaaagtagaaaaatgcggacaaggagaagaggaaaacgtcgggaagcggagagcacgggggagcagggtgggtggggacgggcagtgcgattgcaggtgttcactcgcttccgggaccctctggtcgcagccgcgcccgccggggcgctgggccgctgcgttctggaggggggcagagtccgccaggcctgtgcatccgcactcccttcggcgaatttcggcttggacggggctggattactgaggcggcagatgcgacaggcgtgagttaagaaggcgagcgcctgccgtctgtcacccacctagcatctcactcccctcccttcggaaaaaaaaaaaattaaaagacccgaacttccccctcttcctgtctgattcagcttaggacacgcctcacgcggccgaaaatagctctggaaatacatttgctttacaaaagtgaattttccaataagctttggggcggggggcgtccggcggtcggcgtcggggggtcctgcctcccgggaggagaaggaaccggccgcctccgcccttctccccctccaggcgcccccgggagggggccgctgggcggcggaatcgcgcctccgctcggggagccaccacgcggctttttcgcggaattttgacgtcatccacacgtgggggaaggggctgggagagcaagaggaagcggcgggggagggggccgcggctgggagagcgcggcggcggcgcggcgggtctggcaccctcgcggtgggcgcagcgccgggcagggtccgggccctgggcagcgcggcagaggaggccgtgccgcggaccccggagccagcgccgcgacccgcctccctccccgccccccgcccctcgc

SEQ ID NO: 5831 - DNA, 1439 bp, Homo sapiens
cgcgggttcctccgccaagcgggacgccgcgccgggcgggtgagagaaagcccgggcaggagagcacagagccggcgactggacgcgagcgcggggcgggtggagagcgtctctccgggcgccgctgctgttgtcccgggtgctgaaaagccgggaacttcccgggaagcagcggcacttttctccctggaaggtgggtgtgggggttccagactgcgcacctgctaaaccctcctgggtcccccgggaggggtccgccagatgtgccccttcccagccccattcgggggagaaggatgggggcgggggcgtgggggtgagcacagccggacaccgcaagtgggaacctggggtgtccttccccgcagctcccgggcagccgcgcgccgcgaaccccggtccacctgcaagcaaggcgggccgggggcagagggcgccgggctgtgcgggggaaccggcccgcgtcccgggattggggggcggtggaagagagagcgagcgggcatgcgcagtggggcggaggaggtggcgatggccgggggaggcggggggactgctgtttatttgcagctgggccaactccgcggcgcaggcggcggcggagcgcggggagctcgcggcgggtccagctgccgcagcaccatgcccgagcccccctccgggcagacgccgcgcgccgccggggccccggtaggggaggatgccagacgcccgggagaggccagggcagcagcggcggcggcggcgcgatggtggtgaccacctctgcccgaggcggcggcggggaccgcacaccctcccggcggcggggctgcgggctagcgccggccggggccgcggcgctgctggccggggcaagctgcctgtgctacggccgctccctgcagggcgagttcgtgcacgacgacgtgtgggcgatcgtgaacaaccccgacgtgcggcccggcgccccgctccgctggggcatcttcaccaacgacttctggggcaagggcatggccgagaacaccagccacaagtcctaccggccgctctgcgtcctcaccttcaagtgagtccctcacctcgcgctagccgccgctgcctcctctaccctccgcccgtccctcggaccgggagaagttgcgggactgacttgggggcatttcatttttgccgccctttccctccacgcctccctcctctccaggatgtgcatggcactttgctccgggatccactgcccggctaatctgggctctcggggcggttcgggaggcgccggctggggagttgggatcgagtttctcaactgtctgccctctcagcgggcttctctctcgaggcagggctgggagcgggctggtgaaaccgcctccgcaccccttcgcctgccggatcgtgaccaagtgggactagcgcggacccagagggttccggaggggtggcggtggtggcga

SEQ ID NO: 5832 - DNA, 1288 bp, Homo sapiens
cggagagggctcctcgggccaactctgggcaacgatgagcatccccggcctcggcaggggcgccgggccgcccgccctccctccctccctccctcgcgagtcccttcttcagaggacgcggggagccgggtctgcgcgctccgccgcctgtcacctagcgcccgcgccgggctgcgattggacgcgtcgccgccaggcacccgccagaaacaccagtgcgctggggagaggaggggggcgtgcttgcgagtcgagggcttgctttggcttttttacggctcccccctcccctcagcactccatgccgggtctctagttccagcgcgcctcggctcgctcgcgcggcgggagagttggcgcaaacctcgcggcagccgcagcctcctcgcgcgcctctccttcccctacgccctccgctcccgccatggggccaacgtggggctcctaagagttgccggctctcagcggcgcaatctccagccaaagtcaccgcgggcggactatggcttagggcgccagaggggttagaggtacgggaagaggaaaagacggctaactgggaaaaaaagagaaaacgaaagaaaagccaaacgatgagtttccacaaggaggacggagtgaacagtctgtgccagaaggctctgcacatcgtcaccgagctgtgcttcgccggccaggtggagtgggagaagtgctcgggcatcttccctcgggacaggggcagccagggcggaagcagcacaggtaaccgggagggctccgctcgcgtcctcgcgctccgctgggaccccgcgcgctaggctgcaagctccggggttctgcgcctcccgcgccgctcccgcggcatatttggggcgccacgctttcctacctcgctccttccttcgctcagctcctgacgacttcgagggtggggcgtttgggttttgtttcctcctgtccacctgccgggcttctcccattctctggtccgcttcccgcctcccggcgccgtctcccgctcccagcctcgccgcgcctctccgcgttctcccacgcctcccatctccctcccggagtggagaagtgagtgcgggcggtgacggcgccgggacggctcgcggcttggctgcttgtgggggcggctcacctgtgggactagggctgctctcgctcgttccaccggccgctggtcccggccttgttgatgggggccaggcgggacggacaagccatgcttggacgcagaactcccttgcagaggtggctgccttggcctccgaggtaacccgcggctgcaacctgtcgg

SEQ ID NO: 5833 - DNA, 1006 bp, Homo sapiens
cgagtccgggtctccacgctttatttggcagggggcgcgcgggttccggagctgtccagcacctcctggccaagttctctgcgctctccgcgcccgggaagctctccgcgccggggaagctctccagcgccccgcccccggcagggaacctctccaccaggacacccggggcttcccaggctcgccatccgtccccaccagtctctacctactttgcccagctccacctcggcagtgcagcgtgttttggtggccttcctccgcacgccctggagggggagtgccctgcaccccggggctgctccggagcccagtgcacgagtgcacatgggcttccctcctttgcttaaagggcaggcgagcgctactcgctccagccttgcctcctgcagctgggtggtcttttttctctcctgtctttcaagacacgcgcccgaaatcgaggggtgagagcaaagaccgcccatcaacttagcaccttggatttagagctttcaatcccgaaaggaggttggcattgcccgggtcatcgagagagggagggagaagagctgaggctgcaacggctcctgggctccctagaccgggtttggcatccaggagaccgtgcgggagaccgacgctgagcgccggcctcgccctcggcggcccctccctcctccttaccccgcctcccccggcccgcccctccctccccggaggagcagtctctccgcgcgtctcccggagctttctccattgtctctgcctttacaacaggttcgggcggcggggaagacgggggggtgcggggccgccccagcccgggctttcttggggccgccccccttctaccgggtgtgcgagtctttggctgcttttattcggctcgggagctaattccccgacggagccgcgccggggcgagtccgacccctccctccgggccccctccgggccgcgctgccgcctcggccctgcgtgtgggaatgatgtgcgcattggagggtctaagttcttcacgcgc

SEQ ID NO: 5834 - DNA, 1185 bp, Homo sapiens
cggagagccagggttcgcccaacaggagtacgcggagacaccccagacgacagcgcgtcccccccacccccaccccgccctccgggcgctccaggccagcgtccaccagaccccacgcctgggggactgcttgggctctagcgagagtgccacggctctgcacggcagcggggaggtggcgagcgcgcccgattcacgtcgcctccacgcccacctcctcccactacgagtcccctccccttgccacagcactacccttattgttggccgcgtctgtcactttgtggggctggtgacatgaatggatgggctggacacaccttccgtccgtccagaaaaaaacaaaaaacaaaaaaaaaacccgtccagatctgcatagagagggggaaagactcccccctgcgctcccagagcctacgctgtcggccagagaaactcacagcttccccctcccacactcactcctcccatcccttaaaaaaacgcccaacgcaaataaataatatcgttccaagtccgccgccgtcccgggtggcctttcctccctgcctggctccgcgcgctccagccctgcgggaggcggcggcgagaagctgcggctctgggtgcggtgcggggcgcccgggcgacaggcgggcgcaaggcgggcgcgcagcagaccggttggcgccgcactatgctccccagcgcggtcgcagcccacgccggtgcgtactgggacgttgtggcttcctccgcgctcctcaacctccccgctgcgcccggctttggcaacctgggcaagagtttcctgatcgagaatttgctgcgggtcgggggcgccccaacgcccaggctgcagccgcccgcgccccacgacccggcgaccgccctggccaccgcgggcgcgcagctccggcccctgcctgctagcccagttcccctaaagctgtgccccgcagccgaacaagttagccccgccggggcgccctacggaacgcggtgggcttttcaagtgctcagtccctctgcggacagtgcgaggctgccgggccgggctccgggggaccgagactgtaccttccagccttcagcgccaggtgagccagctctcccctccctccccagccgcgcccgcgcccccaggccgggtggtccagggatctgggagcgccggcggtgcgcactgcgcccagggagagccgg

SEQ ID NO: 5835 - DNA, 409 bp, Homo sapiens
cggctctggtttcacgcgggcagcgtcagctggtcggtgtcacggagttcccgcgtcctccgcccgctcagcccccgcggacccatccactggggttgctccgcagcgcgactctctctcatcccgggggagggctaagggcggcggtggggggcggggtgggggggaagcggcgggagggggcggtgcgccgccgccttaccccgggctcgcgaatccgcagcgtcctccgcagcatcttcccaggcccggccctctcctccccccgcgccgatggtacgcgccggctcgcctggcccggctgcagtggatgttgctagaacccacgcggaggaaggaagagacgcaggcaggctgcggttacccaagcggccacccgggcctcagggaccccttccccgagagacgg

SEQ ID NO: 5836 - DNA, 1813 bp, Homo sapiens
cggggtcgctgcgtcttcctgaccactgacggccaggacggccccagccccgctttacctgcaagccccactccaggctcgagcccccgagggcagggatagcttcccgggtcccgaggcttgaccagagcctgaaagctcctgccgggggttgctccgactcagcgaggcgccaggctgcccggcgcggctgggggcgctcagcgccgggaccccagccctgccccggccgcccgctggcccagtgcgcacgctccggcagctcagctccccctcccacggcggcaggagagctcccggcatctgcccggggcgggggcgggggcggggcggggcgggcgccgcgccctcctgcctgactggcaggaagacagaccaatcggaggggctccccggggggaggggcggtgccgtgcctgagccgggcgcgggcgaccgagggagctgcagccacccgcgtgcggcacgcgccggccgcctgcccggatcgcggccaccagtgccgcggcctctcgactcccgccccgccgagccgcgcgcgcgactgccatcctcctcaattgctttttacgattttttttgtgcatgcattcattttctgttccgttttgtcctttttaaggcggtggcggcggcgacagcggcgtaagctcgcagcggggagggggcggccggaggatgcggcgcggggctgcgctcgctacgtccgctgctgctgcccggctcgggcctgagcgccgagcaggtgggtacaggtgcgccggggggcgggaggcgagcgctggccagagggaacccgtggacccggcgaccgaggggcggacctggcggcaagggacgcggcgaccggtgccgccccgccccatcgtccatctccccctcctccggccatcgcgccccctctgggtcccccttccactctcgcatcccacctcagtggtcccccacccttccatacccatcccccactcctcttcagacccccttgcaaaatctcccagccgctgcgtcgcttcccccaacaccccctcccggtcccgcccccagcccccagctctccttcacgccacccctatttccactcttctccggattccgccctcaagccaaggagcgggagggggacccacccggtgcctgccggagtggcgcggggggtgtggccggcccgtcccctccgtgtcttccgcagggtaggtcacagtcccccagatctccgcccaggtggcaaagaagatggagctgggggccgcgccccggcggcgcggggcccgaaggcgaggccgcccagcccgcaccccaccccacgcacggcacacgccgccgcggcccctgccacgcacaccctcgcgctgctccgcccacgtgggcgccggggaggaggctcgagagatgggaagaaaggctggcacccaccctcctgccgggccggcgcgccctgggcgcactggcctccggagatggcgcgcaaggattgactctcgtggtgccagacaccttgccgggcgccctgcgtcggggccagcggcctcgctggcctgcgtcagtgcgctgcggcctcgcctcccagcccctcggtccttcgctccatcccccctgctgtgggctcctgagcatccggcctgggcagcccagatagaggccgcttacgaggctggcgcttcttttcgccttagaagcatcccgctcccacacaccccagctcgccggtctcctgaaggctgggccagcctcggctctccgccagcctctgcccggctctctgagctccagcgatactgtatctaaccgccagccctcctccgccgcccgc

SEQ ID NO: 5837 - DNA, 1294 bp, Homo sapiens
cggctggagaagctctcgctagcgctgcctgtggccagacccgcctcttgtcccctttcgggcgcacacacacgtccacccagacactccgcgcgctccctcgcgcttttgcttgcccgcccgccgccgcctgctttttccctcctgctttcgccggtcgccttctccttctttttttttttttttttttttttttttttttttttttttttttggtaccatagagttgctctgaaaacagaagatagagggagtctcggagctcgccatctccagcgatctctacattgggaaaaaacatggagtcagctccggcagcccccgaccccgccgccagcgagccaggcagcagcggcgcggacgcggccgccggctccagggagaccccgctgaaccaggaatccgcccgcaagagcgagccgcctgccccggtgcgcagacagagctattccagcaccagcagaggtaggaggctggagaggggctggggagggggcggcgggagcccgggcgcggagcggggggcggccgggagcgggcgcccggggcgcggggtccggcggccgcgcgcgagcctgcggcggcgccccgagcccggaggacccccctcccctcccccctccgccccccagaaatgttgcaaacttttgcagcccgttctcggcttgcgggagcagagtggggcgggggaggcggcgggaaggttgacagccggcgggctcacccccctggctttgatttttctgcaaacactggaggaaagctgcgttgcctcaattaaatacgctcccccaaaatacggagatgcggggagtgggggcccgggaaagaaacttttaaagcggcagtgtccttttaagaaggggcaaaaaaatctgtttatggccaccctccttccgctttaccttttctcctcttgacagtttcggccctggctgcccgagtcgggggtgtgttttcggtccctctcagatctgggcggggggcgggaggagtgagcgacctgggaagtcccgggggtggagagggggcgctccggggtctgggggcgacgtggacaccttctttggagcacggcggtgcgtttgggatttgaaggaagggccgaaggaagcggggtgcgggcgggcgagctgttcgccaagttgtctggcgggcgcggcgaggggagatgcgcaagtttgcagaccgggggttcggagcccggcgcccaggctggcggggggcgtgtgcgcgccaacgcgcagagggcggcggtcctgtggggcgctccacgcgcatccggagggagcgt

SEQ ID NO: 5838 - DNA, 939 bp, Homo sapiens
cgccgcaaggttatgggccgaagtggtgcaggggcggcgcccggggaagcgactggcagagctgtgcgcactgggggtgctgcaggcgctggggagagtgtggagaggctgcgtggagctgcgcgctcggggtgggggctgcactcccaatgaagcgcgtgaagggcaagcggtgatgggttctgcgccagtggggctgggagcccgtccggggctgtacatggggctgcgcgcaaggtgaggactgcgcatgtgggcttggggcctgcgcgcaccggaggctgcaggcgctggggagggtgtggggggctgtgcgtggggctgccctcaccggaagctgcacgctctgggaagcgcagaggcgggggtgctgctcgcgctggggagcacgtgaggggacactcagggactgcccgcgcgaatggcttccaacgcatgcgccccaccccacatttcacagtcgccatgacgaccgggaggtccgcaacggctgcggggacaagtccgttgaggctgccaggcgagtcaggtctctctggacctcgcctgactcggctgggctgtgcctgaaattgacccagctccaccatactccttgattatgagaaaacaaggagtaagctcaaagcggctgcaatcttccggccgcagccagtctaaggggcggcgcggggcctccctcgcccgggagccggaggtagaggaggagatggaaaagtcggccctaggcggcgggaaactgccaaggggctcctggaggtcctccccggggaggatccaaagtctgaaagagcgaaaaggcttggagctagaggtggtggccaagacctttcttctcggccccttccagttcgtccgtaattccctggcgcagctccgggaaaaggtgcaggaactgcaggcgcggcggttctccagcagaaccactctcggcatcgg

SEQ ID NO: 5839 - DNA, 939 bp, Homo sapiens; identical to SEQ ID NO: 5838

SEQ ID NO: 5840 - DNA, 899 bp, Homo sapiens
cggcctctgagggcccgggcagccacccgcacttccccgccacgcggagaaagccgagcacacaggccgcagggtgggggtccgcggggagagggtggaagcagcgggttctccgcgcctggggtggccgctgccccacccaggcccccgtctgccctctacccttccagaccaatcgctccctgcaggtgccaacgcggtgccccgcaccaggtggcacgcggactttccccagagctccccggcctagacggagtcaggctaaggcagaagcgcgggcagccccggcgctactttacagcgccccatctgcagccctggggtcctcacccggctccagggtgcacagcagccggggcgcggtccgggaaatgcagctgcgcttcttgagcacattgctcaggatggtgcccacgccgccgccctgccgcttcaggcatctccccccgcgcctcagagacccggtcagcttgtcctgccgcatccgagagcgccccgggctctggcacggctaccgtccgtctcggtccccgctaccccactcgctgagcggctgagctcgcggagctgggtgagtgtctgcggctgaccggcccgtgggagcagggagcgcacagccggctggtgctggagggtcacggggacttacggggcaccgcgggagccgccgagcgcagggaagccagcaggcatctgcagtgcggagcctgcaaggctgaggcaggagatcgctcgaggcggggagggcgggagcgagcgagcgagcgagcgcgtgggagacggaggcggcgtgcccgcccccaatcccggcaccgccgtgcgcaggcggggccgccccagctcccccgtgcccagaagcgccagagacagggagccagtgggcgcgtaactgcgttcgg

SEQ ID NO: 5841 - DNA, 899 bp, Homo sapiens; identical to SEQ ID NO: 5840

SEQ ID NO: 5842 - DNA, 547 bp, Homo sapiens
cggcgccttggcgaactcggccactccagttcctcacgtggtgagcactcagggcagcgggtcgattttccgaggtcccatacctgggtttgaggggcgcggctcgcagcggcgggtgcaggggcgactgccagccctcaccccgcctcggggtgcgttcggaggccgacacctggaggacgcctccagtccccgcgggacgccacgcctgcgcgccagggatccgggataagaagtgcgcgccgggctccggctgcgcgccgcggggccaccagtttgcgcgcagggctcaggcgaccgtgcggccatggacacgccacggggcatcggcaccttcgtggtgtgggactacgtggtgttcgcgggcatgctggtcatctcggccgccatcggcatctactacgccttcgctgggggcggccagcagacctccaaggacttcctgatgggcggccgcagaatgaccgcagtgcccgtggcgctgtccctcaccgctagcttcatgtcagccgtcactgtcctgggcaccccctccgaggtctaccgt

SEQ ID NO: 5843 - DNA, 2505 bp, Homo sapiens
cgccccgccccgcaccgggggcggaacctcgcgctcccggacctgggacagcaccagcagcgtgaaatacgcgcacccgagtgcaggagcaaacaggcaacctcttgttctggctacctccagcccggccgcctcctcagcggcttgggacagcagcgcgtggctgggaagacgcgggagggggacgcgaggcaaacttgcgccaagagttggccaggttaggtgagagggagtggcacccgcgcagacacttaccgctggcgttcttcccgcagatcaggtgctggtagggctgcaggagaccccagatctccgagtcgttgttgaccgtgtgctccagggtctccacggtgaacttgggcgcctcgtggagcgcatggtggtggtgatggtggtggttggcggcggctgccggcgggactgcggcggccgcggcggccggcggggcgcaacagctgctgcccccgctggcgctgctggctgcgctgcaggcgccgccgctcgccgctcctcccccgggcgcctcccgctctttatccgccgcgggggccgcaccagggcccgagctcgggcctgggccggagcccgagcctgacccagggccactgcagctccggggcaccccggaggccacgacccgcgagtagatgtcccggaagaggctctccatgcaggctgtcaggtagatggcggcgtgctcgtggatgcgcagcgccacgcggctgtccaccatccagcgatacacgcggcccacggagaaggtgaggccgcagcgggccgacttgccgcggcccaggcggtcgccgccggcgctgctcatgttgtagagggacagtgcggccagcgcagccgccgtacagtgcgcggccaggccccaggacagcacgatctccatggcgctctggatctcgtacttggtgcacttggcgaagcgcaggctcaggcgctgcgcctctttggctatgcgcaccagcgcccggctcaccagcgtcgacagcttggccagcgcgtccttgggcaggccgccggggaccgccgggcctgcccggggatcccgcgaacgcagcagcagcgcctccagctcctggagagtccaggggacctcgtctaggtccggcagcagccgcgagcagtgctggccggcgcagtccagcccctcggagtcttccaccagggcagtgttgacagtgtcaaagctgttgtgccggctgtgcatggagtcagctagaggcggccagcagctcccgccatacggggacgccgggtgcgagtcggaacagcacaaagacaagttggaggagcgcaccgagtccgccgcgccaccataacccgagtccagcgtcagatcctccagcgttctcaccacgggcttcttacctctcctggccatcgctgcgccacttcatgctgcagccgcctgggagccaaagggaaggagcggcgaggagcagcgagtgccgcggggcgcggggagagccgagtccgcgccgccttggctcacttttccactagccgctgctaccaactgttagtactttcggctgcctcccggaactgccgccgctggaatatacagagcagaccctggagtcatcttccagagtccgggccggagctgggcgcaatggggagcgagccaggccgggaaggaagctcccgccggggcttgcccctttcttccaaaataaaaagtgtctagaccgctcttccctgagccccgctgggcgcagtagccaccgggcgccggccacggtgttcgtgggactgagaccaccccagatgccgccgccgccgcagctccgcgggcagctggctcccggctcccggctcccagttcccggccctggttcgctcggcgccagcctgccctgcaccggagcgcagcagcggccgtggcggctgcaaaccttgccgaaccccagcaaaccccgggcagccagtgggacgggcgtatgcaaagcaggggcggcggagagccagtggaatcggagaatgctaattacctcgctttttttttttttttttaaatccctcctccccatgcggccccgcccctcacacacgcccccggcggacaccgaggctgcaggaagtggggagcagtggccagggacttggggaacccttgcaagcgtagagacgtggatgctgccccctgctgctgtccctgcccgcattctcccggagggtggtgggttgggccggtgacctccccacctaggtgtgctctccaccgcggttcacaaggtgtctgcctgacggtcgctctctcccctgcggttcgcatttcacttttttccccccgtaacacctgaaacatggttttcctccctctctattcccacttcgggtacgcaaaccaattagtgcggccctctttcagccggggtttgctccagcatggagggaaataagcctgtcgagcggaggcccgtggcggtggacaccactgggaggccggatctccggccattcgccacctgccactagggcgcgttaactcga

SEQ ID NO: 5844 - DNA, 1587 bp, Homo sapiens
cgaggagtggggcgttcggaaggacggggactgggaagcggccaggacggggagaaggcgcgggtgctggaaccacttatcagaagaaacttaacgagatttgccggcggattaaaaaaaaaaaaaaaagtgggtccctttttatctccagactgatgatctcgcgtcttccgcgaatgtcacggtcaaggcaggatgctctaaccgccctgttatccgcaccattttcccgcccctgatccccgccgcacccgccgagactttgcgagactccaaggctggggggccttgccaggcgcgtccggggcactccgggaaagaacagaggccggagccgcgcctccacggtgcgttctctgagattccacctcccagccccggctcctacggggtccgcagagaacacctccaaatctaggggaggcacacagactcccacaaagggaggatggggagaaagtgatggggtttcgaagagtcgccctagggaaggagagagaaagagcagggaagagaggaaagaaacagaagaaaagcagagacgggagagaggagacgaggggagcagcggggagaaacgcaggaggcagaacaagcaaggaaatctctcatttaaaagttcccttgggcccgagggctgggagtcacctgctctgcgccgctcccggctctccaccgccctggaggcaggagcgcaaacttgcgagcgcccgggcccacctccaccgcccgtctgcatctagacttgggaaggggatggaaggggcgggggggtaaaggcaagaagcaagacgaaccccaagaccccggcccgaggagaagaggtctgccggcgcttgcggccagtccggcggcggcggctctggcggcggcggcggcggcccccgggtggcggcgcgtccgggctgcgcagccaggcgggcggcgaaggctgaggtgccggcgagcggcggggcgcggagccgcctcctcgccaaccccggctccctcctcctctctcctcctcctcctcctctcctcctcctcctccctgcccgccagctccctccctccctcgccggagccccagccgggtgcggactggcaagcggcgcgctccgcggcctccccgggcgccgcgaagttgggaggcgcgcaaagtgcggctcaggggggaccgccgggggttcccgccagcagccccctgcccgaggccgtagcccctgccttccccgctcctcgcccggccgcctggccgctcggccgctccgccgaccgagggctcactagcgcttctccatggtcgcggcagctaatcgatgactgaaccgaacaaagagcagcggcgagatcaattcctaatacctatcgatgggcagcgggcggccgagccccggcgagccccggcagccgccgcccgccgccccagggcgtccgcctgcccgcccggggacctccccaatgcgcccagggcgcgcccgggggctcctcacggccgcgcggccggcgctgcccgcactaacctggagtcgccgtagatcaaatcgcttccaatattgaaacatcgatcccacattggcggccatcttgggggctatcgagacgcgc

SEQ ID NO: 5845 - DNA, 5693 bp, Homo sapiens
cgcgcggagagggcttaagagcgcccctccaaaggcccagccccgcctggagagagtgggcgggcaccgggtccctgggggaggggctgtcgcaggtttgggagggaatccagcggggctggccgtagcctgggcaggccgtagcttgggccggcgggaacccgccactggactgaagaggcgtctggccgtcgctgacgccgctgtccccttcccgatccgtccgcccgcagtgtcatcctgtacggaccgcagtttgtccccggacctccaggacgcactgcaggacgaccccaaagagacggacaactcgacctcgtcggacaaggagacggccaacaacgagaacgaggagcagaactcgggcaccaagcggcgcggcccccgcaccaccatcaaggccaagcagctggagacgctcaaggctgccttcgccgccacgcccaagcccacgcgccacatccgcgagcagctggcgcaggagaccggcctcaacatgcgcgtcatccaggtgcggcccggggcgggcacagctccttagccccgctggcctgggagccgggagcctcggaggagtctcccgccaagcttccttggctacgagcgcgcctggttctggtctgggagcagaccgtgcgcccgagtggggcacttgcccgaggtcggggactgtgaaccgaaagattccatctagccctgctgtcctcctggtattgcgatttgggggcgggtcactttacctctctgaattccgccccccgccttgcttatggaaggttgtaagcctctctggggtccgggatccctctttacctccacctttcgagcagagaaacaggcgatgccccctccctccctgcgccgaagcgcgggcagacaaacggccagaggctggctccggagccgaggggccgaggcgagagccgtgccgggagggaggcctttatagagccgtcaggccgcgggcgagccggggaccaggaagcccaagtctttatgagtcgccccacgggtccgcgaaatccttcacccttggctggttcgccgaagcctctctccacccctcccggcctaatccggcccggccccgcctcgggggagtcctggtgcggaagaggcgcaaggacccagcaggggcagcccagtcagggaagggagaagagggggggagaggacactcctgatcctgggttcacagccccctcctctgtcccaggtgtggtttcagaaccgacggtccaaagaacgccggatgaaacagctgagcgccctaggcgcccggaggcacgccttcttccggagtccgcggcgcatgcgtccgctgggcggccgcttggacgagtctgagatgttggggtccaccccgtacacctactacggaggtaaggggcgccccgggattcgctgttccgcacctgtcctattccgggagctgagggcgaagggtcccggccagcacgctttccgccgctccagaacatcgcccactcgctggacacacgatcacagacacatgtacactcacccacatgtcctggacacaaaatcagatacatggtctcacccatacagtgatgcacacagaagcacacacgagatacagtgacacattcacccacgcagggcacaaggtgcactcacacttgcgttcagagactccagggacacacgtctagacacgatcgcacgatcacgtataggtaaattccaccctctcacacacaggtacactcacggagacacaactccacagacgcgcacactcccaccagtcacactgaggccagtactggcaaatccacatgcatgcggcccccacggacagacgcacagccttcctgccgccctgtgcctggtgtacttggcatgaggtggattccgagcgctggagggtagtgtgaggggaggggatgggggtctggattcattccaagccgcctgctcactagcatcgaaggcagcaactcctgttccatgtggcggggtgtgtgcgcacagcatctggcagtgttagcccaaatgccggcagttgctctgggcaggactgtagtccaccctccagccccgagacccctggggttcctacagactgggggcacaagtgttgggccaaccccagatttccaccgtctttggggctgcagagagcgaggagccccagtttacaaagggcttcagatggtggtaccaggcttgggcctggggtgagctgtccccttgccacctcagcttttcctcctctcacttccctcacactggattggtgagccatcccaactccccctatccgattttttcagctccttaccctgagccgcattgcttgagctcaccaagctcactgtcctgttcttcccagggctgagggctcaagaaagcacctctcctcttctattctgaagcttctgaatttggagagaccccaggactgtctatgtctgagaggcatctgcacttctgagttgtaacgcaggttaggaagaggcaatttctcttagaaagtgggttcagtggcagtgttagcaaggcaggagctaggcacccaggtagacgcagaagggaagggaagataaccccatcactaacctcagcacatccggaagcctgaggggggattagaccttgagaccggaccggggcccctagaaattgtgggcaaaatgccaggctgtgcttttcagggcagagaccccaggcagtggcagggctcaggctggagcgccccagccgcccaaccctggacagccccccaaccctggacagacccccaaccccggacagacccccaaccctggagagcccggatggtgggcgtgtcttccggagtctccactcaccgactctctccacctaaatttgcctctttccctacaaaatctgggcccggagcagcgaggtagtgggggcggtaccggcccggaatttttccccgcctggataattaaccaaggtttccccgaggaccacttcgcccccgccccgacctatcccaccgcctcctctccctgcgcgctggatgaggtggggagctggatactgggggcccctcgttccccgtaatggtggggaagactccccagcccccagcgaggcagccccgcctaatccgcgctgggagatcccggcggtggcgaccggcagcgggcgagaaaggggccgggcggcggggccggcggctccccgtgggagcgcggacaaagccccagctgcggcttttgtgcccttttcagacggcgtttgttccaattacctccggcccggccgccatatgggcggaggcggcgcgcacggcgcgggggcagcggccttcgctggttttccggctcgccgcgggccgcggccgtctcccatccctgtccctttggggctccaaatttgccgctccccatcttccccttcactttcggggagaattaaattaatggttttaaaaagtaattggcaaccgttttagctgttgcttaaactgcctccaagccacgcctccagacaccccccatttggacagatttcagggtttggagagggaagagggtggcagggggcatcaggaattcgccccttgactgagatcccaggactcagcagggggagtggatttgcagaagagactcaggcttctggactcgctggttttcccgccgtacaaagcgggtgcctggtacaaggtggtcctttcgtgacgtcccccacgtcagtccttcagggccccacctggtgggggaaggcaggatatcccgaaggttctggaaaaggggctatgtggggcggtcagagagttgatacagatttgttgaggcagaatgggtttgcaatccggagtccctacacctcctgaatttatgggcaaaattctcatccttgcattttccttgagagagagcccatagctatcaccagcttctcaaaagatctcaatgtcctcagatgcttcagaacctgggggtgctggcaaaaccaacccggggcaaggctggaggaccgagcttctaccccaaggagcccgcggagctctggccatgacccagagaatcttcgtgtcctcctccccctctcccaagtcgctggagctcagttttctctttctcaggctaggctaggccggtacaaatggtctcaccgggatcgacgcggcggccgtacttggcgaggcgaaggacttggactgggttggtagggcgcagggaccgagtttagggcgccaaggccgccccgcccggcccaacccaccagtcgctcctgccgcggcccggatccagtttcccccggccaggtcgcttcccggtctcaaccatttcgcgctctgctctgtccgctggtttgtccctgcccggttcctctccccgggcctgtcagcctccgcttctctggaggttcctgggactcatctctgatccaccgtcttgcgttctctgggcgcatcgacttctctccatcttcgggctcactcctgactccctcgctgccgcccccgggggtttccacgcgtgtctctaaccgcggccgtctttcctctctctgcgtctcctcgactcctccgcgaccctccgatgtctcgggctttcgggtctcagccgcggactccgcgtctctgggtctcttttccgcctttctctctgcccctctgccgatctctccgtctgtctctcgctgtcccgcatctctgtgtctctcaccgaccctaagacacttaggaatcattgtctgtctctgcgtctctggccgcctctgtctctctccatctctaggtgtcagggaacctgtgactgaagtctccgagtttttgccgcgtgtgtcccccacggtctcggagtctctcccgtctctgtgtgtggtctctggcagtctgagtctcttgccctttcgagatctctcattgtctctctccccaaccctccccgtgagcctgcgacgtccaccgtctcaaggggcgccggcctccgcaggtctctctaaccttgggtcggtgtcgcgcgctcccctctctcgcccgcccgggtcccctccccgggtcccgggtcccccgcctacttcgccttctctcaccgcgccctgtctccttcccgctccccctccgcagactaccaaggcgactactacgcgccgggaagcaactacgacttcttcgcgcacggcccgccttcgcaggcgcagtccccggccgactccagcttcctggcggcctctggccccggctcgacgccgctgggagcgctggaaccgccgctcgccggcccgcacgccgcggacaaccccaggttcaccgacatgatctcgcacccggacacaccgagccccgagccaggcctgccgggcacgctgcaccccatgcccggcgaggtattcagcggcgggcccagcccgcccttcccaatgagcggcaccagcggctacagcggacccctgtcgcatcccaaccccgagctcaacgaagccgccgtgtggtaaggccgccgggccgccccccgcgctcggcccccgggggccccgccccgaagcagcctcctgaaaccaaaacgcccgacgcagacgcggtgggagacgtgggtgtccctcgggggttctctctcgggtccgcactcaactggcagctgctcctcggctgggcgccgagggggggccgacccccatctccaccccgcgggctctccaggagcctcagcccaccgccagtactctcccagcaaccgcga

SEQ ID NO: 5846 - DNA, 589 bp, Homo sapiens
cgccgcggaggctccagcggtaggtgcgccctagtaggcagcagtagccgctattctgggtaagcagtaaaccccgcataaaccccggagccaccatgcctgctcccccgcctcaccgccggcttccctgctaggagcagcagaggatgtggtgaatgcaccggcttcaccgaacgaggtaaccgtcccggcagatggcccgggaggctcaggagggagctcgtcggccgagtcggctggggcggcgggaatggcggattccagcccggctttgcattctgcagagcacagcttgcagagattttgcgcggctcggagctccccggcaaatggagtctgggaggccgccgcggctggcggagcggcattgaggtttgcagaagcacggcctggttctgtcaaaccgcatcttgttcgcctccgccagcccagagctccccgggaccctggcgagggcgcggggtaggattctccccgcggccggcagtgaatgggagcgcgtgtaggggcgccagccctgctttcttttgttgtgagtaggcagcggggctccagtcgccgcctccctgaagccccgagaacgaggcga

SEQ ID NO: 5847 - DNA, 1294 bp, Homo sapiens; identical to SEQ ID NO: 5837

SEQ ID NO: 5848 - DNA, 1373 bp, Homo sapiens
cgaccctcgctgagctcacggctcagtccctacatatttatgccgcgtttccagccgctgggtgaggagctacttagcgccgcggctcctccgaggggcggccgggcagcgagcagcggccgagcggacggggtgagccaggggcgcgcgcggggcgcccagcactgcgccggggaagcccgcagcctccgtcccgaacttgggttcgctgaggctgagggaggggacgcaaggggagggaagaagagaagggaggagtgggggctaggggagagggggtggggagggatcttggaggcacaaagcggaggggaaggggagggacgcgcgcggctcctaccaggaggcgagtgggtgcaaccggcgccctccagccgcgcggggcggcggactcggaggattcagaacccggagcgcggcggccgcgggcgcccgggaggaagaggaggagtacgaggcgggcgggcgggtgcgcagcgcgaagaggcagcctcggcgctgcccggctcggcgtcaggtgagttcctgatccaggcgtcccgcgccccttctccgtccccagggctccccgctcccgcccgagcccctggtgtgcgcggaaggctcgggctttgctgcgcgtcccaacttggttcgggcggcctcattttcctcctagcgggcggcctcaggccgggggctccggtccgggggtctacgcgcccaggctccaactttgcaagaccctagtcgttcctcagccgcgcgcttggctccgagctgtgcgctggcggtaatggcggagcccttggcacagctcgctaccctcccgcgggcagcccgggctgggggatgccagtccctggggaccgttgtacctgcccaagctcaactttacgccttcctcggtgcccgactctgcggccgaatcgcaactgcgagccgcaggtaatggcggagtctttggcactgccagctgtccgcggctgggggcccgaggctgggagggctccgctcccggaacatcgctccggcctggcctccaactttgcgaggagcctccttgcgctctcctcccgcggtcatggcggggccgcccgcacctctcacttcttccgtctgggcgagattggggtgtaagagcgccgtctccaaaacctgggaaagttgtgcttctcccgcaaaggaggctctagggaggccgaggggcgcgttccgccacggttcggggctgggcagtggaaggagcgctcgatgaggttgcttccaggtggccagggttcggagcagggtccccgggggatccaacttccagggccactcaggggccttgcgtccgaggtcccggaaggggctctctcgggactgcgccccagaggacgccagacgctcgc

SEQ ID NO: 5849 - DNA, 1524 bp, Homo sapiens
cggggaaaggcgtggaggggggctgagcgggctcggggttcgcccggaatctggggggctgaggggccgggcgctgggcggtggagggaggaggcagggggatgcggggagtggtgggggagtctccttaggaagtgagtgtgcgcgcgcgcttgtggggagatgaggcagctgctggtgcgttttggggtctccgatccgagctttgtggcgggccgtctgcctctcccccttccaagccccgattctcctccccccacctcctcttcttgcactggcgggcgggcggcgggggcggctggggtctcagcccttccatttcagctttccagcttccccggtagctcgggggcggctccagctttagaaatgccgccggcccccggttccggcttcccggctctgccgccgcggccgctggggctgctgttaccgccgagccgggcgccgcagcggctcctcctggggcctacatttgccccgccagcccgtgtccggagcccccttcgcgggttacataaccaggctcccggccgagtgggcgaagcccagcacatttcgggggcggggggcaggggagggtccccagatgtcccttcagtgcttccgaagacaccggaggggagtaccccgcgtagagcgcagctggaccctcggggtgcgggcccctctccttgtcctgcttttcagcatctttggcaattgcgcaaagttgcttgggttgcaatggtggggtgcagggggcgctcggctgctgcacctgttagtgctgggcccaggttgagaggcgacctccagcccccacaataatgtcccgggctctctggtttgggtcctcgcagcgcccgattgaccgccagcgatacgacgagaacgaggacttgtcggacgtggaggagatcgtcagcgtccgcggcttcagcctggaggagaagcttcgcagccagctgtaccagggggacttcgtgcacgccatggagggcaaaggtgaggcgcccccaccccgggccgccctctgcgctgcgggccgagcgcacgtggggagggagctgccggtggctgggttcgtatttcgcgcccgcgtcccccattccaggggatccggtgacgaaacgaggccgagcactgggggggtggggtggggtggtgagggaggagggcaggcagtaaggggggccgggcatgggcctaggcccggcccgcgcccaccaccagccccagggtgggcagagccagggggccggcggacagagggacctggagatggacaggcggaccgagggagggcgggagcgccgcgtcctccccctccccgagccggtcgcgctccctgcgctgcctgaggtgccgccgcctggctggaactgggttcagggcgcccctggggcatcggggtaaggccccccaggcccgaagccttcccaatcccgttcccgcttggggcctgccagtgaggaactggtgatgggggcgcgtcgggtgtttgggacgatgcccccttaggcctggggtccgcagagccgc

SEQ ID NO: 5850 - DNA, 1009 bp, Homo sapiens
cgaagtggcgggccgtggctattctctttacctgctgtacttcttggagtcccggggcgcaaacagccgctgcatttcccttcattcccgacgggatgacaccacagtcttctccccagacagcgcgggcctctgctccgtccttcctcagcgaccgcagcgacgactctgctccagggcgggggagcagcttcccaagccgcgggcgcccacttccccgcccggactccgggcggtgctggccggggcgcgcggggaggcggggaccagggaccccccaggaactagcctgggctgctgcaccgctgccagggccgtcctgcgcctagccgagcccagggcgccgccggctggacgcccgtcaactcccactgcgcccggcccccgagcgcgcccggctggatccggcgcgcccctccgccccaggcgccgccaagtcccagcactatgcgcccctccagatgtccgaaagcgcctctccagggcagcctatgtccctctgtgtccttcccgcgacgggccgggcccaccactccacacctcccgggtccttccatgtccatcaccgtgtgcctctccagcatcccccctcccctccaagttccaacatagcactccttcacatattccccgcgtcgcttcagaggttcctccagccactgccccgcccctccacttttccagtttctccagttctatcgaggcgcgcccctccagcacgtccccacccctccactccctccccgcgtccctgcactccctccccgcacccctgcactcccactccgagcccctctgtgaccaaacaccgcgcctttccaagcgctcctccttcgcgccgccccaagattcccctccataccctgcactccttccgcacccacccacgcacccctgcgcgcctccacccggcggcctctccaccctcagactcgcccccgcgatccagcgcgcggggcactgggcagggacatttctcgctcccacgcgagtccttcgctgcagacgc

SEQ ID NO: 5851 - DNA, 961 bp, Homo sapiens
cgtcgccgctgtgagcgcgcgaggacccggggctccaagtggtgagaatcactcgagggacccttcggatgcctttttccccctctgcttttgagctctgcagcacagcggtgccggccgccggcagggaaggctgcatcttctctgcgccgccaaaccgtgcccaccatcgcggtgactgccgcctaggtcgcatccctgagccgcatccgcgcgtaggggcgcacgggcacgcgcacagggaggccgcacacacacacacacatctgtacagggacgagccgggggtctctgacgcccgccgctcacctcgccccggcctggagccttttggccccgcaggtgcagcgacgcccagcccccgtgcggccagcgcgccgcgtcggcggatcctgcagcccagagagcccagggagcccagggaggggagcggggcgcgggcggggcagtgtcgcataaccgcaggcgcgccccgcgccgcccccgccccgggcccaccctccctcgccgcgcccctcccagctcacccacggacgagcggatcctcgacctccgcggcagggacatcttaagagctttgtccaggcctgcgccgttcagcatctcgcccgtgtcgggggctcggcggccccgggcgagagacggaggctacgcgcagggctgggcgcaggggccgccgcccgaggaccatgggtgggccagcgcctcgccgggctgctagctggcggggaccgccggcgcctgtgccgggccgcgcccgaggctgcgccgtccgtgccgcagcggccaatgcggcagcatccgcgaacgccaccgcggcgggccccgctggcccgggctgcggcgtgggggcgggggaccggccctgagcggagccccgcgggaggaggagcggacgggaggctgggagggatccgcaatattacgcaggaccggggcttttaggtgtcggggaaggcga

SEQ ID NO: 5852 - DNA, 961 bp, Homo sapiens; identical to SEQ ID NO: 5851

SEQ ID NO: 5853 - DNA, 980 bp, Homo sapiens
cgctcccctgccccgcccggtgcaagcccggggccgccggctggggtggggcgcgcagcgcggcaggcaggcagggctaccatgcagttctcagcctcctggctccttcgcccctcgccccgcgcccctgggccgccctcgcctgcccgcaccctagagcagccctgacccgtgggggcgcgcggcctcgcggggatcccgcgggcgggcgggcggccgggcgcgcgcggggcgggggcggcgcgcgcgcggggagcgtgtgggccgggcgggcgcggcggggaaagctgggcgcgcgagccgaggctgctgctcacctgcagccgcgccgctcacctgccgcggagtgcgcgccccgcgccctcccggcccgctccggagcccggccgccccccccttgccacagcgggcaactgcgccgacatgcgacacgagtagcccacgcgcttcggaagcaccggaggagccccctcggcctgggcgagccaaggtgaccccctcgatgacccccccgcccccgcgggccgcctgtccccgcaccctgtctgtccccctcgcgtccgactcccgtccccgccgccagggaatcggcagcagtgcatgggcatctgtctgtctgtctgtctcggtacttccattgcacacacctccctctcgtggccctcccgactgccccgtgcgcacggggggagtctggagcccctctttgttccggtcgggggtgcgtttgaggatgtgcacgcgcgcgggggatgcgtttggagggtgggagttcgatggaaataggcgatttaaatattccatcgaggatggcggcccctggctcgagacctgccgctgccgcgtggttttctcggcagcagcccagatgtcaaacagttgttcgttttcagcatgcaagatgtgattttccaatgtgcattcccagcgctgttgcaaacagaccgccgcgagtccgtgtgtgcctgcctcgctcacgc

SEQ ID NO: 5854 - DNA, 408 bp, Homo sapiens
cgcggcgcctcttccgaaacacctgagcataagcagccgcaagggcgagcgcaggacgcggggcgtggacgccgggctgggaagagccccgaccaaacccgcgggtggctctgactctccccttcgggaggagctctgcgcagaggccgtggctcgcgcgggcaagtcacctgtggcagcctggcagggcagttctctccggcaaatagcgacatgctctcggtttctgtcggccttggcctggcagagccgctttccgctttctggcctctggtgcgcccgaggcgggagaggagccccggccgcgtggaccctagcttgcgcggcaatcatcgcgccttgactctaggcccggctgctcagggaaggacagcccagggcgcgcccagcgagcttcagggggtacgg

SEQ ID NO: 5855 - DNA, 2190 bp, Homo sapiens
cgggtgcatcaatgcggccgaaaaagacacggacacgctcccctgggacctgagctggttcgcagtcttcccaaaggtgccaagcaagcgtcagttcccctcaggcgctccaggttcagtgccttgtgccgagggtctccggtgccttcctagacttctcgggacagtctgaaggggtcaggagcggcgggacagcgcgggaagagcaggcaaggggagacagccggactgcgcctcagtcctccgtgccaagaacaccgtcgcggaggcgcggccagcttcccttggatcggactttccgcccctagggccaggcggcggagcttcagccttgtcccttccccagtttcgggcggcccccagagctgagtaagccgggtggagggagtctgcaaggatttcctgagcgcgatgggcaggaggaggggcaagggcaagagggcgcggagcaaagaccctgaacctgccggggccgcgctcccgggcccgcgtcgccagcacctccccacgcgcgctcggccccgggccacccgccctcgtcggcccccgcccctctccgtagccgcagggaagcgagcctgggaggaagaagagggtaggtggggaggcggatgaggggtgggggaccccttgacgtcaccagaaggaggtgccggggtaggaagtgggctggggaaaggttataaatcgcccccgccctcggctgctcttcatcgaggtccgcgggaggctcggagcgcgccaggcggacactcctctcggctcctccccggcagcggcggcggctcggagcgggctccggggctcgggtgcagcggccagcgggcgcctggcggcgaggattacccggggaagtggttgtctcctggctggagccgcgagacgggcgctcagggcgcggggccggcggcggcgaacgagaggacggactctggcggccgggtcgttggccgcggggagcgcgggcaccgggcgagcaggccgcgtcgcgctcaccatggtcagctactgggacaccggggtcctgctgtgcgcgctgctcagctgtctgcttctcacaggtgaggcgcggctgggggccggggcctgaggcgggctgcgatggggcggccggagggcagagcctccgaggccagggcggggtgcacgcggggagacgaggctgtagcccggagaagctggctacggcgagaacctgggacactagttgcagcgggcacgcttggggccgctgcgccctttctccgagggagcgcctcgaggagtggctggcctggacccgcgagcatcagcgctcagaccgggtccgcgctggggctgtccgtttgcgacaggatcgctgatcccttatccagctgtcgggttggggtctcactgccgaggccctgggcactaggagcagcacgcaccgggacctgcctggcacccagagcccattcccagaggacctggggcaggtacgcagggtcccccggagccgggagcagaggctcctgaaagcctgccaggctgcccggggctgggctgaggccgggactttggtgatattgggcactggccgcgacctcgcgtcacgagagtgtaggaggggagccgatttggaggggactcgtgcctgcgggggagcaggaggatctcaggagagggccagcgccggcatcccatgacccgcttgagtccccaagccggactgtcccggggaacgctcggcgagcgcccgctcctccccgccgctctcggaccgcggggccccagtgcgctgcgctcagccacccgggtggggcctctgccgggagcaggcgtggtgcgcggtccagtccgtgtcgcggacatcagtgaccctgacccacaagggcagcccagggcccaaataccgttaacttactgacttacaagcctagcctttaaaatccgagcgaagagagggcgggcgattttgaccaaacgatgtggtttgaggaatcgatgaggtccgcccgccacctaagtcagccttcgctgggcgtttgggagacgggcggtggaacagtcaggggccgggggttttaccagcagttagaccgccgccattgaggggtcaaagccccgaggaacttgagggttcggactcgcagtctctgctcagtggggctgagtggcggagatttgtgcctcgttcccctgggcgcagagagccagatttcggagcgc

SEQ ID NO: 5856 - DNA, 2190 bp, Homo sapiens; identical to SEQ ID NO: 5855

SEQ ID NO: 5857 - DNA, 679 bp, Homo sapiens
cgccggcccaggctccgtgcggcaattcttcggttctgttgtttacttcgccccaccgccccccacctcctagtttttgttcagcccggggaagccgcgccgcagcgcctcagatgttatttatcttttcctgcgaggggcttgtgacagtccagggtgttgtgtatcctgtgcgattgtttatcgcccggcccatgcggtggcctgagcagcctcgcgccggcacttcacgtaccgaaccccgggactacgtgagccggcggagggcggggaggtggcgctcgggcgccggcgtgaacccgcgtcccccggagcccagcgccgtgtcctcaggccccggccctgacctcagggcgctcaggtggaatggccccgcagctgcgcgctgctcccgcgcccccgccttgccccgcggaaatcgcccccgacagtcaacccgaccgggcgcgcggcgcccccggccggtccccgcccgaccccgcgcagggcacagatcggggcgcacgcgttactcgtatccggtcacccgcgggtcaggccggccgagcggctgggctcagggggtactcctacgtgcgcagccgccacccggcctggccgcccagacgcccccgggggttcgcgccggccagcccagcccgagcctggcgccgcgctgcggccgctgctctccactcgg

SEQ ID NO: 5858 - DNA, 2013 bp, Homo sapiens
cgccacgcagtccagggcgctcagcctacaccgccgcacacccattgtcggcccagaggcttggccgctgagcgccccctggatggcgtggtctgaccgtccttctccttgactcacctccagccccgagggccgggctccacggcggcggagagggcgtcgcccgcacggccccggctgtgccaccgccccggactgttcccgcgcagcgaggtcccttccccggggcccccgggtggggccggtcgagccgggtgcgctatccctttaagcccgggcgagatgagagctgtcagcggcagccgaggctagcgcgggacgtcgccaccctagcgccaggccggagctagcagccgcggagccgcggagagcggagggggcggcggggccgggcgtggcgggtcccctcgccgcccactgcgcgctcgaaccctgggccccgcgagcggcgggcggcacccgctgtaatgcggagaatgtgagaggcagcgcagggcggtggggaggaaggggcgcgggagagggcggcggcgagacagacggagagcagcggggagaacgaggaccgggctgggcaggtgggacaaggcagggaggcgccggagaggccggactggaagggggggagaagggcggcggcgccgcggagggggccggcgcttcccgcgggagtgcgagaagcccgagtcggcacctgggcccaggttcgggctgggagcgcggccgcggcccggccaggcagggtgcgggagccgggccgcccgcggggtccctacggggagcagcggggcacctaaggccggcgggtcccggaggggcccagggccgcgctccgcaggctccggccgtcccggcagggggtctttgtgagcgctccaggagggcgagtcgggagtgcggagccgggtgtgcgcgcctgggtgtgcgcgtgtgtgcgcgagtgtgggcgccgggcagtgggggcgcgcggtagagattctgccggcatcgcatcgtggcgagcaggaggcaggagcgggacgcgcaggggagccgggaccctcccgcgcacacgcacatgcacacgctgcgcgctctcacgcgcatacacacgccctccctgccgcgctcgccgccgcggccaccatcgcggagccgagccctgcggagcgggaaccgaggccggagcggggaccggaggcagccgagccgggggatgccggcccggagcggagccgcgcgcggacggcgcgcccgggacggtgagtgtggccgggccgggacgctgcagcggggccagggccgcaggggcgcaggccggggagccggtgtgtctgcccgccggcggcgcggcgcgcgcggcctctgattgggcgggagcctcgggggcagcggcgggggtggggtgctgggtgcgcgtccgtggggggcgtgcacgcttggggctgggagggggcgtgctcggcagcccaggccgcggccccgcctcacccttacctgcagctgcagccccgacgacttgcagcaagtttgtggagcccctggggcgcggcgggccgggaggggtggggacggaggcgctttgagggtgcaactccggccttcctttccagagaagagaacgcgaggggagtggggcgggggcgcgggccgggccgtctggcgggcggaggggtgcgcctccagctcctcagtcgcgcagccgcccgctctctgggacacccacctaggcccgcggcgccgcgctggagccgctccgggcgccagactactatgaccccgctagggtcaggcaggaccgcgcggggacagctcccaggcccagggcctgggatgtctttgcaggcaggaggaagacaccaaggttcagttgggggagtgcggcgacgtgcccgggcgtgtatgtgtgtgtccccgcgccttctgctcctcaggacggtggctggaagaagggaacttgccgcaaggcgcgccccacccgacctggaccctcaggagctcccaagaggccgggggcgtctccaggtctgccgg

SEQ ID NO: 5859 - DNA, 1501 bp, Homo sapiens
cgtggccctccgcctggcccctcgcactcaccaggaggaggttgtgcgccaccaggtacccgagccgcgggctgccccggatgccgggggccaggcgcccggtggcgtagccgtgccaggccaccacgtaggggttgtcgatggtgatccagtacttgacctgaccgccgaagtggcggaagcagagctccgcgtaatccctgaagtggtcggccagggcgcggttggcccagccgccgtaggcgtcctgcaggcgctggggcaggtcccagtggtacagggtgaccacgggctgcacgcccagctcccgcagccgctccagcaggcgccggtagtagcgcagcccctcgcggttggggacgcccgcgctgccattggggagcactcgcgcccacgagatggagaagcggtagtgagtgaccccgagctcgcgcagcgcctccgtgtcgcggaagacgttgttgtagctgtcgctggctacgtccccggtggcgggctgcagcggcgacggggcgcccaacggcagactggcgttccgggagtctcccgggggtgccagggggtggtgggtgaacgtatcccagatggacgcacccttgccgtgctgctgccagccgccctcggtctggtaggcggcgctgcccacggcccagaggaagccgtcggggaaggtgccctggaagaggcccgcggcctcgggggcaggaggccgcgagaaacgggcccaggtctgcgcgccgtcgcccggctccgcacgcaggcggcggccgcccaggcccagcagcaccagcagcagcgacagcgacggcggcggcggccgcgggcggcgcggcggggcgctggcgggcatgctgcgcgggagccaggctccggggccccgcgccgcgcccctttatgcccgcgccccgccgcgcccgcccgcccaccgccggcgcgcccacccccgctccccggcgggctccgctggcaataattacctgcgagccgggactgcctccgccctggcactgggggcgggggcaggggcgccgagggcgaggggtgcccgggaggggcgcggcagcgggcaaggtgcggcaggcgtcgcccgcggacgtcggagaaaggcacctgtttctcccagctcccgggagccgtgcaggacgtttcgtggacgctcaggttcattctctttgcctgccgcgcgtcctctgagagcagccctggagcggcttcgtcggggagaaaaggcgccgaccaactttccccgacttgggggcgggatcctgccgggccctagcggagcgcgccgctggggaagcacctgctctcacttttctcccactcggaggcccaaagaagctccggctggacattgctggagccaattagggactggccgaaatcctagagggactgccaggtgggacagccgagggggaacttcgccgtgcgctgaaagggattcccccttaggtgagatgctcgcggggagacgcgcccacccgcgcccctctttcga

SEQ ID NO: 5860 - DNA, 668 bp, Homo sapiens
cgaggttgctgcggtgggaagagggcgctgggagggaggaggacctggggcgcagccgtggtgggtgcgccctgccaagaagggcgggggcgacggggcgcgcacgcggaggaggaggaggaggagggagacgggagggcgtgtgagcgagtgagacaagaaaagggagcgcgcccgccgccgccgccgccgccgccctcctctggagagagaggctggagtgaggctgtgcgaagcgccgcatttcaatgaggacgggccgaggcacatccctgcactagtggccgcaaccgaggcgccgcgctccagcagctgctgccgcccagcccggccccgccgccgccccccagccctgcagccccgcagccccggccgcgcccagcccggcgaggacagcaccaggaggcggcccccagcgcggccacaaagacccccggcggcgtctctccgcggaccggtgcgtggtttgccttccctggggacgggagctgcggggagggcggccgggggactccgcagagcccgctccgcccgcagccgcggggcgccgagggcagggcgggcgctcagcttggccccgccgccccgcccgcagttcctcgaaaggcggccgccctgccctggccagcctggcccgacccgggggcgttgcgtgcgggcggccccgg

SEQ ID NO: 5861 - DNA, 1006 bp, Homo sapiens
cgccacagccgcagagcccccatcccgagcccgcgcctctctggtcgcgccgtgtcattctgcccacccattgggcgacctgggcacgagcaccgcgacctcccgctccgcgcagccctccagcaccgtggccccagcacacctgcagagcagccaggcgcaggaaccgaaacccgccgggtggtgggcgggaagggaaaggtagatgcccaagtgaaggcgctcatcttttttcctacgtgaacagaagttgattcttaacttcaagtgagaaatgacagggagaaaaagtatgcaatcactaccagaaaaggtgagaggccagtgttgtttcccagcgaagggacggggtgagattcaaacccatcgtccggccaggggagtccgcccccagagcaccgagaagctggggtgcgtgggcggagagagagcagggtgcgcccgacagccctgcgccaggttgtccccaaactcaacacttcctctctcccttctggagtcactttcccttccggaatatgcaagctctgggtggcccagccctgccgccagactcagtttccaagtgcgggggaaggagatgggcgctctcagccgcgatcccctgggaaggtggccactcacctgcgctctgaaatagaagaacagggcgacgctgcagacaacctggcccagccccagccccaggagggccacgaacatggagcgggaggcggcagggggctggtgcggcgcaggcggcggcggggcgtgcagggggccctcgtgcggggctccggggccgccgcccatctcctccgagccacgcaggtacttggtgtagtctctgctggcgcggcgcatggcgctcggccctctcgcttcggagctctcctccctctcccgctccctccccttcttgtctgcggccaactccggaggctgcggcggagcctcgacgtggggcgccgacttggagcccggctttgggtcctggggcgcgcgggcgagcgggcagggcgcccgg

SEQ ID NO: 5862 - DNA, 867 bp, Homo sapiens
cggaagcaaagttcgcagtgaggtgggctggaagcgggttttgcagcagccgcgagtccgggctcaggtttccaggcgcggctggagcagaagtgcagggaccgccacgatccaccgccgcggccggtcccgctccgctagaggagacttcgcacgcgcagccgactggcccgggctgaccgaggggacccagacgctgccactttctctttccaaggcagtttccgtggctctgcatgtaggaagtgctccgattaattttctttccggtctccgcagagattccaaattctgcggtccccacctttcgctgtactccctctccgcccttctttccaatgtccctgccagcaaaagcctctatttgcagcaccgggcatgttgtccgtttaacgcgctccggggatctgctggctcgtgctcccaacccaggggtggctatacgtctcgcgcctctgttcctgggtagactcccccatctgtgcattttggccccttcacttagcaaagagatgtgcgaagtgtgcgcctggagacgagccgcctcggtgacccccatccgcccgcagcggtggccctggttccccggatccgcgcccgcgccctgcgggtctcccgcgccgcccttgcccgccggaccacccgggctcagagggtcgctcgctttcagcgcctgcgagcgccgcttccgcccgggcctggggagcgccagcgcgtccctcccacgccggaccctgcagagcatgctcagtgcacctcatggaacccggctctcctggggccaggatcagatttccgggttttcgctgctgccgagggggcgcggaggaggggaggctgggagacagtcagcgccttgttccgcgc

SEQ ID NO: 5863 - DNA, 1072 bp, Homo sapiens
cgcggagaagactgcctggccccgccggccccgccaacgtgacggtcagccccgccgagcgctcgcacccgctcacactcatgatcactcgcacactcgctccaatacgtgttaaggcgcgatcgcggggtccctggcagccttcgctgcaccctcccccccacaggggtactcacagttgccatctgcatagggggcaactttctccgacccagctgtggccgccgccccctccagcctcctctggctcctcgcaccctccggcctgggttcgcgccggccggccctcccctcccccctcggctctcctcctcgccgtcttcaccacattcccccctggtcagtggcgcacgccgggggacgagccagagggagcgggtcgcgggggtgtgcatgcatctcccgccttcttcttgcagcgcacactgtacatggtagtgagggggcgagcaaaggtggcaccggcccctcggctgctccagcgaaggcggcggctgcagctcctgcgctgtcctccgccccccagcgcagcggcgaccaccgcgctgggatcccgccgacgctgtctccgcgccgagcccgccgccgccgcggcccctaattagtatttgagaggctcttgcatccctttggcagtttcatcctcacggtgtttgcagggtttttttctgtatcccttccccagatgcggcgcacaatcgtcattagttggaactctctatcaccgacatcctttggggtttctgggggaaggggggggcgggcagcaaccgcgtcgttctatgcctgtggcttgtcctggcagcccggtggctctaaaaaaaactccgagaaagttgcgtcttcctcccgggcgccgaggaggtggcaacgcggtaagcaacaccgggtctctgagacagctgctccggagcgggtgcagggcccagtccagtgcacttgtttattgtcgcgcctctggtgcgagccaagctgcagcagacatgatgggcccggggcgaagcgggcgctcggtggccgatagatggcagccgagggcgaaggcgtccctgggctagggcggcgcaaccgg

SEQ ID NO: 5864 - DNA, 1633 bp, Homo sapiens
cgacacgtttcattcacagagccccagagaagctcggattcggttggagctaagagccggaaaacaagcacccagactgccgcgcaagttgtcggagaccaagtgctacacacactggcgccgagagaaagggtgggcgctctcaagctcttggtggagcaatgccagtggccgggcatgcgggggacacggggcccccgaacccggacccgaatccccagctgagccacccgctaaagttggctgttcgctggcagacgaggccggctccagaccgggtggcagggtgtccccgggccctgagtggccaacagcaactggggaagcactgaggaaccctaacgggaaagcccgccccacatctgaaacaggcagcccgtgaagtccccaaaccagccttgaaacgccggcgtccagaggccaggtccccggcgagggtccctcccagccttgcccgcccccggcccgagcgccgggcgctctgtcgcccgaaggacggataggggagagaggggctgggggagccctccgcgtctctccaccgcccctgccggcgcaagggcgggagtggagaaggcgccactcagactgtggcgctgggcaaactgcggtcgcagttcttccaagtttgcccgaaccagaacgcggagtgagcgcccggctcggctctccgtctgcgccttgcagccgccccggagtgacccgggctccctggccagccgggcctgagccatcaactaaggggtagaagggcgcgagagcagcgggaggcgggagccagggtgctcccgcgtgtgcacacaatgaggcggcggagacgcacaccttcccccgccgaagaagccgcaggagcatccgccgcccaacacggagacgcggagtcccatagcggtggcagaaagtgagcaccaactcagcaacagggggaaggaaggggacgccgggcggccagtgggacgtgcggcagccgagggctgcagcctgcccctgcagcgcgcccgcgcttacctgcgatctcctggtaggggatgtccgccaggctgaatcccttggcaccgtacgcctggcggacctctccgcagctccgagccttcacatccgccccggcggggagggagagcagcagccccaagaggggaagaatcacagccccgatccaagaaggcatggtgcaacatacaaatccagctcggtaaaccccacggccggtgcgctcttcaccttgcccctcaagccgaaagcccgccagaggcagcggcgcgctcctcgccgctgcccagcgtcacccccttctgccagccgaggggacgagcagcgcagccctctggactgcgctcagcaaacttttataagccagatggacgatggcaagccaacaagggctggctgggaaggctgctgccttgctcctctagcccccagatggaaacggtgcaatcaaaacgaggaagagaaggaaaagaagtgtttaaaaaaccaccatgggggttcagagctgcaatccgagttccgagccgcagaatcctggagcgctgcgggctcggctcgccggagtgtgcggcaaaggtgggagcgcgcgccggctcccccgggagggagatggacaagcgagagcgagtgtgtatgcgcgcgt

SEQ ID NO: 5865 - DNA, 1143 bp, Homo sapiens
cggtaccgtgcacagtctgacctcacgctcgcacgctgggctcccggcctcctggcagtgcacttaagtgtaccccgcgtgtgcccggcggactcccgtgcacaccgccgccgtgctgttgagtacgaaagacccccgagaggagctcgcagatgagagcctagctgttgctgtgagactgactgcgggtggcagccggcaagaaggaactgccagtaccgaccctggcgctccccaccaactgcggcgcagcctcctctgcggtgcccgcccttcggcatcactgcagtccctgtagcaaagctaactttaaaaatttaaataaaataataattttttaaaggcccgaaaactccggctcccacccctcccccagcctgcccggcggcggcggcgctcagtgagtgacacggcgagcgtgagccgcggccccagccgggccgagcgcgctgcctgagctgagccgccgtaggtgaggggcccgcgtccccgcccgccctgggcgccgcgcctggcactgatcctgccggtcgcccactgtcgccgccgccgccgcccgcgggcaccatgacagctctgagcgctggggttacaggttggtcaccgccgccggtgcccgggaggctgcggcgcggccggctccgtgccctgcgcccgaggcccgcgatgcgcgctcgttagttccttggccggtccgggccaggacggctcaggggcgctggggctgcgagaggggctgctagaggggctgcgggcgggggccccgcgcgggggaggggtggggaggggcgcctccacccgagagcggggcggtggggtccttgccggcctggccggggcgcgggagccgcgatgcgccctccctattcctgcgcgtgggtgtcgggggcgcctgccgcgggatgcccctgggctggcttgggaagcccagggccggcgacacctcgggcctgccccgcctgggcatctagcaggtgttggggggcaggtggctgaggacgaggccactgggcatcactacagcgctgcacctgccccctcggcaccagggccgctgcctgggtaaacctctgggccaacgcgcgggtggggaggtgggggtgggcagcctggctccagcaggtctccgcgggggctccgcgg

SEQ ID NO: 5866 - DNA, 1143 bp, Homo sapiens; identical to SEQ ID NO: 5865

SEQ ID NO: 5867 - DNA, 1371 bp, Homo sapiens
cgtctctcctacggcgcccgcctagcccggtggtcccaaccccctgcgggagctgcacacgccccggaaacctgggacagaaactgagtccctctccttcctggtggtggtgacagcacctgctcagatctggtcggacgccgccggccggagcacccagcccggcggagaaggagctcgcccggcgctggggactgggacctggagccccttcccctaccgcacgtacgccccgccccgcgcacgcccgcccgcccgcccgcgcctggcgcagcttcactccggatggttcctgtcctcccgcgggtccgagggcgctggaaacccagcggcggcgaagcggagaggagccccgcgcgtctccgcccgcacggctccaggtctggggtctgcgctggagccgcgcggggagaggccgtctctgcgaccgccgcgcccgctcccgaccgtccgggtccgcggccagcccggccaccagccatgggctctggcccgctctcgctgcccctggcgctgtcgccgccgcggctgctgctgctgctgctgctgtctctgctgccaggtacgcgcacaggcgttagggctccggagggacgggcgcccgagaaggggcgcggggtccggaggggctgccggcgagaacaccgcgcgggcgagcggagagggctggcgccgtcgccggggactcggaacccgcgcagactggctccagcccggcggcgacttgggtggggtggctttttccctttcggctcacctcccacccctagccaccaccaaacctgggagtcactgagcgggcgctggtacgcgccgggtgatggggaggtcgagaccgggtccttcgtcttgggcgcaggagttggggattcgcgtccccgcgctgcccgtcgccctgccccgcgcactggctcccaaactggcgcgcccaagcctcccgctccaccgtctgcatcccgcccacctcctcatttgacggagatggctgaagacttggccaaggccacctcgggaagaggggagtcgcttcgggactggggctggagctggagcgccagcctctcctccggttgtagcctcctagcgctcctggctgcgtcgctgagggaccctccaccgggagagcgcctcctgtcttcctcccgctctccagaggagcctgctgggggaagccggccctggcccgccgctgggaggctcttgggtgcctgggagggctggtgggtagcgagagtcggggaccgggcaaggctgcagggaattcctggagggcccaggccggcggtctgtcgtgcggctgtgagctcagagcgctttccgccctcggtgccgaggcctgcactactcagaacgccatacgctctcaaccga

SEQ ID NO: 5868 - DNA, 1545 bp, Homo sapiens
cgcgctgtgagagttaggctactcaaatgttacgctccccgcaccgccggcgaggggacaaatgactactctgatggattcggtagcccaaggaaattatcgctttcggagggatggcggcagagcaggtcgggcatgctgcatttgcctgagttggaccgcgtgtgagcgagcttacgctccccgcgggccaggcccagctcccgtgctttctgacaggtgaagttgagcatccttatcaaaccctcgggaagaacaacgatcccattccacatcaacgtgactggaaatctcaatttaagaattggatgcaccggtcggtccacctggggcttgtccagctttccatcttacttcgcgcctctgatgtgtcaggctttttgcacagatagctcacatatttaaccctcaaaacaccgtttcctgaagcgatgctcaaccaggaaaacttgccccaaactgcatgatcatcttccgtggcttctcttcccgaatccctgctctgtccaccaggtgcggccccgccccgcatccgcacacaccttttccgccgctgccctgagcgcagcgacaagggcccccacacctccgcggcccgcaatgctccggggccaagccgaggcagggaggcgctcccgcagctcctgactttacaacccgcgcgcgtgtgcaccgagccgcgggcacaccgcgaacacacacacacacacacacactcgtgcgctcccgccctccgcccggcccgggctctccgaacttacctccgaggcgccccgggcgcagggcccgcccttctctgcgggtctccagcggctgttcggcagtggtccgcacggcctccgatgccgcgcctccggtaggctccagagtcagctggtcactgtcacccggcagcccggattccgcgcccagggttgcaccccgcggatggagcgactttcgcctccgccgcccgagtccaggtctgcgctcacacgcgcggcgctcacacgcgcggcgcccacctggctgcagtcccggccagggccagcgcgccgcggctgaagggggcgctcggactcctctggggcggcgcgcagccgggacagtctcgcatgacgcccgcgctccagcggccccgggacgcggcctcaccctcaacccctggcggtctcagcctcggtctttgtgtctcggtcggcgtcgccacgtcatgggcttgcaggctgggagcagcgcgggccgggaacgcggctggggagagctgggctgggcttctccaccgccgcccgcccggggcgctcaagctggcggggcgcacgggcagcaactgagcgcaccctgggggaccgagggggcggtcccggggaggggcgcggcgtcgcgccaagggggtgccctgccagaggctgcggcggaggaaagtgggagtcagagcgccgccggagccccgggaaggcggtgtccgttcggtcccaggtcgcggctgcagcgccgaggggaaagcgagcggaagctgcgcgctggagggagcccaccacccggagccacccgcggggttcgcgt

SEQ ID NO: 5869 - DNA, 1545 bp, Homo sapiens; identical to SEQ ID NO: 5868

SEQ ID NO: 5870 - DNA, 1027 bp, Homo sapiens
cggtgcgtgtataggggcgctccgggaggggtggtgaccggcagccggccttccacccttcgcgttcaccctctcgtctttgttctttccccagctggtggcgggcagtgtggtgatggcctttgaggaggtctgcccggagcgcatcgacctgattcacaaaaactaccggaaactctgtaacctgctgatcgacgtggaggagtggggccaggtggtcatcatcagcatgctcacccgctacgcccgcacgcagttcctgagccccacccagaacgtaagtgggcccagcccaggcagagcgggccgaagtgtgtcccggggaggcgcccacagacccgtcggtctccccgtccaggaatccctactagaggagaacgcggaaaaagccttctacggctcagaggaggacgaggccaagggcgcggggtctgaggagacggccgccgcggccgccccctcccgaaagccctatgtcatggaccccgaccaccggctgctgctgcgcaacaccaaacccctgctgcagagccgcagcgccgcggtggtgatggcggtggcgcagctctacttccacctggcgcccaaggcggaagtgggcgtcatcgccaaggcgctggtgcgcctgctgcgcagccacaggtgcgctccgcccccagccccgccccctccctcgcctcctgccccgccccacgggctgcccggctccgccccctcacgcccaccagccgcttccacctctgcccacccgctccacactgaccgtagtcctgccctccgcactggtcctctccccgcaacgacttgccccaccttttcccctcatccgctgacccttgccccaaccgaggggcccggggtgctctgacccgtcctctccgcagtgaggtgcagtacgttgtgctccagaacgtggccaccatgtccatcaagcgccgggtgagcctgcgacggcgggctgtcctcgctgtccgagggccgcttctgcgggcactggaggcgttgtcggggctgggaccggggccgg

SEQ ID NO: 5871 - DNA, 693 bp, Homo sapiens
cggattcgttctatttgaggatcccgggtctacacaggcgaccgcctcggccccagactggaagcgacactccagggaccaaagcttccagcccgcgctcggccccagcccctgtttccgcctcagagccgcagcgagcagggtcctgcggcaccgcccagagactggcctaggaggttccagcccccagcgccagcacacactcaccggctgcagcagccccaccagccctgctccttctcccgggtcccggccacaccaagagcttcggaaacgccgagaactctgcgggtccagaacgcccgcgcggacgcttctcttacggcgccggaagccggcgccgagtctgtcaccgggcatccctctgttgccttgacgacggcgggcgctgtaagagtggagaagctgcaggtgctgaggcgcggtgaaagaaaccctgggagccaagagcacgaggagctggtgtctgtgtcacatttgtacttgcgggtaagaaaccgctggtgtagcggcgggccagggcttgggagccgacctagggcctaggtgcacggagcgggctcctcgggaaccctgagagtggccgtcccccggagatgaagggacgagggcgcagcgacttccgcacttatcccgccccacgaatactcgctccgcacccgccggctacccggggataaaacgtttgttcgt

SEQ ID NO: 5872 - DNA, 1496 bp, Homo sapiens
cgcccccgaatccggagaaagcagcccgcccgccccctcacccggcagccagctcagctcacccgagagctgagcccgagaagccggcctctgacggtgctggcgtggcgcttgccaaaatatgccccttgcatctcaatttcccccggccatttctcttgcacgcacagctcgcccggggccacctcggctctccagcgcagccctttcgacccctgtttcttccttccccgatccatgcctgctcaaggccgaatgcaaaacccacctccaagaaagcgcagcgggcacggggggcacctagcgtgccatgtcccgcagtcccctcccagccaagaccagagccccagactctagattacggaaatgagtgtcattcagaccaaggactgcgcgtctgcggtcccggtccccggctctgggtgcttctctggggtgtctgtgcgctccggcaccccccgtcgccgtccgtgagcctgcgccccccacccacccaggcttgggagcgccccccacccaaggcttgggagcactccccaatcacctccgccacgttcatttcacttcctaccgcggtccggattgcagcaaaaccgggtagcgcgagggccaaaaagtggaaaggagagcgcctttccgtgtcgtgcagccagctcgccaactctccctccccagccccgaccctcgcaatctcaaatgcaactttttcccttcggtctcggtttcccccgggctgcggctagcgggcgccgcgctgcgaggcgtggagcgggcgggctgccgcgaggctgcgggtggcggtgccggctacagccgcgagccggcgagtgggtgggtgggtgggtggggaggagggagaggacaggcggggagagagacgggtgtggggaggggagggagggggagattccgctctcctgccgctcccagcccgggcggggggcggggggaggaggccgcgacgagggaggggaggagggagggaggaagggagggagggagccgaggaagacgctccgataacccgtgcgtttcgtaaggctcggagcacttgtacatttctgcagccgcgcggcgagccattcgcggcggctgctgcagctcctactgcatcttccttctcttcctttcctcgggctccgggtgtgtgtatgtgtgagagtgagtgtgtgtgttttgcaggtgcgtggtgtgtccgttttaattctgcccagtaggtgggacttggtgactttagcaccattttttccttttccttttttttttttgcctccccaccgtctgttgcaaccctgcaaagtctcggagtcggagagcgcgcctcgcttccagagcccccggacccggcgagtcagcgatcgccgagccggccaccatgcccggcagaccgcgccactaggcgctcctcgcggctcccacccggcggcggcggcggcggcggcggcgtccgcgatggtttcagacgctgaaggattttgcatctgatcgctcggcgt

SEQ ID NO: 5873 - DNA, 5820 bp, Homo sapiens; identical to SEQ ID NO: 5626

SEQ ID NO: 5874 - DNA, 699 bp, Homo sapiens
cgccgcggcctccaaaggccgctgctgtgggtgcgcatacccgggttggagaaatcccggcggttctgcaccgcgcggcctcgcctgggccctggagggcgcatccgtcccgcctgggctgtcccgcggctcatggccaagcgctccttgcccagcccggaaccgggcgcccgagccagcgaacaggccggctcgccccagctggccgagcccgacccgccgcgcgctcgggccaggcgagcgcggcgcggcggattagccctgagcccgcagcctcgagggcgcggggcgggcgcgtttggggtatgagggcggggcgggcggcggccgcgcctctaatcccggcgctgcgtgtgggagcggccggatcagggaattagcgctgtaacttcggattagtaacgctcgctaaatgagtgcctaattccgacccttcatgcttttcagcgtcgcggctgagtcctaggaggcctcctggccaggctccctccgcgctctggtcccatttcccgggaggtccggccgcggccggcagagaactctccggcctgtggagatccggcctcaggccgcgccgcagcctcctctcggcagcgcatttcattggcccgggcagaggcccatgcagtcccacagcgttcggagttgggagttcgtggaccagagaaaaggaagccccggatgcctcgcccaccacgg

SEQ ID NO: 5875 - DNA, 1845 bp, Homo sapiens
cgcacgcggcgcgggactcgagaagagcgcctggcagagcacaaatcccacagaagaagagaccttctgccctctttgagacctcaccttccccttgcccagggccaggaagctctcctcgggcctcctcagaaccccggctgcctccccacctgtcgtctaccgccctttggaggttccggagaggggcccggcccggcgagccgaaggctgcggggcggggcgcgagtctcagcccctgggacacacagccggtgcgtcccgcgcctcaagtgcgcactccaggaagtccggagccgggaggatccgggctcgcggtcccaccctacctctggcgaggtcgggagaaaaaaagcgccagatcgcccgcctgagggcccagaagcccaccgggcggcggtacagactttcccgaaatgtctccgtctccgcgctgcgagcgcacaggaacccagggtcgccggggttgccgtggcttggctgaacgtccaaagccaggcgagggcggggggtctcagtccagctatgcgagcccttctctagtggtgccagctcctacgccgggctcccgggccggcgggaggcgcgtgtgcctgtctgtgtgtgcaggggacattccgcttcccagtagcccatgcagaaccccgccctccgctccggccccaggaacccctcccccagctcagagatccctgcgcgccccctgcccactttgccaaggcgagaaagcggccgtgctggagacaaagaaactcctgcctccctccactctcggcccctccgcccgcccgagacactccccggcgccctccctcgaccccggcgacactgcgcttggacacgccaggcaggggggcagggtgggcgagtccgcttcccgacgcgggccagctgggggcttcccgtgaaccccgcccggggacaccccacagcagccgcgcccccaccctcctctccccaaaccgtcccgggcccctgtcgccgccaccttctgccaaaccgtccccatctctccagcggagctacagcggggcgcggcgcacacaaagggggtcggagggtggagagtacagaaggagggagagatcccgccagggctcgtggcacgggcctgggagcagctatttacccgatttcttcttcgatctctgagatgtctgcgaagatgaggaagaccacgagcagcgtgagcgcggccagcatccagctccggaactgcagctgcatggtgggttcgcgcccgccgggacccacgcgggccggcgcgaggagcaggggccggagggcgcagcggcggacgccggagcctccgcgcgccgcgcgcagctgggcagacaccctgcgctccggacgagtccgggccggcggcggcagcggcagcggcagcggcagcgacaggcaggggttgctcaggcgcggcgagcccgctcgctccctcccggctcccgcctgcccctccctccctcctctcccttcccccgccccgcgcccggctccgcgcgcagtttgacagctttgctccgcgcctctgctcgcctcctcccaccaactccagcgtccaggcgctagcctttgcttctcccgcctggctttattcagctcccgagggcgcggggatgcagccggacgccactcctggcctagagagactgggctctggccaccgcgagcgaccgggtacggagctgagcccagggaagtgcgcgcaccgcccggcgcacccctcaggctggcaaacgccctccctcgcccgctctttgtccagctccctcgcctcctcgcaaagttttctcgacacaaagaccaacacctggggacagcccccagcgcgcggcgagaaggcgg

SEQ ID NO: 5876 - DNA, 1844 bp, Homo sapiens
cgatcagagacccggcgcacggagcggagctcctggtccttacctgtaccaatccagcccgcggccgtagttcctgtcaaagaagtggggttccgtgcccaaggcccgcacgtccgggtgtactcggataaactccagcacggcccgggtgccccccttcttcacgcccacaatgagggcttggggcaaccgcttggtacccagcttgggtgagccggagtggttggaaccggagaggcgaggggcgggcacggcggcggcgggcgcgctgggagcgctgggctcgctgggcgtcggcccggagggatcacaggggcgggacttctggagaagtttctggccgcccgcgctggggccgcggaggcagcgaggcgcgccgaggaggcggctccgacccaggtcgtcgcagcagcacaggaagctgtaacacaggtaagtgcaggagagcgagagcgtgaaggcgaagagcagcctgcgcgccctccgcggctgaggtggccccgcgcggcccaggaccctataggccatggctccatgggcccgcgccgggggtcatggtttccgagggggcaccggcggctgagctgctgtggccctgcggtcgcctagagggctcgcgtggcgctgccacggccacgcgggtcgggcgttgggggcgccgtcttctccgggggctgctgaccagggtgcgcacagtgccagggggtcccgggggcagcggctcctcggggaacaggcggttgcatttccagcatctcccggtcctaggcgatggggctccgggcagccgggcggctcgggcgctcccaggctcttacgtgcgccgggttcggagcgcgcccagcgcccgaagccccattcctgatcctcggagcgccgctcacgaaacgctcggcggcggcgcggctgtgcgggctggcgggtggaccggacggtggcgctggcgccggccgcgatctggctcttcgggaaatgccgagcggagcgcgctgccggctctatttaaggagtggcctgacgtcagccgcgcgggtcccccgagcccgcgccgcgcccagggacctggcccgccccctgcgcccccactctcttacccctcccagaaacacagcacgcgggccctccccatgcaggccactccctacggagccccaggccagctttggggcggtgaaacgaaggtgtcaaggcatagtactcctccgggaggctggacacccccaccacgctggcctctcgacatccagggacacgaatccaggtcgagatcgcgccgacatgcagaccagacagacccagacgcagacgcaggcaccctgccctgatgcgcggtcccaccaccctgacccgcacacgcacgcacaggcacagaagcacacgcgccctagcccggacacacccccacacccacgcgggggtggggaggagaagtcccctaacctgggcccagatacaccgacaaggacactccccccgctctcgacatctcgccaaatggacacacacagcccggaatcggacaccgagcgcacgcacgccctggactgggacacgcgctgtagacgggatgggtggaggagccgagcgtgagtgagattccgtgactattcacccagcttcttagcccccagcgcgctgactcacaccccggcggctcgctctgtctcgcacctatgaggcacgcgcgcaccccaacccattgtcaccccacctctccccgggcctgccggagagcgagccccggagcggcagactccgcgtcaggagggttcctctcttagcagccgccgcctagcggtagactgctccccggggagctgtccagggtaccagagggtcgccga

SEQ ID NO: 5877 - DNA, 1480 bp, Homo sapiens
cgctcccggcgggttttgttgccccacgtccgccgtggggatcttttctcaggagcgccttgcctgggattctccttgcgtctcagaccctcaccctggctcggatttctttcgggggcgtccctccactcccaggcccccgcccgcgcccggcgtggcggccccctctccccgtgcgggcgggctccggaacagtgtcgccggccgcctgcaggtgtctccccacggaggggcgcgcgtccctgcgccgtggccgctgccaggcgccagcggctcctagccgaggtgcactcgcgctccgggctccgggcgcgccgtagccgctcctccaccgccgcccgccccgccagcccgccccgcacgccccccgcgccgcgcccccaccccggggttggggggggcatgggcccgcgccgcgtccgccgccgccgatctcaggcacccgagccccggggcgcggcgggcagcggccgctgacgcggggcgccagctgccaacttcgcgcgcggagctccccggcggtgcagtcccgtcccggcggcgcgggcggcatgaagactagccgccgcggccgagcgctcctggccgtggccctgaacctgctggcgctgctgttcgccaccaccgctttcctcaccacgcactggtgccagggcacgcagcgggtccccaagccgggctgcggccagggcgggcgcgccaactgccccaactcgggcgccaacgccacggccaacggcaccgccgcccccgccgccgccgccgccgccgccaccgcctcggggaacggcccccctggcggcgcgctctacagctgggagaccggcgacgaccgcttcctcttcaggaatttccacaccggcatctggtactcgtgcgaggaggagctcagcgggcttggtgagtgcgcgcgggcggcggccagctcggctccggctcccccggggcggcgcggccatcgaggcccgagccccggacccgttcgccctcctcccgccgcctgggcccagctcccagcgctccgcctggctaggggcgacgttccggggcagggggcgcgcgccgttccggggccggggaccagcatggggggacgtgcgggacgccccgccgtggagaggtgcaaggcagagctcctacccgctgcggacgccccgcggctttggggacgctcccgcgccccgggaaggcgcccacccccgctgccggtcggaggggcgcgcgctgctttccgctcctgaactcatctccacgctcgccccctcctcctcttcctttcgcggggcactagatgcccccacccaccccggaacgcccctgggggtgggggtgatgcagggactcctgctaccagccgcccctcctgccgcagatccacagacccgggagccttccacccccatcgccaacccacgccgaacctcccagacgggagtggggagtgggggagtcccgcgggctcccggaaagccgcacccgc

SEQ ID NO: 5878 - DNA, 5065 bp, Homo sapiens
cgccaagcgcctcccccgggtgcggttcctctccgccagtgaggtcgcgaccccggcgcagctgccgcctcacttcgggctatccccattcgctattgcggatcagcccctaagtaccaggccctctggcggaacctgcaagtccaaacttcgctacccggattccccagtagtcccccccccaccccacctccacccagagttaggagggtgctaccgcacgtagagcgcgcaggtctctggggtgagcagggcgcgtggagggactccaggagtggcacctcactcccgctcgccgcctactttcgacccgcacaaaaataaagaataacccccactctgcttctgtttttattgatgtatttctttgcatcgcggcacgcggagcctcgccagcgccctgacactgcagcgcccgcaccagcgaaccacggaacttgggaccgagacaatggcccgtaattgatgtattgccatcaacaataaagaccaattctcctctccccgccattccgaccatccccctcctcccatccccccctcctccacctcccatctcctttcccggggccaccgagggaaagaaaacaaacaagaaattagcgggggacgccaagcgcagatcgaaacgcccgcctctacgccgtcgaggacgcaaaaaaacgaaaaaagttattaaagtttggatcccccaatttattcgtctctgctcgcccatttttaattaagcatcgcgtagctgcttttcgcatgttcatttcgtttggttgtttgttgtggtgtttttttggggggggggaatttttttttttcctacacttaatcttaaatcacacgtagaccaagtaacaaacacgtgtgaagttattcccgggagcttcctgctgcgcacgcggcgcgcaccaggagaaaagctttgcgggaccgccagctccgctaggttcctggctgcatgcggtgcccgggaggcccggactttcaagaagccaagattgttagagaaggatgcgggcggctccaaacacgggcacattccgggaaaggagtgtgcaagtgcacacaaacgcgttcgtgtacctgggacagtgtggattggtgggtgtgcgaggacccctgtttgtgagatggaggcgggtgcgggatttacacgtgctcccgtacacgttccccggggtctgggagatgcgagccgctcacaccccaggagtgcgcagatccatctttgccgagggatctctttaaatattcagtgagaaataatggcatttgaagcaccacctatggaaacattattatcttcattcttcaacatcagccccactgatagcttcgtttgtctttttatcaaaatctactgtacccatcaggacctggcgagaacgggagagcgaggcggagagggtgtgaatgtgtgtgttagggagtgagcgagggcagaagataagtaagagaaaaggtggaaaacggacgagcagggagagagaagggagaagttataccaataaaaaaaaataaagtcagcagatgaaaaacagaaacattcatcggcacacacacacatttacaccttaaaagaaaagatttaagaagctaagagaaagggaagggtcctctaccggagcgcagtacaggtccggagtacacgaagtcggctcgggagaccggtgcccacttcgcgcgaaccgaccgtggcaccggccagactcaagggcgctcgcgaattggggcgtccttatgagccctctcctttcctgatcgtgagatagggcagggattgtgtatctgcacccccctcctcccccattactcagccgaagtttagtttagtttagtccttcgggcgcaagacttcgagaaccttggagcgaggagaccccgaggcgcgaggggaaagagctaggctgagccgcgtaccgagtctcaggttcgcgggcgcctgagcccggcagagggatcgggctcctggctctgggctctggggcgagggtagggaggttgcatctcagcttgagggagatggtgatagagcgaaaagttcgggcgccgcgctcggcaagtgcccaaaaagtggaggcgagcttcggcgccgccaggcagcctcggacagaacacctccccaccgccctccccccaccccgctttccggctctgcgccgccacctcgtcccggaaggctggggcgcggccccctccccagggcggggtgcccaggggtcccagggactggcccagtccagtgccgggtccgcccgggctgtgtctccctaggccggtgctcgctgctgcgctcagtgtgagccgcagcccctcccctccccccggccggagctgaactcggagcccaggccggtccccgctctccgcccgcccggggctctgcggcgccaccgctgccgccgcctccccgcggagtgacgcgccctgcagccaaccggggcagccgggggggaggtccgggaggggtcctgggcggagccgggccgcccccttatcccacgggctcggggctgcttctcccgaaaacttcagccctaattgtcctgggaatgtccgaggtagagaaagggagcgagggagcaagcaagaagctggaggatcagtgcccctggcggggaggggatggggtggcgggagaactgcccctccccccagccacaaacccatcaggttcccaaacctttcctggatcctcttctccgcgcccccgcgagcccgggatccaggggatggagaactcggggcggaggagcgccgagccaggcgggagggaggccgagccgtgggcgggaggcggaccggcgtggggctggctcttccccactcgcttatttttttttttaatgggggtgggggtgggctgctttctggtagctcttaaagaaacgaagaaacactcacgaaacgggacgccctcccccctgatcccgccgcgggactccctccccccgcgggccggcgcgcctcgcccccgagttgggaagttcgcagcgcgccggcagcccgggtccccagccctcgccgcccggccccaccccccacccggggcggctcaattccggggagggcatgctaatttgggtcggcccagcccgggattgtgggggggggcgaaggagggagggaagagggaggggagagggagagagcggggggcgcctgccggggcgccgggcccgcagtggagaggaggccggcccccggcggccgggccgcggagtcccgggcggtcgcaaagagggttaacccagtgtcgggcggcgcggcgcgcagagccagccccgcggccggcttattgggccagcgcgcggagagacaggggtctgcagcaaatcacgaactaattgattaaggcgagcgggtttgaatagcgctggcccggtgccaatcgcctttcaaagagcccctctatgattaatcgcaatgcattattgataatcataattatagcaggacacatgcgcgctgcgcccggggccggggagccggggagggggcgggcgggccggcgggcggggggagccgccgccgccgccgccgctcgatttccgtaattttgagaagatttttttttagtaattttttattctgccccagctgatgtttgagccagcatgtcgcggaggaagcaagcgaagcctcaacatttccaatccgaccccgaagtggcctcgctcccccggcgagatggtgagtgctccggcccgcgccgtggacacacacacacgcactcacactcacgcacactcggacccactcacacgcggctggcccccgcgccccctacctcaccgccgccgcggccccgattgcttcttccactcggcgtaattttttttttctttttaattttcaatgtgcctttgctgggctttcccccgctgccccggggaaagcgagcacatctcccggcaggatctttccggagttgttgggtcctcccgggggaaggagggcgggcatgccggcctggcttctccgtccctgcttttccggggatcccagccgcggccaagacccgggagccccatgaggcgtgggtgcgggtggaggtcgccccggcctgaccgcacggggcccctagcgctcccggcgccggccccagggcacccggcccggcctccgccgcccggccttgctgccagcggtaaggaagtttacttcgggcgctgggctgaactccgagcgtgggggagttcgctgcgcccccctgcccccacgcacactccccctcggcctgcgaggcagaaccgggtgtctttggaggttcagagctgcaagaagatggggactggtgtcggggcgccagcgcctgacccgctggggttgcggccggggtggagagtgctgctggccgccagttgttccggagacggtgcaaacggacggggaaagtgtcggggtctggctcgcaaaatttatctccgcatctcttcccacaacacttgcaccctctgccccccaaaatctttctggtcggtatgcgccctctgcggatcgtggtgctccctacttccaggggggtcagggaagaagtcatagaatagttttccaggtttgcgggtggccagccagagtggaatcccccctgaaacaggggcacttgttttctccgatggaggcgacaactgtgggtcccgaaggggctgaacaagtccagaacaaagtttgtgtgtgggggctatggcagagagtggaagagatccgggcagggagttggggtacaaagggaggacacctggaatccctccttgctcctaaaggtgtttcacggtaccggcctcaaagctcccaggcctagcgcccgaggcggtgtagcggcgcccggactcgggtccccgggtcgtcccggcacgatgctggcctctcggctgtgggaggacgcacaaggagcaatctcggcggggtctcagcggctccggatgccactcgggatgcccacgccctaggcggcattttggggtgtgaaggagggagctgggccccgacagagctccgaagcgtgaccctgatcggcacctcagcccactaagctgcggccgcccgggcccccaggtccccggctcgt

SEQ ID NO: 5879 - DNA, 2372 bp, Homo sapiens
cgagggacgcaggatgaaagaagccaagagtgtcgccagggcttgcgccagcgccgtcagactcccgggatgggggagctccagggcacggcgtcagcggattcacggagaaggagaaaagccccactgccgtgcagaagcctaggcccgggtgagacgcctgcgaaggctgccagcagcggaagagaaggggcgtcctccgtgctgcgcagcactcgcccgcggtaggtgggcgcggagctcagagctgggagccaaacgcaaacgctggcgagaagccccagccccctccggcagcccactcgctgcggggaggggtttctcacgcccccagctcctgggagactgcaccggaggtcggaagtaagccgggcgaggatgaatcatcccgcctaactcctccttcccggtcccctagcctccgcacgccggcccccttcagagatcttgcagccgcgagcgaagactgccctatcctcagactctaccgaaccccctgtggcctgcggagacgaggagacggacgggtctggtggccaatgagagcttcgatctcttgccccccgcccaatgggccgctgctcatgggccggggcgggactaggagggcaggtaggggcggtccgggctggcgcgcggcgcggcggctacgcggctgcggctcacagagctagcgcctctctgggtgtccgtgccagtgctgcgcgggaaggcaccaccaccacagccgccgccgctggccagggtgctggacaagacgggcccgtcggccacctcgccagctcaggcacccgctgcagccgtcgctgtctcctcccagaccggtccccatggaggagatggaagaggagttgaaatgccccgtgtgcggctccttctatcgggagcccatcatcctgccctgctctcacaatttgtgtcaggcgtgcgcccgcaacatcctggtgcagaccccagagtctgaatccccccagagccatcgggccgcgggctccggggtctccgactatgactatctggacctggacaagatgagcctatacagcgaggcggacagcggctatggctcctacggggggttcgccagcgcccccactaccccgtgccagaagtcccccaacggcgtccgcgtgtttcccccggctatgccgccaccggccacccacttgtcaccggccctggccccggtgccccgcaactcctgtatcacctgcccccagtgtcaccgcagcctcatcctggatgaccgggggctccgcggcttccccaagaatcgcgtactggaaggggtaattgaccgctaccagcagagcaaagccgcggccctcaagtgccagctctgcgagaaggcgcccaaggaagccaccgtcatgtgcgaacagtgcgatgtcttctactgcgatccgtgccgcctgcgctgccacccgccccgggggcccctagccaagcaccgcctggtgcccccggcccagggtcgtgtgagccggaggctgagcccacgcaaggtctccacctgcacagaccacgagctggagaaccacagcatgtactgcgtgcaatgcaagatgcccgtgtgctaccagtgcttggaggagggcaaacactccagccacgaagtcaaggctctgggggccatgtggaaactacataaggtgagtcctaagaaaacccactcctaactccctgcgtctccgatcatccggttttgcagcagacggtccccgtctcttgcgcacagcgcatcccagtgggggcgcaatgcaggtgccttcgatgtttacctccctggtctggtgcattgcaggaggcatgggggaatcttaaccggcgcacgggggagttgaatgcccccacagagttgttgcggggatgccttagagcgggtctctcggggcgcgctgcctgcgagcgggactcagggcgccccctttccgcggcgggtctgcagccagtggccgcggccagtgtgtgggaaagcactgcatagctgggtagagccgcgccagtgcccagggccgctaggcacgctcgagggcagggcgggctgcgaaccctcggggagggactgggatgggggcggtggggtcgcgcggacggcgggagtctgtcgctgctggataggcggacctggtgaggcacggcggagggtcggggagacgccgcaggcggaatactgatgagcccggctctgggccagacctggctctcgagctggagagaacgcggggtcctggtgccacgtgctcaaaagacagagcggagagggcagccagcggtcgccatggcaacgcgacgtgcaggcttgggcctgaacccttccggagttgggacctgagactagagtgtcaggaccggagtttgcgcagtcgcgg

SEQ ID NO: 5880 - DNA, 2372 bp, Homo sapiens; identical to SEQ ID NO: 5879

SEQ ID NO: 5881 - DNA, 2372 bp, Homo sapiens; identical to SEQ ID NO: 5879

SEQ ID NO: 5882 - DNA, 2142 bp, Homo sapiens
cgcagctggtttcgaggttgtgcggtttccagtcctgcggagcagctcaggttaccgcctccgtggccgcgggggagggcatctccgacggccgcagcaatgggcaagagatcagggtcttcccatccccgcgactcgcccctttctgcctggtaaccaagcgggatgcctcatcctactccccaaacggagcggatcacacacagtagtatttcatggtctttcctgctgcggttttcccgggggaaggtacttccagagggtggccaagtcttccctagcggccggccttcgggagggggacagaacttaggagtcagccctctgccttcgtacaaaggctcgcttctcctcagggcgtctctgggtggagcgaagcggccgaggggaccacgacaatgtccctttgcttttcggaccgatggccaggcctccagagccaggagcgcccgggaccccagggcagggagcaaagctcataccgcaaccccgccacccgcccgcgccctgccagcctgttggggccacagcgcgcaggccagcagccgcactcgccgctgcggggttccctttgcgctgagctcatctcctgcaacgccgctgccccaaaccttgcgggccatttggtcccgggggtggggctccttgggggccgcggggcagcccggatgagaggatgacccgggagctccctgggggcggagtggaaggggcagctccaggcagccctggccaggagcttttaccccgccagccccgctgctccagcggccgctgccttagaaaagttaacgagaaccagatgtggtggccactgccgaactttctcagagccggtgattggtccccagccgagggcctcagccaattagcttgctgggtgggcctggagtcccgccccgcccaggcgcccgcggagatccaggttcgaggctggcgcggcgcggagagtgggctggaggccggggcgggacgcgttgtgcagcgggtaagcgcacggccgagcgagcatggagggggaccgggtggccgggcggccggtgctgtcgtcgttaccagtgctactgctgctgccgttgctaatgttgcgggccgcggcgctgcacccagacgagctcttcccacacggggagtcgtggggggaccagctcctgcaggaaggcgacgacgaaagctcagccgtggtgaagctggcgaatcccctgcacttctacgaagcccgattcagcaacctctacgtaagttcagccccctcctggcacttttcccgcagcttcttccctggggtcggtctcacggaaaccctgcctccagaggggaggaaacagaccccactcctggagccccccagcacccttgcggtggtacccggccagagagcgatgccgctgcctgccccgctgctgtaggggagcaagaatgacctggaggggagagcaagaattgttcgcagccacgtacgcgtcccaggcagaaaaggtggcgttgctagggcggccagcgggctttgcagttaggaccgcgagaaggctgtgcccgtctgcggagctggggtgttccctcttcagacctggaggcttcctctccgaggacatggggctccggggttgtgaggggagtgagaagataggtgaacgagttttagggcccctggacctactgcagcgcggagctgggacagtcgcaaaagttgcgcttgtttccctgaatccagactccctggccagtggggaaggagagagaggctttttgcctaagtcagttcccttccctccctgcgcgaaagggtagcgtccttgggcttgagcgactgtcacctttttgtccctctcctctcccaggtgggcaccaacggcatcatctccactcaggacttccccagggaaacgcagtatgtggactatgatttccccaccgacttcccggccatcgccccttttctggcggacatcgacacgagccacggcagaggccgagtcctgtaccgagaggacacctcccccgcagtgctgggcctggccgcccgctatgtgcgcgctggcttcccgcgctctgcgcgctttacccccacccacgccttcctggccacctgggagcaggtaggcgcttacgaggaggtcaagcgcggggcgctgccctcgg

SEQ ID NO: 5883 - DNA, 544 bp, Homo sapiens
cggtctccagccggccttgtgctgcccgctgcgaatacagcccgtgggccaccgggcagccgagccatgcaagccaccctgatccccaaaaggcagacgcacaaacccgacccagaactcgaggcgaaccttgaactcacagcgccaaaaacgcgcagtgccttcgtttgcccggctcgctgaaggctggctctgggcctgggggcagtgcccgcgaagggctgcgatggcaggccccgctgccacacggcatcgagggtccctccgcctcggcgccaggcgcacgcccttctgccacatccctcgcggggcgcgccgccagggccacctgccctttcaagccccgccaggcagccaagggtgaggagcggagagggacccggccgctgctgccgcgagccagcacaaaggcagcgtctgaaatcgaacttcccaccctgggcaccgcggcctccccccacccctggcctccgcggccggagcgcactcactgtcagtcgccatggtcggacgagggggctgcccgacggccgcccaggttcgg

SEQ ID NO: 5884 - DNA, 2002 bp, Homo sapiens
cgcccccgccccgtgccaagcgggcccaaggcccgaggctcccccgctcacaaccccggtgcccggaacacgtcttcgaggggccgtgctgtcggggttattactcgcgactggacctcgcgccgtgttgctctcctcgggccccgagcccgcccagcggtctgcacggcccaggcctgagctgcgggcttctcctgtggggcgcgctgggagtgagctctatccccaaagcccatttcaacgtcccaggtatgactacgacggcagaggccggccgcccaccctcgcccccttccccggccagagcgcctttgccgggagccgacgaccgcggcctgaccccgggccccaccgcctactcccggctcccgcccttcctccacggtcaggggtcacacacagcggacgccccgttctcagccgcccctctgatctctgaatttgggagccagcgtgtccgctggggcatgcactgccacgggcactgggacccctttgctgctgcggggaggagccccgacggcaggtgggaagacctagcctgcccgcgtccccgctccccagctcctgcgacccgggccgaggctctcagcccctgggcttccccgctccgggtttgagggaggggccgggccttcgggcctgcagacccgccaccgcgcgtgcgcatgcgtcggccgcgagcccccgggtgcaggcctgggcggctccggcccgcgcacttgtccaggcgctgcggctcagcgcgccccaacctccagctcgggcggagagcgggggcgggactgaagcaccgtgttcctcaaagtatcctctcgccgtcggcagccctggcctcgcaaatgctccagcgcgctcaggcgcacgcagagactggcgcggcagcctccgggccaacggcacgcgagcaaagctggttggcgacctgggacacgcagtagaagttgaggctgcaccgactcccgccgcttcgggggaggcatgggcccgggcaggcctaggaggaagctgcacagcccgaggcccgggcgggagtggcgggccgcgggcaagggaacgtatatttggaaggggtcaggacctcggctggagtctggctttttatggcgaggaagccgactgggaagggccctctggcgaggctttcctgttgtgccacttttccccggcagcgccgggcgcggggaacgcggggctgcaccggggcgggggagggggctttacccggcggctccgaggactcgactctggggtcgggcccggcgggtaggcctgcccaggagccagctggcaaatgcagcggactgtcacgttattccactgtcaccacttactgtaaatcactgtcctaagcctccgggagaatccgtcgaacctgagaggggggagggggatgggggtgggcgcgcaggaagccccacaggcaccagggactggtgacccaggacatcagcccctcgagttctctctgggaatttctagcacccagactgtccctgactgtagggaccacggtggggcgtcttccttctaagctctccccgggacaccgggcgcgcccccctcgcccctgggttagcgcacactcctccacgcgatgaccagcacagccactgtgaggcccggccttggccgcgtttgtcctttgcgagtgataataataaaaatcattggaattgcaaggaagcccctggccccggctccccagccgctgctgtcctgggtgtcccggctgcggaaagaccccgcagccgggcccgacccacgagtggaacaccgggctgcggacccagccgggcctacaggactggcgcggggctccggggacaggcctcgcagggccctcctgcgcaccgtctgggacgccgattttgccaacttggaggacaatttttgttttcactctaccagcagatttttaaaaatccagtcgccgctgaaacgtgcttcccacccgtccggtttgtttgtagcctttgacgagccccggcacagcctccgg

SEQ ID NO: 5885 - DNA, 983 bp, Homo sapiens
cggtgccgcgcgcccgcctgctgcctggagctcccaactcggcggaatccaggtcaggacgcgccgccgttttgacgtgctgccggccgggaggcgcgggcgccaggctccaacgactagggtgggtggccgcggggcaggggttggatctgaattcgtccctcgggggctctggatgcgggatgcgggatgcgggatgcgggctcgacttcctcgctgctggtcgaggagcgttctgagagtctcccctccgcgcgcgaggataaatatgcgcggcttgtcagtcagtgcggcgctgtctcccagctgatagggtgacgttccgtttggaggcttggagattggctttttgatttggcttcttccggcagcttaatgggcaaagctctccgctcgcccagaaaccagcctctccgcgcgtcccctctgcgcgcggcgaggccgagacgtctcccgcggtgacagcgtgcaaggcggagacccggcgcgctcccagcccagggaaagcccaggcgacgcgaccgcaagcccgagcccaggtccctcggagccgccagggcgcgccgggctgcttgccttcctgccccttcctgcaggaatcccccgccgcccgcggccgggactccgggcctctcccgggcgtagattccagtcaccgctctgggtcggggtttccctctttctgaaatccgtgcggaaggacccctcccggggcccctcgccctggccccagacaccctccctcccagaccccgcgctccagatgcgctgccccgcagctccctgacagctgcgagcccacgaaccccggcgggagggcggcggcggcggactgacatgccccggacgcggctgcggccggcgggcagcccgcgggggcgatgagccgctgcgaccggtgaggcgccgggcggcgggggcatcgcgtaccttcctcacccccctcccttgcccactccgctcgggaggccgagaggaaacgg

SEQ ID NO: 5886 - DNA, 947 bp, Homo sapiens
cgctcggtgctcatccccgggatcttgaacttcgcctccctcttactttctgccagacccgcgagggccaggaagggctctgggaggaagcgggagcgcagcggcggggcatggaagaagagggttgggggcgcgcgttacctgcaaaggttctcgaggtctccttccagccctggtggtaatcccgctcagcgccgcgccctcccccagatccaaacttttgctgggtcctccgggtggcggcggcggcgacggcggcggctgctggagccaagccctgtcgcccgcagcgtcggggcgcgggggtgcggaggccggagcctcagagcggcgcgcgcctccccgcagcgggccggggccggggcgcccagctcgcctcgcttgctctcgcctacgtcccctacggagctgcggcatcgtcttcccccgtcctccgccaccaccgcctccagggttcgggcatgccactttctcttggcttcggccgccgcgacccccgccttctctcctcctccgcctccccctctccgcttcgccaagccaacgaaccccaaaagaagtacagcgagcggggaaggcggcagaaagctgccccgcggcgccggagctcctcggatttggaggatcccgggactcggcgggagagctaggcgggctctcctccgacgcgtgtgtgcggacagctcggagccgggcgtgcggcgctgcgcgggggcgggcgcagggctcgctccaagtgctgcgcccgcccggcgtgggtctggaggctgctcagaccacactactgcctcaatccgacgcggccgggctaatgtaggcgccgcggcccccacccctacccctcctgacacccccggatatgtttacagtaatgaattcgcgggatcgcctccgcagctcccgcgctcctcctctccctccgtccctcgcgctctggcgcgctccgc

SEQ ID NO: 5887 - DNA, 1362 bp, Homo sapiens
cggcctccgggccctgcgaagggagctttgttcgcgaggcggagggcctggcttaccgagaagcgcatccggaggcggttgaggggcgcgcggggcacgcagcagagccgcagcccggcccggacccggagcgccggagccgcaggaaggcgaggagaaggaaaaaaaggaggctgccgccggctcctgcctcattctcccgggcagcgttgacccgctggccgccgccggatagggctggccgccgggcgcgggaccccgtgcgcgctgctcatgtccccgtctgccgctggctaggtgtgcgcgcagcctgctggtctctgggcggcacccgggggctcctcatgccccgcgccggggctcggcgggaggacctcggagaggcagcgcggagggaaagagagagagacagcatgagaacgcgcagagctgcaccccgcgggggccgggcgccagcagcaccgcgctgccccacccacggcgcgtctgctccccgcgctgcgcgcccagcggggcgccgagccccagaaactttagcacatggccggtccggcggccacggtggccgtagctgccctgctcttcgagcgccccccactgcttcctgccccaagccccagagcgcagcttaccagcggcgaccgcgaccgcagcggcggggcgcccacccggccgcaagcacagcagtgcgcacctgcgggaaaggaggaaggggctggcggcgtcggggtccctacaggggaggggcacctcggcggcagcaatcggcgcaggttaaggcattctgggccggggctgcgcgcgagccaggtggtggcaggccgggattggggagggtctctgcgccccccgccccgcggcgccgctgctgatgacgcgcgcgggcttccccggccccgcgtctgcggagccagccccgttacctagcgactcgctccggggagcccccgctgacgcgcgctgcgagccgggctgcggcagccgaggggcggggagggaggggagggggagctccagtgcggggagggccggcggctgcgggccaagctcctccctccgcttccctctccgcgttggggagggggcccgggaaagacgtggcctccgcctggccctggaggatgggaggccttcgcggggcgggggggacggagggaggcactgagtgcccctgtccccgcagtggggatgcagcagcaggtggcggctatgtggcctgtggaggctcggcacccagaggcgcgcggtgagcccgccccggcgggagcgtggcgaatgtggctttgggcgcgcgggtgtgtgggacacgctcccacccacgtggcgtacatggggacctggggacgcgggtgaaagaggcgc

SEQ ID NO: 5888 - DNA, 1092 bp, Homo sapiens
cgaccgcggcgcgtcgacgcttggcgggtcacggtcacaaagcgggtctcagagccttcctcaggcggcggcaaagggggcgcccgaggtcaccggcaagagacagattactggcgcctcgggaaaacagagtggggaagggcgagactgtgtgcccatccacgttcgcgcgggtctgagctggcccggccttggagggctccgggaccccagaagggggacagcagtgggggatgggcagaagggggcgactcgggctgcccaggctcctcgcagccttcctgccaacgagaggggcccgggcgggaacagctcgagccgcgggggtgcggggcgcgcagcccgccccaccccgggagagccgcgatcgccgcccccgacgcgtgcaccaagtgggggtgtccggctcgggacaaaggaccgggacgcggatcgcgggcgggcgccactgcccagccccagcgtggagggcgagaccgtggccccgaacctccccaaacttggcggcccggggcgcgtgggggggacgccccgttacctgcgcggccataaaggagagatccatggtgtcgctgcagccagcgctcgagtcctcgctgctgccgctgccgctgcgggtcagccgcctgcacagttggcggggatcgggctgagcagcgagcgtccggagaccgcacggcgcactcggctgtctctgggcttctggctccagatctctactaggcggagggccccgagcgcgggggcgggcggggcggggtggggcggggctcggcggacggggcgcccctccacgtgaccactccccgccccacccccggggcggggtccgtcagaaaccccaagcgctcgcaatcgcctcccttcgtgggcgggatggggaaactgaggcccgaggccgccccgctggttggtgcaagaaccagcctgcaacccaagtcctgagctgttggcgccccgccccgtgcagttgaacccaacccacccggggctgtgggcagcgctctcttggggctgacacgttatcccgagcctgaggaccaagatcggagtgacctggctttccacgccaacgctcctcccagagtccgg

SEQ ID NO: 5889 - DNA, 1092 bp, Homo sapiens; identical to SEQ ID NO: 5888

SEQ ID NO: 5890 - DNA, 1092 bp, Homo sapiens; identical to SEQ ID NO: 5888

SEQ ID NO: 5891 - DNA, 580 bp, Homo sapiens
cgtgtccaggggagcccgatagagcacgcgggaaaagccgggtgtctacgcttccgcgacttaggctgcagagataagagaaggtcaggctctgggaggacgcgaggccgtccaggaatggcagggaggcccgctggggcctgactttggtcctaatggaccaaagcttcgacggagcaaggccgggtgtccgtggtggcacctctcatcagtggacgctggcgaatgactatggaaacaacattcaacagcagtgttttctatgccaggtacacaaccgccttggcgtgggttgataaccatgcctatctcaccgcgtggcactgagccgaccgcacacccagggccccggtctccagggctcgcttactcgcttactgcgtgaagcatccatccccgcaggagccggagcaggaacagggctgggccctggggcgcgcgcatgcgcaggccgtgctccaggaagggcggggcactgagccgagggccggcgcggggcggagggcagggggtggtcgcactctccagggcacctgtgcggtgactgagaaccgacccggcaatccgcgggcccgggcgg

SEQ ID NO: 5892 - DNA, 888 bp, Homo sapiens
cgacccgctccctggtcgtctcctccgcggccaggcgcatcctgcagcgcccagaccgccgcgtccccacccgcgtccccaaccgcgagcgctcgcctgggccgggccgggcgcccgagattcgggagagattaggggcccgcaaagcagaagagcagattcagaaagaaaaaaaaaaaagcgagaagtgcgagaaaaatatactgaattcagctaaacacacggcagatgaaaaaaataccttgctcagaagccaaaaacgagctcccgagccgtgagacactgttgcgcccccgccaggcgtgcaggccggatgttaggggggcaacctcgaggcccgatggtggcttcgaccccagggcggacctgcgcctaccctcagcccctgcaactgcgggtcaggagaaagggacctgccatggcgaagaaaaccgaatcttctccaattaggcttctccttaaagagagaaaaagtaggtagttgggcaacttaatccaatctgggactcgggacgtgtgcttgggcgcttcccgggcagctggccggagcgtgtgggttcggagctcccagcgctggccccgcgctgcccctcgatgccaccagcaaacccgcagggcgccttggcgcaggctcgcgtttgcagagccggcctgggaagcggaactccctccggtcccgatgaccaggcctctttagggtcctggctcaggctgcctttgtgggacagagcctcatgaagggacacagaaacagagacagcctctgggcggcgcccccgggatgtggcgtttctgtgccccggggagggggcaccacccctgcctatgcggagcgatccggacgctgcaggggtgacgccgggcagcgcccgctctgacctcccacgg

SEQ ID NO: 5893 - DNA, 1483 bp, Homo sapiens
cgcggctctgggcgctggcagggggaggcttcggcaacgcctgggggcttcaggccagcctcctccgggctggaaggcaccgcacaggggcttccgccaacttcggtcctcgcgcggtcgggacacggccacacctgcccgcgggggtctgcctcccaggccgccgcaggccccccggagcctaagaggaccccacaagcagccaaagccagcgccgcctgccccttgcagaacactgccccccacaagccctgcagaccctcccggctctccagacgcccccacggctctcgcgaagccattcccgcgctctgaatgcccccgaatctctgcagagcccccgcggttctctggaagcccccgcgcccgtggagcccccctcccgccctcgggggcaccgcgggcccccagcccagcccctccgacgctggccgctgccacctcccacgaggcgccggccccgactcacctcattgtcgctgccggggacgggcgcgccgggccaggggcgacccggcggcggcggcggcggcggcggggcgcgggacgcgggcgctagcgggggagccggccccgggcgcggcggctccgcgtctgactgggctgcggggggcagcgggggctcatcttctccgggtgggcgtcggggccgctagctgcggggaagggccgcggcggcggcgactgacagctgggccccggcccctgccatcttggcgggcgcgtgcccgggccggcgtgtgcgcgggcgcgtgcctgggggccgccgccgggggatgggggggcggggggcgagccggctggggtccgggcggcgggaacgcgtgcgcgtccgcctgagactcggggcggcggcccctggcgagtgcgcgggcggctccgagtcctcgagggagaggcgcgcgggcgcgcgggctagtctcagcacagcagccaagagctagggtacgcgcgttgctgttcgccccaccgccctccgaggggactgcgcgcgcgtgcgcccctccgcccgcggccgctgaggtgaatgagcgcgcgcggcggtcaaagcccgacacaaaaggcgcggggccccaccgtccgcgcctccgggagcgctgagcttgaggctgcgaggggcggggcggacgagagtggcggggctgaggggcggggctttgagggaagcgcgaggggcgtggccggggtgggggcggggcgccgggcgggcacgtggcgcggtgcgctccctcccggcgcggacgctcctccagtccccgcctgaccccagagctcacagaggccaccgggggagccagggtccgtgctcgatggccccatgattcccatcacctggccctgctgagcaccctgcccgctcggactcggggcatccctgatccgagggccgtcgaggtcaccggcgactgattccctctctttgtacataaggagccgtggcggggccggagagttgcagctttggggcgatatcagtattcga

SEQ ID NO: 5894 - DNA, 3714 bp, Homo sapiens
cggcgtggccctgctcggaggggtcggcctaaggaagtgtcacttacccggagggtggtcccgggcccgctgaccagcttccacgcctgtcgcttgagctccaccagcttcgtgtggcagtggcggcaccagccgcctccgccggccgagtggccctgctctgggccggccccggcgccttcgggagcagggcggctgccgcatgggtcctggtcgggcccggcgggtagcctctttcggggggacacctccagcagcggcggcggctcgcgggccgggccgccctcggccacctgcagggtgtgggggcggaagcggacagtgagcctgggacgtccgtcggatccagacccctgcgcgccctgccccagcgtgacgctcttgccaaagttaggagccctgggcacgaccctggcgctcacccactccctccatccccggaggtcccgcctgcgggtccgctaccctcagcaggaggcccggcccccagggatccagcgcacaccgcgagtatcttcgccgtcccgggcccccgccgcccgcctccctctccaggccgggccgcgcgtaccgcgggctgcgcagcgcacagagggacgccgcggccgaccatggccggggcgcgggaagagcccggcaggcgctcccggccacgctggctctccgggggcgccgcggctacgtgatccggccccgaggcgcccccatggcccggcccagccgctcggaagttcgcagagcctgcgagtgtcgcgaggagcgcggtggctccggtgggcgcgctcgggaggcgagggcggggccggggaagggcggggctcgggctcccggggcgggcggcgaggggcgggagcccagagagtgccccgcccttgcccagtgctgggcggcgcgtggggggggtagggtccccgcttccccacgcggccccgcgcactccaaggaccccaacctgttaggtgagtccctgccccggggaggggcgctgggggcggcggcgaggatctagttgcgcgcgcgcatgcgcctcccgcccctctcccgggacaccagggctgcgcgtctcccaggaggcgccgacgcccctccctctacaggcgggaaaactgaggctgcggaggggacgctcttgcccaaggcccacggcgaggtgggccgaggaaggggcgggaccccggccccgagactcccaggcgcctttccagcaagcccagcgtactctgcgtgtcgcgggccactttaggtctaactgtcgcgcgtgggttagtgtcgccgcggtgtgcgcctcgagccgggcagcgaccgcgccggcgtatctgtgcctcggcgcgtctgcgaacggcacgtgtctttacagccgcgcgtgtgcccgcaagtgggtgtgcgcgccgtgccgcccgggaagcgggaggtcctgcgggcgtgcgccggacctgttgtcagcaggcctggcagatgggaactcagctccggaattaattgcttgtttgtctccggctgggaggccgcccccccgcccttccctggcgaccagttgctctgtgcctagccgggccccaaatgtcgccggcatccgcggccgcaggcagctccgggccaggctccgggtcagccccaaagcccgggtcaagccaggcgggcgcggcgggcgggctccccgtgacgcgagtgccccctgccggccgctgcgcacacggctccgagactggggagacagcgccgcgcgtcccaggcctgaggcgcactcggaaactccgaaggtcgtgacccggcggagaccaggacacgcggctgccggcacatacggtgaggccttcgcagagactcagtacgtcaaagtgaccctttccgttttgcccacccccttttacttggataagcctccccgcccacgcacgcactccccagaaagtggggtgggtgatcccctcccggctttccgggtcgttgatgaccttaggggttcgaaaacgcaagggggtatggaataaagtggcaggggctctccactctttctgagatccgtaagcctgcagtcgctttccacccagcctggggggccggaagcgcttcccctacccgtctcttcgcagcctggagaatgaaaacgggcgtcagcccacatctggatctgggtactgaggacaacacccaaaccccaccccgcactgccggcagacagcaccgcctcccgccgctccactgctccgggacacacactctctatatcccgtccccccacccacacacgcaacacagaagcacgcagcggtcgggagcaccggtcctgcgcccctggccagccacacccgcaacttcagcgcttctaccgccgcggcgcttcgggaagcacaagctcacatcccatatccgcagaacacggggtgcacaaggctggagtcacctcgggggctcacgatcagtcaggggccccgaccccctacttcgcccatcctagcaaggcgcaaggtgagcccgagaatccctgcgctgcgctctccgccctagccacagcctccgggtgggtccggttgggacacagccttgaaggcagagggagacttggacaacgctaatgggggaaagtgcggcagcgagtcccagcccgggctgcgggacgcggctccggacctgccgtctccttcccggcgcagcacccccggccgcgcgagccgcgcggcaaagtaacgggacggcgcctacgccgcccgcccccctcccgacagccctcaccttgcctcgtcgccgcaggaggtggctggtgaagcccaggatgatctccgagtccaggcagagcgcccccatctccagcaggctgggagccttgcggggcgcgccgcggggcggctcgggcggctggggcagcgccatggaagagggaagcgcggggagcggcccctagtgcctcccgccaccgccgccccgcccgcgcgttcactggccgcgcgcccgccgccgccgcgccccgcaccgcgcagggccgcccgtcaagcccccggtcctccgcgccccgcgcccccgagccctgcgctcgctccgcgccgcgcgcccccgcgctccggccccgcccgcctgcgccgacagcgccccttccgccccggcggcgagccagacaccagccacgcggactggaggtgtggggcgacggccccgcgcgccactgggcggaggttggaagccagaatcgggtcgcggtccgcgcccacctgcctcgctagcccccagacgtcggtgtctactgccgggtatccggcagggagagggcagcgcggctgctgtaaaacccttccgactggggcataatcgcagccccttccccctccaatctgtcctgaggacacggcgcgttggggtcctggcccatggaaacgctcagagcccagtgacctgtgcactccaccccgcccacgctccagagcccccgttcaaccttggcctatggacctccaaggcccaccccaaccggaccacggagcgtgcgcagcgggacccgcagtctgcgcctccactccaggatcccgattgtgccgccacccgtggccttccctgccccgaccccgactccctgagggctggaagattcgggctggctgccgggcacgacgactttactttcagggtccgaagctaggggcgggggtgggcgctctgcctgggtgcaaactcaagcccgggtcccgcgctcctcctgtgggctgccccagcctcgcgcgc

SEQ ID NO: 5895 - DNA, 1266 bp, Homo sapiens
cggctcgggcgccaggtagaactccagctcgatgctgccgccgtcgggggagagggaatccgttgggagggacagtcgggggctggggaaggaagagcgggtgctgggagggttcaacactggcggagccccaggtggcgacgcgggcggcgagagctgctccgaggcgggggcctcgggcaggtcgctctccacgcagtacacggagcagaagacttgtctcttggcgagggacgggcgccgctgacccagcacgtccaggaccagtccgtcggcggcccccacgcgggtcctgggctccagctcttcgccggggggcgcctcctgctgttcatcccctccctcttttcgatccccagcttcctcctcttcctcctccagctccaactgcagtggcaaggtctggggattgagaggcccggtgagtgccagtcccgcaggctgcgccggtgctcggctcttactccagcccgggggccccaggctcctcgcgggctctggggcgctggtgtccgcgcagccccagtcgcttccgcagccaccgccgctcggctccgcggaggcggcgcgcagcgggggcgcccgggcgctgtccccctgaggcctcgggggctcagggtggcccgcagtgccactggccagggtctgcgactcctggggcccgccgccgccgctcaccgtgctctgctcctcgcccatcgccgcccgcggcccgcgccgccgctgcccatccagccgccgggacccccacccggcgcccgcgggcagcgggggcagtggctcggctcgactcgcggctccgcttctgcttccgggtccttcctcctgggctgggacgccccaagtcccctccggggagcccgtgctccgaggctgcggcgcgtggggagcctggcccggcccgccgctcctcctcgtactctggcgcggcggggcaccgcctcgggggcgccgagggccgctcgctctgggctcgggcgcgcccgccccacatgcagctcggggcggcgccgcagccccagcgagccccaggcgggacagaggggtctgggaggagacggccgtcagtcccgcgccatcaccggtcccggctgccggacgcgcggcccgagggcggtggtcaaagggtcgaggggcctgtggcgccgccgcggcgcgcaccaggaggtgcagccggagcgctggccagccgcagggcccctgggggagaggccggagcgggcgacctccctctccccgcgcttcacctacagccctcctcgccgc

SEQ ID NO: 5896 - DNA, 1316 bp, Homo sapiens; identical to SEQ ID NO: 5773

SEQ ID NO: 5897 - DNA, 10783 bp, Homo sapiens
cgagccgggacaaaggcttccaacgggagcgggacatttgtctacatttcgctcattgtccgcagcttagcaatcggtttgtatttgtgtttgcccgggtccgaccacccaggacgcgccgacgaggggcttgctctaacctgggccattgtcacccacgtcacatactgggggcgaggcagctagggctgcagaaagccgccgagcggctcggggagaggtgccctcacccagcgctggcaacccgggggcagctggggcgcggcggcgtccgctgcagctgcgcgcgaggaggacccggtgcccgcgcgctcagcttggcccgcgcggaggagcccaggttgtgggaagactagacctggaccccgcaggggtggccttctgtgcccctccccgcccccagacaaagctccttcctgacactcctctggggcgaacgagcatcaggtagccaatctacacccctgcaccccccccccaaaaaagttttaactagaagaaggggtggcaaatgcggcgtggtcttttccaaccccagcgccgaggaggaagtgcaagtcccgggaaagttcagttcccagagccgagagtggctggaaacttcacactaacctgacttaacctggaaacgtggagcgcgtactccgaacgcacccaaggcgtccaaaaagagaccacactaaagaactcgcgtgggagaagaaaactggggagaaaacgaggcatcgtcgggccacccagcgacccccctcccccgcagctttctgggtcttcacccaggctggagacacaacccccacccccacccccgcaatcccgccccgccgccttcccgctgctccacctctagccagaggctggagagggagggggccggagagggagggataatagagggcaggaaagagcagggccgtctgccctttcctccacccggggaaagaggcccgcagagcccagaggcagcagggccagggtccgaccccagacgaagttggagctcctcactcttaccccgccctccccgggaccgcccgcaaagcagaaagtgaactgcgcgtcctccttggccgcagagaggtggaggcggggggttgggggtgggaggtggggggaggcggagtgaaggaaataaatgagtctttagcaaataaagggcggctggaagggggcgggtcgcttggtggtggctctggccggcccggagcggagctctctcctgggttttgggctctctcgcggttaactggaatcaattacttgccttgtcatttctagcactcatccttaagcctcaaccaaaatattgacctaggaggcttacagaagttgggctcttgccatttgaaccggatcttgtttaggcaaccaccaacgatggaaaggagagatttccgcagctcggccttcgccccctcccccttttccaaaggcgccacaaatcgccaattttccggcttgccgggggtgggcgcgcgggggcggggaggtaggaaccggtgaatgttaaagaggattttttccctcctcctggtttctgttttgttttctcccctcctcctccccacccccaccttttttaagatgcaatttgttaaaacggccctttcaagtgtgtggactcgcgagcgacgcggtggccctttgtatgtaaatactgggtttaaaaaaaaaaaggctcgccccgtctttgcaattaattgacacgttacacctctcatcttgctctagagggccgttggctgggagcgcggagctccccaaaacccacaatttcacatctgcaaatactgtcttcatccacttgactcccaagacccgcccacacgtggccaacctttgcgtttttaatgtctcttcccccttttttccacccttctcccgctccctctctcgctccccctccctccctctttctttccctccctccctctctttctccccctctccccgcctccccaggttcgtgagtggagcccagccttatatggactgatcgctcgggcaatggcccattttttcctcgccaccagccgccaccgcgcgccgagcggccgccggagcccgagctgacgccgccttggcacccctcctggagttagaaactaaggccggggcccgcggcgctcggcgcgcaggccgcccggcttcctgcgtccatttccgcgtgctttcaaagaagacagagagaggcactgggttgggcttcatttttttcctccccatccccagtttctttctctttttaaaaataataattatcccaataattaaagccaattcccccctcccctcccccagtccctccccccaactcccccctcccccgcccgccggggcaggggagcgccacgaattgaccaagtgaagctacaactttgcgacataaattttggggtctcgaaccatgtcgctgaccaacacaaagacggggttttcggtcaaggacatcttagacctgccggacaccaacgatgaggagggctctgtggccgaaggtccggaggaagagaacgaggggcccgagccagccaagagggccgggccgctggggcagggcgccctggacgcggtgcagagcctgcccctgaagaaccccttctacgacagcagcgacaacccgtacacgcgctggctggccagcaccgagggccttcagtactcccgtaagtagcaaaacttggctgccgaggccgtggtcccctccattcctgcagccgcagcccgggttggacgctgggagtgaaaggggaaggggccatgtaagcccggaccccctcactcggatccgtagaaagatttttaacacctgtataggatgtcctctgccctcctcttcaagcctccttagttccgggaaagaacttggtctccaaaatttttttcaatgcgagaagttaaggagaaagagggagaagggctatacctcccaggggctggtatatgatgtcaacccggaccgatggctccagccgcagcccccggactccggccgctgggagggactggcctggcgccctggaggtagccagcgagcctcgtccgggtacgggtggagggtggggaggcttcgggtggcccgggtataaatagctcaccctgccccctgcgcgatcatagaggacgctttgtgcagtgcagggggtgtctagaaggcccgaaagcagaaacgaaagcccccaaaaacctgccttaaatggccgagccgatcaatgctgggattgtggggtatttcttttaaaaatctgcccacgtctcgccggagaggaaaccgcttaagggcgccggagcccttaacccgcgatgatcttcagtgccacttccccccccaaattctcacccacactatgtgagccccttgaaaggcgagcccctagcccccactcctacggatttccctctttaccctgggaggtcccgacgtcttcgtcaggcgtagaggaaggcaggggtcatggcaaaggcagcggggctgggctgccaggcgcggaggtccagggtcgcacggaggatccagggtgctccgagtctggtgcaggctgcgcgcggcctccagacgcctgacgcgcttctctctccccctccccccagtgcacggtctggctgccggggcgccccctcaggactcaagctccaagtccccggagccctcggccgacgagtcaccggacaatgacaaggagaccccgggcggcgggggggacgccggcaagaagcgaaagcggcgagtgcttttctccaaggcgcagacctacgagctggagcggcgctttcggcagcagcggtacctgtcggcgcccgagcgcgaacacctggccagcctcatccgcctcacgcccacgcaggtcaagatctggttccagaaccaccgctacaagatgaagcgcgcccgggccgagaaaggtatggaggtgacgcccctgccctcgccgcgccgggtggccgtgcccgtcttggtcagggacggcaaaccatgtcacgcgctcaaagcccaggacctggcagccgccaccttccaggcgggcattcccttttctgcctacagcgcgcagtcgctgcagcacatgcagtacaacgcccagtacagctcggccagcaccccccagtacccgacagcacaccccctggtccaggcccagcagtggacttggtgagcgccgccccaacgagactcgcggccccaggcccaggccccaccccggcggcggtggcggcgaggaggcctcggtccttatggtggttattattattattataattattattatggagtcgagttgactctcggctccactagggaggcgccgggaggttgcctgcgtctccttggagtggcagattccacccacccagctctgcccatgcctctccttctgaaccttgggagagggctgaactctacgccgtgtttacagaatgtttgcgcagcttcgcttctttgcctctccccggggggaccaaaccgtcccagcgttaatgtcgtcacttgaaaacgagaaaaagaccgaccccccacccctgctttcgtgcattttgtaaaatatgtttgtgtgagtagcgatattgtcagccgtcttctaaagcaagtggagaacactttaaaaatacagagaatttcttcctttttttaaaaaaaaataagaaaatgctaaatatttatggccatgtaaacgttctgacaactggtggcagatttcgcttttcgttgtaaatatcggtggtgattgttgccaaaatgaccttcaggaccggcctgtttcccgtctgggtccaactcctttctttgtggcttgtttgggtttgttttttgttttgtttttgtttttgcgttttcccctgctttcttcctttctctttttattttattgtgcaaacatttctcaaatatggaaaagaaaaccctgtaggcagggagccctctgccctgtcctccgggccttcagccccgaacttggagctcagctattcggcgcggttccccaacagcgccgggcgcagaaagctttcgattttttaaataagaattttaataaaaatcctgtgtttaaaaaagaaaaaaagaaaaaatccctgccctcccgtttgtcctactgcgccgggccggaggcctgggcctgggagccgggcccggccgcccgcggggctcccacaggcggttcctctcgggcggggaggccgggggtaccggggccctggggcgggcggggctcccggtgcaggcccctccgaccacaggctgcaccccgcgcctaggattggggcggggaggagaacgctcggcctccggcctgcgagcggtcggccggaagcccagggccgcccaccctcccccgcatctcccctggtctcgcgcgctgtctgaaccccgggcggcagcgtccggctacgggaggaaaagtgacttcgggagccgcaaaggcgaggagagcaaacccccctcgctggcccaaatctatgagtggctccttcagcctgagaagctgttgaagccactacactcgatgactttcactttgttacatttgacttacctcacgctaagaaagtgggtgggtgggggtctgaggttaagactggctgccttctccccactccccactccttttcaaaatctgcgggctggtgctgacctaggagaccgctaaggctgggggtgggaacggtcagggcgcgcgaggctttggcttagggggcttgggggaagtacgcggggttctgggctcgggggagggaggggatactgcagccctccctaggatctttggccccaggaagccagggagcgagaatctttggcaatcccagcaaaccatgcctctcccttcccttacgctcccatcctttccgggcttccaggcctctctccggggactggatcccgggcctccttccctccagcgttcggcggtccgaaccagggtgtgcggtccccccaggtcagcccttgagcgtggaactgggtggattgctaggaagtagaggtttgggggtggggtgagctccccggatgggaagtgggcacacagccccgggcacgcccgggaagggcgcatccatctttccggcggggaacggattccgtcccacccttgttgctggaggaagatctccttggcagatgctggcgcacacttggccacgcgggggagcgtcttaggaagcctggccaactggaggatgagcctttctcctctatctcgcgggtttctaaaaatacttgggactctagctcagagcccagcgggtgctgcagacgctgagggactgaacgtcggcgcatttggaaattgtatctctgttctctccgaagctgcaccatcaaggctggggggttgggtggcagtgaggaggccgggcaaaaggagcggtcccagctgactttctcgctccctgtagttgatgatcaggtttaattcaatatctaaagcaaacatgattatccgtgcgaccaaatctgtgcgtcgatagcactctgcgcagcagcccagggacgcgatgacactttattcccgcgttccacaccgcccctggataattgagggctcggaagtctttctaataccccagtaaaggtcctttcccatctccgggctcatcctcggggaaagggcagtttttctaaatgctaaaaggtctccctttgttctccacactagcttggcaatgtttgggggcttatgtcttactgtttttaaaggccaacgaatttctcccaaatagtttgttgtgcaataattgaacgcccaacctgccctggtactaaccactcaacatccacttgcaacttcccctaatcccaaaatcctcttgggaggaaaggtgagggtttcaagtctcttggagcggagctgtcagaaggcctgaggccattttgacttttccaggccccagggcttccagggtgagaatgatcacaagagaccctcaggtttccagagaggaagggggaagcgtggaaggtcctcaccctggcaggcttccaccacttgctcattgaggacaaatttggagctgtggccaggaccgcgggcctgcaatctgggtgtgcgctcctgtggccggccgggagcccgggaggtggacccggcgcccgcctctctctgtcctcgggtccccatggagtcaataaaagcgcctgcggagccctgtgtggccctaaccccagcgccctgggagcgcacccggcgcggggtccgcttcagcagtctatcttcgcccaatctacagcgggcggtacaaaaccgcacaatgggaaagctgggagccggagatgttagaggcgtgcatattaaaaagggacagagaaaggatcgcggggacagagagaggggaagaaggagaaggggcccgccccccaccccccgccccaccccgcaccattcagcgcgcttatcgccggcagtgaatcccggagtcaggcagaagtctccttggggttttgttgggcctgtcactgggtccctttgtcatccacgggctccatgctggattccatatggccagctgggccgagggagcgcgaggagggacccgcacaaaacctaaattgtgtccggctttcaaaccctgtattgttgtctgtgaaaggaagacgcattaaaaattcgtgctatatctattggggaggaggctggaggaggggagaaaaagccacccctgtctttgatggcttcggagggcgcttgccccgcctaggccccgtgacactgaaagttggatctctctcattctgtctctctctctcaaaatctctctttttctctcttctcataatctcgctctcataatctctttctctactttcataatctctttttctcataatctctctcccttcctcacttctctccttcctctcttctgtctccttgactctaacgctgggatgggagtccgcgaacctgcgtcttcagggtttggctcacttgtgcgcactttgctcactgctgtgtgtgtatcaggaaactaacttctgcctgggagctctgcaccatcggaccgtcctggggctcaggaggcaactcagggtacccagggcctgggtgatgctcggtcccctacgggcttagcggctcctgggtagatgaaaatccaccccctgatttcgcaaccgaccggccccgaagcgcccgcgcgcggagccgcccttccactcaccgcgagaaaggttctgagaggccaagggtgccgctcagtcccgggcccagctagacttgggctgcagccggttccaaggcgacttgcgcccggccggaccacttggttaccaaccccgaagagctaaagacgcgcgcgttcctttgaattatgcgcggggatccatcccactggcctcttggtgcgatgggaaaccacttcagaaacttcttccaacagcgtctctccccatgttggaggagggagatacttcctctttaattttcaatgtctcctgtatcgcgtgcttacaaaattcagtaccagggagacacagcagggcttccaaggaatttgcccattttttgcctcctctaagcggtccaaattggcgcgaggcagtcggaaataatttgggtcatgccttctcccctgcaattgccaggtcaaaactcccataagcagtccccaaataaaccatatgtactaaacaaaaatagtttatgctgagctctgtggaaataaaaactggaacccagatatgttccccacaaagtcactcggcccttaatgagcagaactgagctggtggaaattccgactaatgggaaacttggatgcgccccctttcctatttagtacaacggtcatatttagtagaatcagataatttggtaagagtggaagtcccccttcccaacattccccacctcagatggggaaataacttatttccttacctattgactgttgggcttagttgagacctggtgtgtatttctcgagccttttcaagagcctggtcattgaaaagctaatccaatatttaccgagcataaggacagttctcagacgtatttattaaggcccatcgctaagtgattacttggactgaagacaaaggccaggggagggggcgtctaggcataccagatccttctcatttgggctctccccacccagaaccaggaaaccgggagcgcgcttgtgcgctgctgaagttcccctcccggtgttaagtggcgggcggattagatactgtgctgggcggtatttcaggaaatatgtacttgtggctccctgagaggccaagcgcagtgacactctaaaccgtgtcgatatatcatcttttatccaggatctgcaaataaacccctgatccccccggcgcattatagccgccgctatctcgccaaggaagcgatctgagttttattgctttcaccaacgccccgagacacacacacacacacacacacacacacacacacacactcctctctcgcactctgatttttaaaggctctattttttccctcccgaggcatcgttattaataaagaggcgaataggcctcagcgccgccatccgagcaagcggggaaatgtgggccagcagcccaggcccgcgcgcggatcccgcgtacgctccacgcgccccctcgggccggagaaccgagcgtgtgccgcgtgctgccgccgccaggaggcgcccgagcccagcgttcccgagcgtctctgcgcgcgggtccgggcagagcccgggagccgccggaggcagctgcgcatcagcggactcgcggcccgggtcggagcccggtgagtggtgccaagaggtggcggcgagtcggaaccttggggagagccgcgagtcagacggcggcgggtgcctgggaggtgcgagtcgacctgtgttcggctgtggttttcccgccatgcctcttctcctccacgtgcgtaccaccgcccgtcccagccccggtttccatcgtgtttgggcacagaccacagccgactggtccaggagcgctctggccactgggagggccccaccaggcgccagggcgcgctgtctccgcgatctcagggcccctggcggcgtcggccgcgcgggtggacgcggagagggcggtgctgcgagggcccggagagtgggtgcccgcgtggggaggcggcccgggagcgcgggagcgatgcggaggagggacccggtttggttgcaggtttccggggcgggggttccgggaaggagagaccctcgccttccgcccgccctggatccgggtcccgccggacccccggctcctgccgttcgtcgcctggaagcggggcaggcgcacagtccagacgccagggagagacgcctcgccgacccagaccgtggggtcagggcccgggaggcaagaacgccccacacacagcagggcaccccaggcaaccctcactccgtgctgaggcctcggctagggtgcaaaggtgtccgggaatggaagggacacgagggtgtggacgcctcgcactctactcacgcctggtgccttctgagaggctgggcgtggggcagagggtaggggacaagggggtgacattccttaaggtcctccccccaacaaaagtagggcctgcagttccagcttgattcgttgattgttgggtggaaccgcctcacatcaaaggcatcgtggctccaaacactgtcccctttacttttctaagcccccgcttcaaaaccagctgtcggtgggccggtgagggcgtctgcagtacccaggctttccgcggggcggcgcggttggataagaaaaggcttcccggctggggcgcgcagcgcagctcagacacctgcgggactcgagatgtctccgcga

SEQ ID NO: 5898 - DNA, 810 bp, Homo sapiens
cgagtgccgacccgcctgggcgggaccctttgagcgcatcccctccgagcgcgccagtgtctctgggagaggcctgtctgggtgagggactggacgccggcctctccgcaagtcggccggctgagggtgggggccgaggcggggtcgggaacagccctcggaccagggcccagacaacctcgcccggcgcctgcctccccgcgcgcacctgccgggcccgggggctgctagaagaggccgcagcccgcgccctccgggctcccacgccccgcagcggcgccccctcccccggcggcacggattggctgcggcgccgctccaagcccgcctcgcgctgccggcggggggcgccgcggaccagagcgcgctgcgccgccaccgccgccgccaccgccgccgccgccgccgccgccagcagcacagcgcgcctcgggctccgcgcgccgccagctcctggcccgcccgccggccccgccgcgcccgccagccccgcagcggagcctcggcccggccccgggccgccgccaccacgccgcgcgccgtactccgcgtcaagaatggggcggccaagctgcccaagccgcccgccgccgccgccgccgccgcggccgaggcgcccggcgccggcgcgggcatggagcgctcgcagagccgcctcagtctgtccgcctccttcgaggcgctcgccatctacttcccgtgcatgaactccttcgacgacgaggacgcaggtaagcgcgcggcccgccccccagacccccggggtgtcccgggatccaggtccggtagccccctccccgacccgtgcgc

SEQ ID NO: 5899 - DNA, 1142 bp, Homo sapiens
cgcgtggagcgcggccccggggcagcggagagtggggttttaatatctagcacatgtagaccctggggcggtgctgctaggggcgcggacccgggaccaccggagcacttgcaccgcggggaaagctgacagggcgcgcgaccctaggaggctgccgcgccgcctggtgcgtgaagctccagggcagcggagcgcggggaccttgaaggctgtcgcgtgcaggcgaaggggccgcagggtggtcgctcctgggagagcagacggggaagaaggcaacgggagggagggcgtagcgcgagcagtcccggacgcgggctcaggaactggccgcgaggagcgcaatccagcaggcgcgccagggcccccggatccaaggtgcggggtcccgattgggcgcctggacgccccgtgacggtggcgccgctgccactgtcccgaagcgaggcgaggccaggcgctgcgctttcggctgcccgccccttctccccgccccgcgctcagtcccctccctccgtcccgcctcctgcctcgctccctccctcggcggctgctgcgccgcgctcccggcgcactcggagcccggcggggaccgggaggcagagacggggcggccgtggctccgagggcgggagctgagccgggccccgggaccgaagtttggcggcggctccgggaggcagagcgggctccccgggcgacttccaggcccctctcgcgtcctcgccccggacccgtgggcagccggggggaacggaagccgcggccgggccaactccgaggcggggacgccgcgacgggaacttgaggtgggaactttgcgcgctgcagcctcgccgggcgccaccaaagcgcgaaccggaccccgagcctgcaaactcgggctcgggggcggctgcacgtggccgtggccctgaactccctgcgggggcctcgaaacccgcctgcggggaggccagggcgacagaggactcgggagtcaccgctggtgcgtggcggcgtggagcgcgcttgttacggccaaggtgcgggtccggcttcggttcatcccaaggggtcaccgggatgcgaagtccgggacgttcgccgccgcggtgaccccggcgggggcgcatcccggctgtgggccgaggtttctcccccga

SEQ ID NO: 5900 - DNA, 2885 bp, Homo sapiens
cggaggctccgggaaagcccaccaagcctcacgcgtttcgctgatagatgcccaggaagcggctggcagggaagaggcggtcctgcagctcacagagctcccctcccacccccggggagccccaggccgcgctgccctccaccttcccgccctccccggcctgcaacgctcgtggcgtttttcaacaggttctagaaactccctctcactctgcccctcaagcctggccacagggcgccccgagcagggagtgtgcgggctccgggtacacgctgcgccgcggctgcaccagagcgcccacgaccctgaccccgacccgaagcggcccctcagcgggacagggtgttggcgctggcgctgctgctattgcggcgcgcccccccgctctggcccctgcgtgtcgccagggactcttgcgctagggtcagactcaaagacggaccgaggcgggtgcccacctgggacgcgtgcgtttggtggcggaatccccggggcggccggaggcggcggccggggagtcgagaagcaagtactagcgctccaggaccgcgcgcgccgccccgcgccgccccgcgccgcccctcggtccagagcccccacccccggcctgtgagcctgcggcgctggtggagcccggctccaggaagaggagctcacccggtcccccctgattggacagcagcgaggtcccaccgggcgcctccgcggcttaaaaccgaagcgggggcgagggggaggtagagcccgccccctgcgcgtcgcggctgggagggagaggaggtgggagagaaggaagaggcggaggaggcagcgggcgccgaggctctgggacccgcaggcaagccagaccgacgcgcagagccgggagcctcatcgcagcggcagcggcagcggcgggctcgggccggcctcgggggctgctcacccacatgagcatccgcccacccggcgagcccccgagcccaggcggcgcggccatggccgagctcaagtcgctgtcgggggacgcgtacctggcactaagccacggctacgcggcggcggctgcgggtctcgcctacggggcggcgcgagaacccgaagcggcccgcggctacggcactccgggcccgggcggcgacctccccgcggcgcctgcacctcgcgccccagctcaggcggcggagagcagcggcgaacagagcggggacgaggacgacgccttcgagcagcggcggcggcggcgcgggccagggagcgcggcggacgggcggcggcggccgcgagagcagcggtctctgcggctcagcatcaacgcgcgcgagcggcggcgcatgcacgacctaaacgacgcgctggacgggctgcgagccgtcatcccctacgcgcacagcccgtcggtgcgcaagctctccaagatcgccacgctgctgctcgccaagaactatatcctcatgcaggcgcaggccctggacgagatgcggcgcctggtggccttcctcaaccagggccagggcctggccgcgcccgtaaacgccgcgcccttgacgcccttcggccaggccactgtgtgccccttctccgcaggcgccgccctggggccctgccctgacaagtgcgccgccttctccgggacgccctccgcgctttgcaaacactgtcacgagaagccgtgaccgcgcgggcccccggccctcccgcacgcgtcctccgatcgcccctgtgactgtctctctgcccggacaggaaaggcctggagggaccctgcagaccaggaggagggggcccgacttcgcttccagcctgtgcgcggtggacagtttagcgcagcgggaagcgccaaggccgtcggggcgcgggattgagctcgagagccggacgctggactctgcgcccgggaactcgcggcacccactgggtattgtcgggacccagcaagtctaggaacgggggtgggtagagcatccttcgggcactgccgttcgtccccaaaagaagaccaccgcggggtcccagggccacggcgaggacgggcactggtcagattccggacaggcggtcctggccccgggcgcacgaaaggtggagacgaagaaaagccggacttactggctcctgatcctcttgcagtgggcctcgcgctcccgctccagccggcccttcgtgctaaactgcagggcagtgctctgttcctgaggacgcgcgtggccggcacctcccacctcggtgactccgagactccgcagccctgcggagagcccacgatggccgtctgcagaggagctggaccgcgggcgcaggaagaccccggggaaggccttttccaagtaggagtttgttctatttatttgggaattggacgccgtcgccggctgcctcgaagtctgaggaatttgtcccctaaatgtcccctggcctcccccccccgccgccatccgctgcctgggacgtccgcggggtggagttggatggagaccgctttgcgggccctctgcctcggggggctgcgtggaggagggtcctcacagcccgcgccctacttaaccctgacggtcaggggagggccccgtctagccctggtgtccagcaaaccccctccccaccgatcccctctcccttccgagggaggaggccgggctacgggtgagtaagctgctgcgggccccgtgccccgccgggtgtgaacggagatgcgctgcgcagtgcccgtcctgcgcagctcccagctctgccaccatccgggatccagggagccgggcagggtgcccccggggacccatctgtccgcgccggtttgcgccccgcggccccgccgcagtatccggctttattaacccaatttcctcggctgtcggtaatgccaaggggagagggccgccgccctgcaacgcgcctgtctacagcgt

SEQ ID NO: 5901 - DNA, 1460 bp, Homo sapiens
cgcgcccagctggaatgcagagatcgccgcccggctacggcgcacaggacgacccgcccgcccgccgcgactgtgcatgggccccgggacacggggccgccgctgacacgcgcggcctcgccgccggccccgccgccctcgccgcgcccgccgcgcccgcctcgccgcccagcccgcagcgcagtcccccgcgcagccccgagccggggcgctatggcctcagcccggccggccgcggggaacgccaggcggcagacgagtcgcgcatccggcggcccatgaacgccttcatggtgtgggcaaaggacgagcgcaagcggctggctcagcagaacccggacctgcacaacgcggtgctcagcaagatgctgggtgagcggcgggagggcggcagagaagggggagagggcggggggggctcgggccggggtggggcggggggggcaggggtcccgggccgcggggtgcgggggctgcgccaaaccctcgcggggcgtcccgggcgcacggagggctcggcgcccacccgcccgacggcgttccactcactggcgcccacggcccgcaggcaaagcgtggaaggagctgaacgcggcggagaagcggcccttcgtggaggaagccgaacggctgcgcgtgcagcacttgcgcgaccaccccaactacaagtaccggccgcgccgcaagaagcaggcgcgcaaggcccggcggctggagcccggcctcctgctcccgggattagcgcccccgcagccaccgcccgagcctttccccgcggcgtctggctcggctcgcgccttccgcgagctgcccccgctgggcgccgagttcgacggcctggggctgcccacgcccgagcgctcgcctctggacggcctggagcccggcgaggctgccttcttcccaccgcccgcggcgcccgaggactgcgcgctgcggcccttccgcgcgccctacgcgcccaccgagttgtcgcgggaccccggcggttgctacggggctcccctggcggaggcgctcaggaccgcgccccccgcggcgccgctcgctggcctgtactacggcaccctgggcacgcccggcccgtaccccggcccgctgtcgccgccgcccgaggccccgccgctggagagcgccgagccgctggggcccgccgccgatctgtgggccgacgtggacctcaccgagttcgaccagtacctcaactgcagccggactcggcccgacgcccccgggctcccgtaccacgtggcactggccaaactgggcccgcgcgccatgtcctgcccagaggagagcagcctgatctccgcgctgtcggacgccagcagcgcggtctattacagcgcgtgcatctccggctaggccgccggcgccgcccgggtccctgcagcgcttcctcccgcagcccccgcgaccgatccgaccgcgtcgctgccgctctgctctctcatacgcgt

SEQ ID NO: 5902 - DNA, 1560 bp, Homo sapiens
cgttctccaaccgaaccctccctcctgggaaccgcagcccagcgcggtaactgagttaccgcaaccgggcggtggggaggaagggtggtccaggaaaccggcgagggagaaaagcggtggaagggagagtcttctccctggagcggccccagcagtacaaagtgctggtcacagcgccccttccgcccctagattgacgagcagtggcgtggagccagcgcggaggctgccccctccccctcccgagcccgcagcgcggagcgcggtttagcaccaacggagccgggggcggcgtctttgggatggaaaagggccaaaggggaggagtggggtgggggtgggggtttcactggtccactataaaaggaccgctcggctgcccggttcttgcactcgctggaaagcggctccgagccaggggctattgcaaagccagggtgcgctaccggacggagaggggagagccctgagcagagtgagcaacatcgcagccaaggcggaggccgaagaggggcgccaggcaccaatctccgcgttgcctcagccccggaggcgccccagagcgcttcttgtcccagcagagccactctgcctgcgcctgcctctcagtgtctccaactttgcgctggaagaaaaacttcccgcgcgccggcagaactgcagcgcctccttttagtgactccgggagcttcggctgtagccggctctgcgcgcccttccaacgaataatagaaattgttaattttaacaatccagagcaggccaacgaggctttgctctcccgacccgaactaaaggtccctcgctccgtgcgctgctacgagcggtgtctcctggggctccaatgcagcgagctgtgcccgaggggttcggaaggcgcaagctgggcagcgacatggggaacgcggagcgggctccggggtctcggagctttgggccagtacccacgctgctgctgctcgccgcggcgctactggccgtgtcggacgcactcgggcgcccctccgaggaggacgaggagctagtggtgccggagctggagcgcgccccgggacacgggaccacgcgcctccgcctgcacgcctttgaccagcagctggatctggagctgcggcccgacagcagctttttggcgcccggcttcacgctccagaacgtggggcgcaaatccgggtccgagacgccgcttccggaaaccgacctggcgcactgcttctactccggcaccgtgaatggcgatcccagctcggctgccgccctcagcctctgcgagggcgtgcgcggcgccttctacctgctgggggaggcgtatttcatccagccgctgcccgccgccagcgagcgcctcgccaccgccgccccaggggagaagccgccggcaccactacagttccacctcctgcggcggaatcggcagggcgacgtcggcggcacgtgcggggtcgtggacgacgagccccggccgactgggaaagcggagaccgaagacgaggacgaagggactgagggcgaggacgaaggggctcagtggtcgccgcaggacccggcactgcaaggcgt

SEQ ID NO: 5903 - DNA, 5118 bp, Homo sapiens
cgcccctcctcgcgacagagctcccgagcccagcgcaggccagtcctcgcttccccgcggcccctggctcccctgtcgccagaacgcgccggcgccagtcggctcacttggcgtcggaggtgaggcgcggcaggctgccggcgcccatagccgacacgtggtggtgcggcggcggcacctggcacatgctgcaggggcagggcatgccgccccagtgctggaagcccccgctcgccccactgccgccgcccccgccccccagcggggcggccgcggcagcagacggagacttgagtaggccgtgcggtggacggatggagccgaccgacggcagcccggatccgggcagagaggcgctggacacagccgcggctgcagcggcggcagcagccgctgcggcggcgggcggcaggatggggtggtgcaccgcggggtgatgtgcggcgtgcgctgctgctgccgggtgcgcggtggcggcgggcaggggcgcggagtgcgccaggccgccgcaggccgacgggtggaagccagcgtggtggcccccgtagatctcgctcaccagtcgcttcatctcctccagcgagttggtgagcatgaggatgtagttgcgcgccagcagcagcgtggcgatcttggaaagcttgcgcaccgaagggccgtgtgcgtacggcatgacctcgcggaggccatccatggcgatgttgaggtcgtgcatgcgcttgcgctcgcggctgttgatcttgagacgcagctgctgcagctccggctctgtcatttgcttcttgtccttcttggtggacgacgcagccgccgacgacgtagacgacgaggtgctggacgaggatgacttgaagccactgcctcctagcttgtccccaggatgcgcgcccgcagagcccatagcgccgcgcagctcggcgctcagctccggcgggcagtcactcggggtggacgaggacacggtgcccccagtgaaggcgctgccgctgctgcccttactccgggccggcagaaaaaggtcatcgggctctggcgacgacgggcggctggacaccaggctggcgtccgagtccatggccccaggggaagatagtcgtcgcagctttcgcagggtcctccttccctcggacccgaaaacttccaggagaggaggagaaaagagagagaatgagagagagagagagggagagagagagagagtgagtcagtgagagacagaaaagctgctcccgcctgcaccgcagtaccacagcgcggggtcccggcacaggtggcccgtggctcctcgtccccctcgctactatctctggccctccttttagctgcacgcgggtacctataattaagctctctctatctcccctctgctctcatgcaacaggttatttcagggagcgttggtgaccctcggggtgcgggtggcattctagaggcttcgggctttcagttaggtgtgggaaaactgagcccccgggctggaataaacgagtgggaagtgagggcctttctttggggagaatggagatctagatagagaactaatgatttggttcctcaaacggatccaccttatctccatcgacaccacgcagcaaacacacgcacacgcacatgcacccagagccggcgcggggcccagagtccatgtgctgcatctggagaccacggggagctcaccagctgactggggcttgggcagaaagagctgttgtcgctccgacttctcgcttttggtgagggagatgcagcggtgagtgtggggaggacagaagagcaaagtcgctctggagaaatggcccgcagagtagggatccagaccccctgtatcggagcattctgggtcacagccgagttgaggagagtctgtccctgggatctaggctgcggctgctgtggggcggggacacttactctggatgcgatttgaggagctcgctccgaaaagcctcaggggagaacctggcaccgggcgctggtgtcgcgtcgatctataataagcatccgcacctttaggggctcggccggtttttatagcccggtggcagcggcgacggcggcagcggtggcgggggcgggggcggggaacaatgtgcgtgtcctggaggggctgcctcgccaatgagctgggcccgccggggggctgggaagctgatgtcatccgggctaattccgctcaatgaaactcgccaggccgggcacacgcctcctccctgcgcacaaccaatgggcgcccgtggccgggagattcttggggagggactggaggagggacccgaggaggcgagggggaggagaagggcggctcaagggggatggagggagggctgagcgcgcttgggaccaagggagaaagggaacgtggtcaaatttctgtaaaaaatacggccaccacagagtcaggttgggggatgggatggtttggagactctgcagagtctaacaaactaacctgatgccccacgcagccgcaccttttgggatgcgcgcggaaaaccctggcgacccaggatccggggctggggtctcctccctagctcttcctctgtctggtttcccgccgcctgttcccatctcactggtttcatcaacacgtgggcatttggcgccccaaatgtaaacgatgcccaggcacaaagtccccactatcttggtgctctactcgcgcgtctaggagatggccgtggctgcagctccgacggcagccggtagcgcccccagctgggggcagggacttgaggggtagagggcgggcaaggagggaggggacggactccagaagagtgttttgaaagaattcacaactctcctttaggttgaggatggtgtgggtacagggacgagttatttccgcacggtaaccgcgctagcacaagggcagggtcgtgcctgtagttaaacacccctccatttattagcaggggagccggatgatagtaagtattttcagtgtcgtctttgtgatcaccacacgccttggggcaggggcaacgctggcatctgtagtccaagcagggctccgctgtaaaaggttagcaaagagccttccgtcccagtcgcctgctttctggaactgcaaagagaagtttcaggcctgggcaaggcttctccacgctgtgggccagacagcgagatggaaccactcgcgaccgcgttgggacatgttttaccgattgcaggctggctctgaaacctgaaaactcttgacgatgaggaattaagcccgaactggagaagcacctcacggaggtagctgaggtacggatgcattcacccattttacagatgggaaaagccagagaccgtgtgcagcaagcctacagaaaaaattgctaagcctttacagagcagccctgcttggactacagatgctggcgttggcggttccttatagtacaggcagccacctgtctcccccagtccctaatctcttccccgagctgaatttctcacacccatacatttcgaattcagacatttgtttctgcagatctcggatgctagcacttgacactgtgagcgcacgcgcgggcacacacgcacacagtctcctagggagtgtgaggaacgtcgggttacttccgttgttggggaacttttactgtgcaagtacggttttaaaaacaagcaaacaaattagcatagtaaataattggtcttcaagtagcaaagttacaaaataaacaaatacaaagagaaacccacgttattgcccctagttctgagatatgtctccctctgcggtctccgctagaagcccagcccgctctcgccttcgccccagtctcgtgccttctggagcattatttttcaatccgcgtgtttcccagctggctctgcagccatccgttaaatatgtatttaaaacatgaagaactgaagcgtggtgttatgtcgtccaacggttacaaggatgacccataaccgttcaattagtagaatctgtcactcggacgacgcagggagcgggggggtggggatcagaaagggctcgggcatttgtagatgcctccttcgggcctaccccgccaacagcagcgaggccatgtgtggtgcgcgctgtggggccaccagtcggggcgcggagttgtgcgcctgccagtgtagctaataaacaccagcaggcgcaacgtgcgcgctccttggttgcagccgctgaggttagtccagccgccggcacgtgtcccggaacccggtttctttttttgttgctgcccactggtgtctgtcctgcgaccgacttgcggcggtgagagcaagcggtctcaggttctttgcgcgctcggtccagtggctggagttgggagtcaggggtgaaagtcgaggggcccgtcttggcatggcgcgagtctagagcctggaaggcaaagtcggaagctctgtgctgctgctggccccttcttcacctggcaggcttccctcaacatcctcccgtcgccggagtagcttgggaggtcggggaggtctgtgtcgcccctgggctcccttggccctggtgccaatcggatgctgagtacctctcggtgtgtctcctatgcctccccaccccgtcccaggaataactagaaattagatcccggtgcccaagcttgccctggtgcgtcctggaggcgtccccaggacttgtccgggtcctgcgcccggcgcccggggtgggcgacctgggcgggtcccaggcactgcggttcccaccagcgcgcgcagctggggccccttcctggggaatggagtgctcatttgcagaggctaatgggccccggctccgggagttcctggttggcccccgcgtcctggtgctgttggcctcctccgtgtttttccctcttctttgtgtttctctcccacaaaagaccgggtgcgtgtcggggccggcctttgttggaccgccgggcggcccgggaggagcccgtgccaaaccggcgggctctcgcggggctccagggcgcagacctcccactgcttcccgggtccctcccgggccttctttctgattctctcccttcccttctccgagttcctgctcacattcaggctgcgtctcggcctggctgccaaacagaacgacgttcttgcgcagagctgaccaggggtggcggcgggaggcaaggctcccggcaccgg

SEQ ID NO: 5904 - DNA, 1423 bp, Homo sapiens
cgctgcgggacaggttcctagagatcgctccgggacggtcgtgacggcccccgagggacatgagagaagaggagcggcgctcaggtaagctggattttgcggtcggaattcgcgtagaaacgaaaacttctggaaggggcttagccccgagccccggaggcggacaagctgagcctcctggctgcaccctttggaggctgctggttgcagacgccgtcgtctcccaagggcggctgtcaccgcgtgcgtcggtcagaccaggccgcggtgccctcggcatccccgcgtcccggcggctgtatccggctcctccccacgaccgaggtcccgggcaccgcgcctctccctccggacgctctgcgcgacgtcgtcccagttctcatcagcatcgagggcagtccgcggtcattttataaacgtcttagtgtcgcaaccgttttcacttttactattttcaatgtttgcaacggttttcaatgaggctggaaaaatatcacttctcgctaaaagcgaccccgagttaggaggagcgcgcacccccgcggctccccctcccacactttccctcccctgaccccctctcctcccctctggtccttcccttgctcctcgcccctccagtagtcgcgtgctgggttcctttcctgctggggccggactctctcctccggccgtcccagcctctgctcctccgcctccctcctcctcttcctcctcctccgcctcctcctcttcctcctcctcttcctcccggagccgccagccgcgtcctaaacccgagcagggcgcgtagtgtccaaacctgcccgcgcggcccgcgctcttggccccgagggcgcgcgcacggacacgcgagcacacccacacccacgcgcacacggacacgcgcgcactcgaagactcccgcgcgctcgcacccacgcgcacctggccacgcgcgtgcattcccgcccacgcgtccctgccccgcccccggcgcgcactccgggttcgcaagtcgcgcgtcggggcggccgccctgctccgcgattggcgggagccggagcctccctgaacccggcgcccacaccatgggctgagcccgtcggcgccgagggagttagtgcgacccggctcggcgcgcacggccaaggcacgcgcgctggcacacgcgggcgcggacacgcgcggacacacacgtgcgggacacgccctcccccgacggcggcgctaacctctcggtaagtccagcgccccacgcgacctgcccggctcccacgctggctacagcggctgcggggacggggaggaaggcagcggggtggccctaggggctcactctgcagggctcttccgacggcgccgggacaggtggggcgtccagcgccgggagggacggctcgccagtgcggggtcccagggaggcgcgtgcagtcgggtgcgg

SEQ ID NO: 5905 - DNA, 1384 bp, Homo sapiens
cgagcgccttctgaagtgacggggccgggacgcgcagggaggcggcccaagaagcgcgccctaggccagcccagaatgcgctcggccgcgactaggacaacggcgggtggggctgggggcggctgccgggcggggagcggtcccgcgccctcagctacccctcaagagccgttgtttccctaacttcagctgccagaggctctgtgattggctgcggcacgatgacccgcgcacggattggctgcttcgggccggggggccgggcccgggggacagaatccgcccccgaaccttcaaagagggtaccccccggcaggagctggcagacccaggaggtgcgacagacccgcggggcaaacggactggggccaagagccgggagcgcgggcgcaaaggcaccagggcccgcccagggcgccgcgcagcacggccttgggggttctgcgggccttcgggtgcgcgtctcgcctctagccatggggtccgcagcgttggagatcctgggcctggtgctgtgcctggtgggctgggggggtctgatcctggcgtgcgggctgcccatgtggcaggtgaccgccttcctggaccacaacatcgtgacggcgcagaccacctggaaggggctgtggatgtcgtgcgtggtgcagagcaccgggcacatgcagtgcaaagtgtacgactcggtgctggctctgagcaccgaggtgcaggcggcgcgggcgctcaccgtgagcgccgtgctgctggcgttcgttgcgctcttcgtgaccctggcgggcgcgcagtgcaccacctgcgtggccccgggcccggccaaggcgcgtgtggccctcacgggaggcgtgctctacctgttttgcgggctgctggcgctcgtgccactctgctggttcgccaacattgtcgtccgcgagttttacgacccgtctgtgcccgtgtcgcagaagtacgagctgggcgcagcgctgtacatcggctgggcggccaccgcgctgctcatggtaggcggctgcctcttgtgctgcggcgcctgggtctgcaccggccgtcccgacctcagcttccccgtgaagtactcagcgccgcggcggcccacggccaccggcgactacgacaagaagaactacgtctgagggcgctgggcacggccgggcccctcctgccagccacgcctgcgaggcgttggataagcctggggagccccgcatggaccgcggcttccgccgggtagcgcggcgcgcaggctcctcggaacgtccggctctgcgccccgacgcggctcctggatccgctcctgcctgcgcccgcagctgaccttctcctgccactagcccggccctgcccttaacagacggaatgaagtttccttttctgtgcgcggcgc

SEQ ID NO: 5906 - DNA, 1361 bp, Homo sapiens
cgccgaggatgtggcctccgccccccgcagccgccgcaggagcttctgcctctaaagcggcaggcaggggtctcagcgggcccacttcaacctgggaaggccggtgcgtttccccacagaccccgcagggcgtttcttctggggaccactgaagccctggcatccccaaccccagcccctccgcgccacgggaaacgaagacgacactcttttgaacaatcccggatgtgtcaccacagaggggcattctacactggcccctaccccaacccccacctagcacattgcttgcccacccctcaaaccccgtgcggattgcggtacctagccccgggggaccctccagccctgccttcccgatccgcgtaggtgcgtccgtccacctaagggtagggaggcatgtccctccgggtccctccggccgcatggcttgcctgcccccctggtctcccttctccgcatcaggaggggcgtgagatagctaggtcgacccccaccccggcagtctgcggcgatcggccgccccgagcgcagcgccagacacttgggttggggggtgtcagcctgacgcgcaggaagggcgcagcggcgggagggggcttcatttcagatctgggaggcttgcctggcgccggccctcgcccgctctccgtcggtggaggtcgcggctggcggagaccgccaagccagaggaggggatccgaggtcccggctgggcgaaggttctggagggggagaagacggccgaggcgtggaggggcagccgcggcggggcgacccttacctgctcactgcggggcctgtccgtggggccggggcagactccgcaaaggacgcgcagcctgcaagtccgcggcccgcgcggcgcggggatggggagcgtgtgcgccgaggagcgcgcgccgagccgggtctccgcgcctgtgtggccggctggcggccggggtccgtgtgtccctgcgcggcggcgtgtgcgtgtgcgcacgcggggaccacgctcgcccggagccgccgccgccgccgtcactccctgcccggggccgagcgcagcgccccctttgcccgccccgcgcggcgcggcagtccagcttggctccgtcctgcgggagaggcgccgcctccgccgcgaagccaggctgggcgctggagggaggcgaccgaccaccgcctccccctgctcacttcacaggctggggagggggtgctgcaggccaatgagcgcccgggggcggggttagatcgagggcggtgcggtggggggcgcggtggggggcgccgggctgctcaacccgaccccacccgcagcacagactggagcaggagctgcggcgggaaatcccagcggcgggggtcgggggcgc

SEQ ID NO: 5907 - DNA, 1175 bp, Homo sapiens
cggagagccgggaccccgaagtccccactgtccctgccgaggcgccggcgccgtcccctgtgcccttgaccacgccagcctccgccgaggaggcgatacccctccccgcgtcctccgacagcgagcggtcggcgtccagcgtggaggggcccggaggggctctgtacgcgcgcgtggcccgacgcgaggcccggccggcccgggcccggggcgagattgggggcctgtcgctgtcgccatcgcccgagcgcaggaaaccgccgccacctgaccccgccaccaagcctaaggtgtcctggatccacggcaagcacagcgccgctgcagctggccgtgcgccctcaccaccgccgccaggctccgaggccgcgcccagccccagcaagaggaaacggacgcccagcgacaaatcggcgcatacggtcgaacacggcagcccccggacccgcgacccaacgccgcgccccccggggctgcccgaggaggcgacagccctcgctgcgccctcgccgcccagggcccgagcgcgcgccgcgccccggcctcttggagcccacggacgccggcggtcccccgcgaagcgcgccgaggctgcctccatgttggccgctgacgtgcgcggcaagactcgcagcctgggccgcgccgaggtggccctgggcgcgcagggccccagggaaaagccggcgcccccacagaaagccaagcgctccgtgccgccagcctcgcccgcccgcgcgcccccagcgaccgaaaccccggggcctgagaaggcggcgaccgacttgcccgcgcctgagaccccccggaagaagacccccatccagaagccgccgcgcaagaagagccgggaggcggcgggcgagctgggcagggcgggcgcacccaccctgtagcaggctgtggctcgtccgcgcgcagctccctcagcttcgcagcgccgcccgccaccccacacctcccacgctaccgggcacgggcggcctcctattggccgggcaccgcgcggctagcggaggttgcgtctcattggctcaggtcctgcagccgctcctggattggagcagtgtgctctggcgggaagggcccatcccgttggtcgaggcctgacaggcgcttagcgggcgactccctccccattggccgagttatggagcgctccgaccagacagcgt

SEQ ID NO: 5908 - DNA, 1087 bp, Homo sapiens
cgcttgcagctcggccgcgtggaggtgaccgggcggaactccgagggggcgcggggagagctgggcgggcccaccgctccagcggctgctgtcaggggccgcgaggctttccctgaagatgcagcgtagcatattttgcacatgagttcagaggaagaggaagtgtagccggcggacgcgcggcggcggcggcgggggcgcgtcggggctggagccggagcgcgccgggcgctgggcgcagcgagcgagagcgcggcggccgcgggctccggcgagggacagacgcaccgatcgccggagggacagacacacgaccacgcggcgccaccgcccacgcctccacccaccggcgcccaagtcctccccgcgccgcctcctctgtatggcacaaactttcctcccgggacggaacacgctgcctcagggagcccgcgaccgcgccttctcctccgccggtcccatacggtaggcggcggggggggcgcgacagggcttggggtgtcgaccggcacaggcccctccgtttggccccatggaccgggtctctggcgggtagtgggaaccgcgcgtggcgcctccctgcaggttgctctttgccggggctccggagctgccagagcagcaccccctggcccgcgtcggatggggacctgggctgatccttgggacgcctggatcttgggccaacttttttttgcggggaacgggtgtaggggagtcattcctggagcgatgtagggagaggcacttcggagcagcctgttgggggtcgtaggctctgcaggctcagaagcgcctaggaaggacgcagaggtgggggagcttggaggctacaggtgggtccaggacacactgccgctggggtcctcggaaaagaacaggagggagctggtcgcggagtccaggtttccggggtgcgcgcggcctgggtggggcagggtggaggcggtgcctgactgcccctctgcgtgtgccctgggaggtgggtttgctctggggacagaggtgctggacgtgtaggagcagacatgccgcgcgctccgaggaagcgccggaaccaccagaagcacagggacgcgggtgccga

SEQ ID NO: 5909 - DNA, 693 bp, Homo sapiens
cggcctaggtacccgggcagagggatgatcccgcgctctgcgaaaagcaacaggcggctgcaccttaccttgcgccagtcccgggccggggtggctgctccatcctcgtggctcagggaggaggcgttgggtgcgtatgcttaggggtgtgcccgctgccagggctgcagcggccgccacctccaaccagctgcaagccgagctgcccacctgggaccgggccggcccggcgggcttggctcccggcgaaggcggcggcgttggtgcgcggcggctggggcgcgggacgcaggcagtgcgtggcgcggctggcgtcttcgggcgccgccaccgagcgagggtgcggccccgggcggccgtgcggggcacgacttggctcgcgttgctgcggcggccgctgcagaccctgctccaggcgccgtagccttgcaggaagagcagacaaagacaggagagaggcaaagcgccgcttgcccagagatgcagtcggctcagtcaatagagggaaatcgcctccaaacccaggctgggaatgagggaggaggggcgaggcggctggggactagaaaaagcagcagggaattaacgtgacagtcagagcccagccagtgcctcgccggcgctgctctctcgcctcgcggttgcggggtccggaatggagagaggaggcgggggctgagcgttggctgccgg

SEQ ID NO: 5910 - DNA, 5065 bp, Homo sapiens; identical to SEQ ID NO: 5878

SEQ ID NO: 5911 - DNA, 307 bp, Homo sapiens
cgttttgggggcgacatcgccggggaacttgatgatgggcgacggcgcggcggcggcgtggctcagcaggcagcccaggagacagagcgccctcaggggacccgtgagcgcgccccgggccattagcgcctccatcgtagcgctccctggccccgcgcgtcgcccgggggtcgctggctcggtgcgtgtggccgcctcgccgcctggttggagcctgctccgcggcgcagggctgcgctccgagggtccgctggctcggtggcctggggtttgcccggctcagcggctcatggtccggcccccgcgc

SEQ ID NO: 5912 - DNA, 1563 bp, Homo sapiens
cggtgctcccgcagcccggacgccagcgccagggactcgccacaacctcaagtcctctcccggggctgggctccgcacacaaacaggtagcacaaaactaggacttagttggggtccgcaccccttcctgctcagacccgagccgccccagtccccggccgccgcgcccggagtccgctccaactcggaaagtggcggccggctgcggggcaggcgggcggtacctgtgagcagctccagccggtgtcccagcaccttcatctcggcgcccggcgcggcccggctctgggtggcggcgtcggggcagcgcgctcggccgagccggggagaggagcgcgggagacccggagcggagcggcaggagagcgcggagcgaagcggcaggagcagctcacagccaggagcgctctcccgcccccaacgccgcgctcccccctccaaaacggtttaaaaaaatccaccaattgcatggccgcgcacccccaaaaaggcacccgccgccacctggtcccggtgaactccaggaggcggaggaagggcgcggggtgggtgcggtgacaccgtgggaggtggtcccccgtgcccgccgcccgaacaaagagaccccgccgcctccgggcgtcgcggtggggggtcgcggacggcggctgggggtccccagcgcggccgggaaggcgaggaaggagagcgggagccgcggggaggagggggcgccgcccccgcggaggcgaaatggggcgggagcgagtcggtgcgggactcgcggggctagggtcgtgcgtggggctggggtcgtgctcggggctgggctgggctgggcggggacgcgcgcagcagccgcggcggcgagagaagctggccctgggctcaggggcgagggcgccgccgactcaccgcggagatgcggacgagacagacgcgcaggcggggagcggggcttcggcgccgccgacgcgcgggtgcaggtgcgggcagccaggagcccctccgcgtgcccgcggctgcaggggcggaggccgggctgggggcggtgcgccgcgggggcgtgcccgcgtgggtttggcgggtgtgggcgctcggcccgcggggcggtgccgggcctggggctagtcccggacggaccgcggtccctcgcgcgtggcttccgccttctgcgcggctggggtgcccggtgggcgggcgggagggcgagcggggaccgcgacgcggagcctgggggacaccccggtcgatccgcgcccccgccgacttctcacccgctccgccgcgcggactgtgctgggtgcgctgcgaggccctgcccgcccctccaggccccctgtggccgcgcggcgtcgggttcccgggggaggggacggcgctgccgtagtctttgtttagactcccaaggggaaccttagacctgcagagacatccccatcccagcgcccctgcgcctgctgcttcgcgctacccgccgtcgccgcctgggaaccgagggagaaaagcccttagggtcgggaagaaccaggggctcaggggcctctggggcgtcgtccccctccccccgttttcggagcccga

SEQ ID NO: 5913 - DNA, 512 bp, Homo sapiens
cgacccgaggctgtctacccggcctggcatgtcccggcgctcctggggcccctgtactccgctggttcctcgctgtggtgtcccgcagcccgaccatttctgtgcttctaggagcccaccctgggcggcagggaggcgttgcgtggggctcacgagttccacgctgtcatctccaccagctcctacctcccaggcgcctgccctcccgcactgtcaggttctgcctccgcagcatttggcagatctgagcccggtccctgtcacccctccgcgggagcctcatagtgaccctggaggagaagcagcaggagcccacaggccaccgcgctcggccgcgcgtgaagtctgtgcagccgcatggtcggctcgctggtctcggttctctgccgacggacacgctgctgttcacccagaggctgccccgggtcggtccagccgtggatccagtgccttgcccagcctcggagtttggactgggcagggagtcggcggggtgcgctgacttgggccgg

SEQ ID NO: 5914 - DNA, 1070 bp, Homo sapiens
cggcgcccggggctcgactggtgggaggggtccggcagaggccccgcctcgagatcccagcacgccccgccccgctccacggtgtagcacagactccgcggagaacgcgagcatggtcggaaatcatcgcctttatttcttggcgggtctcgagggaaggtcgggaacgggcgggtcctgctggcctagagggcgtcaggggcagccaccggcggctcgggatcctcctcgtcgcgagcgcgggggagctcaggtccggcctgccgggggctgggtgaggctgcggaccaggttcctacgctcctcgcgtccgcccgcgtctgccctaggcctccaccgcggcttcctctgtccccggggccgccctgctccccacagaccccactctcgggggccgctcccaggacccccgcccgctctctcctgactcggtccctgcccgccccgcctcccttcctcgggctccctacctctccctcgccggccccgacctcgggggcgctccggacctgctccccgaatatctccagctccgccttcagcctgcggagaaggggccgaggagacaggaggaagagagcgagagtccaggggacgaggaggaagccaccgagacgcggagacccgacgacgccgagggaggcacaggccggggaagcggcagtcgggggcggagcgggggacctgggcgggttcccctccgccctgcccctgccctcctcgcccactcctcccttcccctctcacccgtcattcaccgccatggcgccctcgacctcaggcggcgagtgcagccgccgctccacctcccgcagcttggcgcgcaccagcctccctgtcggtgggcgggcgtcaggggcagggccgaggcccgggcacatccccctccccccgcccacctggcgcgggaggctcactctccgagagcagctgctccttgcttctctccagggcacggatctcccgggccagtcgctgctccagcatctgcgaggacaaagaggaggcctccccgtttggccgtcctcttggctacacggcccgcccctccccttttgtgcttctcgcga

SEQ ID NO: 5915 - DNA, 766 bp, Homo sapiens
cgggaatcccacgcccttgcaccagcccgggggctcggacgagcccgggagccgctggtcgccaatcaccgcgcggtggagaggcgggcgctcggctccggcgcgctgggggagccagctggcgctgtcttccccatcgcctcagacgctcacaccgacacagacagacgcacagacgggcgggcagacaccgacagtctcccaaccgtttgcgctccagtcccggcccagggagccccccgtaccctctggggtgccgcaaactgcagctcggcaggcccgcgccgggagaagggagggcgcgcaggcggccggaggaggggaggtcccagcgcgcccccgctgcgatgtgaacggcggcggctctcacctggagccgcacctggggcgccgagctccggggccgcggaaagaatgcgcgccgcccgtgcgctccgcctgccgcgtctggccacccgcagccgccgcgtccgcacctgaccatggagtgcgccctcctgctcgcgtgtgccttcccggctgcgggttcgggcccgccgaggggcctggcgggactggggcgcgtggccaaggcaggtgccgccgagcggagctccgagagcgggtggcagggggcgcccgacgccagccccgccgcgcccctcacgcgcgatgtcaccttttctcttgcaggcgctccagctgtgctgcctctgctgtgcgtcggtcgccgcggccttagccagtgacagcagcagcggcgccagcggattaaatgatggttcgt

SEQ ID NO: 5916 - DNA, 363 bp, Homo sapiens; identical to SEQ ID NO: 5689

SEQ ID NO: 5917 - DNA, 2919 bp, Homo sapiens
cgagcgcgcaatatgagtctcaaaggccaaactccggccagtcaggagccggaaggctgagcccggctgacctgactttgagcttccccggagttatctcgcataggcgctcgctctgtccaagggcacgcgacgccagcgggcagccggtctccgtgaagaatggcctctaaacaacttattttacctcgttgtaaagagagggataaaatgggctttccctctccacggatgcccagccttctgggcaggcgcatggccgggcggcgcccagcccgcagccccgatccggacaccccactgcatccctcccttcccggtcccttccccgcacgggcgcccgagagacggacaaagagttggggccaagtttgagcgccgggcacggccaggctcagggaaggaaggtccccggcagacacctgggtaccagagttggtgcgaggaggaaaagctgggaggcgaattcacaatcctgggggtggagggcaggcaggggaggggaatcaggccaatcccagccgagtgagcccccagcgagctggggctccggatgggaggcctgtctcgcgctccaaagaaaagcaaaccgccctcccaggtccgcccggattgccgaagcccctctggaaaaactccttcccctcttacaccaaactttgcgccgggcctcgttccctcccgggtaggcagcggcgcaggaagggttaagccagcccgtcccagctgacagtcagctgattgggccctgattgacagctccgaaaagtttccttgtttctatactattatgctaatcgcggccgctctcgccgcctcccattggcccggagtgccagtcaatttctcatttggacctgacgtcacgagtgctataaaactcagcaattgctttaaactcttcttgctggatcagaggctttaaaatcttttttcatcttctagctgtagctcgggctgcttgtcggcttggcctccccctcccccctttgctctctgcctcgtctttccccaggacttcgctattttgcttttttaaaaaaaggcaagaaagaactaaactcccccctccctctcctccagtcgggctgcacctctgccttgcactttgcacagaggtagagagcgcgcgagggagagagaggaaagaaaaaaaataataaagagagccaagcagaagaggaggcgagaagcatgaagtgttaactcccccgtgccaaggcccgcgccgcccggacagacgcccgccgcgcctccagccccgagcggacgccgcgcgcgccctgcctgcagcccgggccggcgaggcgagcccttccttatgcaaagcgcgcagcggagcggcgagcgggggacgccgcgcaccgggccgggctcctccagcttcgccgccgcagccaccaccgccgccaccgcagctcgcggaggatcttcccgagcctgaagccgccggctcggcgcgcaaggaggcgagcgagcaaggaggggccggggcgagcgagggagcacattggcgtgagcaggggggagggagggcgggcgcggggggcgcgggcagggcgggggggtgtgtgtgtgagcgcgctcggaggtttcgggccagccaccgccgcgcaagctagaagcgccccagcccggcaagctggctcacccgctggccacccagcacagcccgctggcccctctcctgcagcccatctggcggagcggcggcggcggcggcggcggcggcaggagaatggcatcagaactggcaatgagcaactccgacctgcccaccagtcccctggccatggaatatgttaatgacttcgatctgatgaagtttgaagtgaaaaaggaaccggtggagaccgaccgcatcatcagccagtgcggccgtctcatcgccgggggctcgctgtcctccacccccatgagcacgccgtgcagctcggtgcccccttcccccagcttctcggcgcccagcccgggctcgggcagcgagcagaaggcgcacctggaagactactactggatgaccggctacccgcagcagctgaaccccgaggcgctgggcttcagccccgaggacgcggtcgaggcgctcatcagcaacagccaccagctccagggcggcttcgatggctacgcgcgcggggcgcagcagctggccgcggcggccggggccggtgccggcgcctccttgggcggcagcggcgaggagatgggccccgccgccgccgtggtgtccgccgtgatcgccgcggccgccgcgcagagcggcgcgggcccgcactaccaccaccaccaccaccacgccgccggccaccaccaccacccgacggccggcgcgcccggcgccgcgggcagcgcggccgcctcggccggtggcgctgggggcgcgggcggcggtggcccggccagcgctgggggcggcggcggcggcggcggcggcggaggcggcgggggcgcggcgggggcggggggcgccctgcacccgcaccacgccgccggcggcctgcacttcgacgaccgcttctccgacgagcagctggtgaccatgtctgtgcgcgagctgaaccggcagctgcgcggggtcagcaaggaggaggtgatccggctgaagcagaagaggcggaccctgaaaaaccgcggctatgcccagtcctgccgcttcaagagggtgcagcagagacacgtcctggagtcggagaagaaccagctgctgcagcaagtcgaccacctcaagcaggagatctccaggctggtgcgcgagagggacgcgtacaaggagaaatacgagaagttggtgagcagcggcttccgagaaaacggctcgagcagcgacaacccgtcctctcccgagtttttcatgtgagtctgacacgcgattccagctagccaccctgataagtgctccgcgggggtccggctcgg

SEQ ID NO: 5918 - DNA, 2267 bp, Homo sapiens
cgggcgggggagggggcctgccggcagagaaagtgcggagagggcagagcagcggctcggggcgtttctgcaggtggacatgaaacgcacgatatgcaaatgaatgcaaagtgtatgcaaatgacctggccccgggacccgcgggaagcgagggcttcgcatcggacccgcccgggaggctgagcggggggagcgcgacccctgccggccacgcacggaggtggccccgggccgggccaggcgccgcgctgggggcgagcgcggggcagggggcgggggcggcggccgaaggagcgacctcccccccaactccccacctccccaccccccccacaccccccaactcccgttcagcctcccgcgcggccgccagaagccgcggttctaaagctgcgaggcccgcggccgccgactgctgcgaggtgggtgtgcgcggcctgcggagggggagagggtgggcgcaggcgggggccgccccccagagccgcgccccctccacggcgcccgcacccctcaacctcttcgctcgcccccgcctgcgcctccccgcgccgccccccgcaggaggcggcgcgcccgtcgccccctccccgcgcccctctcccctctccctgctcccggcgctccgcacagccccggcccccacggccagttcttagggcgccgccccggtggcggaggcgttgggggcggctctcggcggcggggagcccctctccaggccggcgccccggggcggagctgagcgccatgggcgccgggcgggaggcaggtggcgcagcggcggcggcggggggcaggaggcggaggcggagcgcgcggggcgggggccgcggggccccgtgagactctcgggcgagcgcgcggcgttggagccacaggcgcggcggctggacccggcgcgggccgcggaggccggagaccgccccgggcggggtgcgcgctttgttcccgcgcggggtggccggagccgagtccccggcatggcccaggcggccgccccgcgcgccccagccccgccgcgcgcctgagcccggtgcggcgccagaagacagcgcgcagccgcccctgagtcgtggaggcggggaccaagctggaaggagcagcgactcccggaccgagtcgcgagtgtgcgccgtccgccgcccgccggatcccccggaccccccgaccgtaagtgccgtgtccgccccgcgcgccgccgccgctctaccccgactccgcccgcggctgccgttcccggatctgcgccgcagccgcgccgagcgcacgggccgttttcaaagttggtgcccacggcagggtggagccaacccgcccagcgcccacccatccgggctgagcgcagccccccgtgagcagagcctgacctgcgggggctgcggcgaaacttcgaggggaacgacgcgcccgggcgctgggagtctcgcgggctcccctggggccgcccggttttcctaacaaaggccccgcggcccgcgtgacggagacccgggagtggggaggccgagggcggccctgggagaggcagaggtggcggcggccggtctggggaggggggtccagagctccctcctgctcctctccctcctgcccgggtccccggcgctgccccgcaggctaaaggtggtccgcgctgggggtcctggaccctgcctggcatgcggtccctggggtcctgacggccgcgggcctcggcacagccgggtggcagcgatggcgcgcacagcctttgggaagcgtccatctgtgttgggcaggccccgagccaggctgtgggaacagcggggagggaggtgtgagcctctgtggagggacagatggctggaaacgcagccctagacggctgacttcacttacgtggagcagaaggcggccaggctggtggcggcgactcagagccgctgggctccgaacacactgcggggctggcgctcccccgcccctgcgtccgcccgtgtgtgctggggccgcggccgggctgtgcccacccctcattcaccctgtgggctgaggccggctgacttcaggcccattccagggcccaggaagaaaaacctttcccttgaaaagagagcacgtcgcgtgctcctgtgggtgggggcttgtcggtagctgtcaggcttgtggccccagccagggtgcggcttctgtgcgtccggcccgggtgtgcgtttcctctcctggacgaggaacaggaggttcccagggcagccacctcggcggacgggtcggccggggataaggggcgggggccggtttttcgg

SEQ ID NO: 5919 - DNA, 265 bp, Homo sapiens
cgcagcctgcgaccgatggagcaggaggcgcgggtgctgagagctgcgggcggctttggccgggcccggcgcctgctggcctccgcctcgtgggtaccctgcatagtgctggggctggtgctgagctccgaggagctgcttaccgcgcagcccgcgccccactgccgaccggaccccacgctgttgcccccagcgctgcgcgccctgcgcggacccgcgctgctggacgccgccatcccgcgcctggggcccacgcgagccgcga

SEQ ID NO: 5920 - DNA, 374 bp, Homo sapiens
cgaacagcgttctgaaacgcagaaacgtgcccattcgaattgttaacgcgagcgcagagcccactgacaaagcaaaataagacaaaccgggagtcagaaaactcagcgacccacaggatccaccgtgatgtttcccacaaatgttaccgcgaaaacagtcggacttgaaaataaacgcgacctacctggttctcggaaggggagaaggatccgggcgaaaggcgtcagttctccctcgctcgccccgtagacgcagcgcaggccccgagctcccgagcggcggtttcagaacccgcgggtcacccgggagctcctcccgcagtaccagccgaaagctcccagcgccgaggagggcgggcggctgccctccccga

SEQ ID NO: 5921 - DNA, 1133 bp, Homo sapiens
cgaacagcgttcttaaactcagaaacgtgcccattcgaattgttaacgcgagcgcagagcccactgacaaagcaaaataagacaaaccgggagtcagaaaactcagcgacccacaggatccaccgtgatgtttctcacaaatgttaccgcgaaaacagtcggacttgaaaataaacgcgacctacctggttctcggaaggggagaaggatccgagcgaaaggcgtcagttctccctcgctcgccccgtagacgccgcgcaggccccgagctcccgagcggcggtttcagaacccgcgggtcacccgggagctcctcccgcagtaccagccgaaagctcccagtgccgaggagggcgggcagctgccctccccgacctcgccccgcccgcgcggacgcccccggccccacgcggggaccaccccgggactcccgccggaccccgcgcgcccgcggccaacctgcgtgcacctgcgccccgcgccacgcccccggcgccccacgtttagccctcactgggtcccgcttcttagtggctctaagccccgccccctcgctggtcaccgcaagctccgcccctcgaggccccgcccctgcaaggcccgccccttcacgactcaggccccgcccaccacggccagcccgggtctaggccccgccccgacacgactcaggccccgcccccggccagcttcgctcctcgcgcgccccgcccagcaatcctcgctgaacccggcgcggtttccccagcgctgctccacgccgcagtccagcgcctggagtccgcgcgccccgagcccctgcccgctcatgcgcagctgggtcacccaggtgcacccacttccttgctgtcccgccgccctccctgcccccaccccgcctaggccctgggtgtcccttctccatcctccctggcgcctctgcctcaggccacctggccgtcctcctgggctccccgctcgggggcggcccctggtccgacggtgccgcagacgcgcgcgcacaggccagtcccgcggagaggctgctctcaggggctaggcggggggctgagtcagaggctggggcctgccaggagcggggcggcctggggcgcagcagcattggagctgaaggcgagggcggcccgcgccgg

SEQ ID NO: 5922 - DNA, 2358 bp, Homo sapiens
cgggacccgctttccaagcggcgcctcctccattttccgcgaaccccccggcggggtctgtgtggaccaagggagatcagagaccccccgccgccaccccacccaggcggagacggcccacccgaacccgcacgggtccttccttctccctggaatttgcagctggccctttccgaatgcttgctcccctcctctccccacgaaagaacagtgtcctgggactcggggtgcggggcagccgggttcgctggagctgttcagtgcggggaagagccgtcgagactgggagaaggggcgctggccagggaggagacggggcagggagcggactcgcgatccgtactctgggcggcggtcctcgcgtcccagccgcgtctcccgatgacctccagccgcgaagggcgagcgggcgggggctgggctgcgggttcgggctccaggaggcctgcggggccggggaggggcgtggagtggtccgaggaccggcttggggactgggggcaggtgcctggacggacgcgggccgagcatcttccccgggggcgggcgcagtgaaaacaccttgggaggcggcgccgcgcggctgagcgctgctgccttgggaataggacggcgctcggcactgcgagctgagagcactttcataaattttgtatgggaggcgctccgtgagcgggggcggggagcggagcgagagggagggagctagagagcaagggagggagggaggaggagaggagggggaagccggggggaggaagggaggcgccccgctccgccgatcgctcggtcctgcaaacgcgcgccgggcgctttccccggagctcggcggtgcgtgcgagcgcccttttgctgcagccgcggcggcggtggtccgagggggcggagaggagggggctgcggccggccggccagggggcggcgtcccccctcaaaaccgcctgcgaagtgctccgggtggcagaagcaggccgccggctccgcggagcaagccgctcgccccggggctgagcaagcgcgcggggctgccgggcagcaccacggttgcttgcgggcgccggtgccctcggcgcggggctggagctcaccatgcccctgcggggccgggccaccgggcacgagcggatccccggcttgcccccgcctcgacgcgctcggattagctgcagctggcgcccagggatttgaatctggaccccgggagggagtgcgcctaggccgacctcggagcggcggccccgtggccaacatgcttcgcaaaggtgagttggagccgcaggggcaagttgaagttgaatgcgctccggaaagagccgcgagcccgggcgccgcccggcgccggggctcccggtctgggaagtagcccccggcgggctggtgggttttgccgggcgcacccgccgaggggctgctgctggggctcagctcccgtcagcggccagttgtgagacacggggttttctccatggatcgagtggccaggcctagagatccggcccggaggggtcagtcggagaccagagtgagcggccggtggtggaaggggagccggcctcctgggacctttgctttgctgggataaagttttgcacttgcagcctccattccctgcgcgggcacacgcccttgcttctgccgctttgtggaggccgagtccgcacggcgcccccgtgcagccagcggtcagtgaccgcgcggcccgggcgctccccgcgcgccctagctccccagacggggcccggacgcggacgtcttctctgcagttctgctctgatcgctagggatgggctctgggcacccagcggctgagggtggggagcggccagcgcctgatgtccagttcctcaaactttcattatgctgggagcggagggacgcgaaagccgtgccgccagtgtgcgcgaccggtgcacagctcaacttgaggacagctggcttcgcgaccaccgtagctagacgccccagcagcccggcccggtacggagcgcggcaaagttggtgcgggcaccggggaagtcccgccgcgcccccacgtggttgccacgcggggcgccgtcccccgggccctgggagggcaggtgatcacgccgggagcccacgggccccgccaccagctgttccagcctctgcgtctgcctctcccctcccaggcccgagcaggctgtggcgccccgccgggatcccccccgcgcctggcccggccaggaggctgagaagccgcggcgcctgcggctggctgccccggccctgcgggagcggctgaggcgggagctcaggtagccgaggggcctgatccctgcgctccacgctccagccttaatccgcccctgtttccatggcaacagaccgaggtgtcgt

SEQ ID NO: 5923 - DNA, 1050 bp, Homo sapiens
cgggcgggcagctgcggctgctgaggctcggtggggcccctccaagacgcgtgtccgcatctgcccgccgggcgtctgcggggtgcagcgtccactggagcgcgacagcccctgggacagaggaggacagtggcctcgcttccctgtgcgatcgcccaggagctccgggccggagagtgcgagcggggaaaaggggtcctgcacctagagtggggcggacgtggcgaggaagccaggggggaccgggaagcgaggcccgcggtgcggagggcgcggggcgtggggggacacctctcggagagacaccggaggggcggaagtaaggagatggaaaggagagggagatcggggagatagacctgagagacccagaggcctgcagagagtttcatccgggacccttcagagcccaggaaagagcagatgcggacgcgggagggcgccttacgccaaagcgggcagcaccagtgaccaaaacacgccccgcttggcagccccgggacgcacctctgcctcggcagcgcaggagaggcttggacagcgcgagatgctagggcccaggctgcccctagagggctggcccgaagcgttggagtccaaagacgcctcccaccgccgccgggtggcagaattgggggcaggcgcgtcccacagaccccgaggggtggccccgccccagggccgcggggaggcgcccccgtgcggggcggagttgtcaccgccccctccccaatccccggggactgtggccccttcttaagcccgcggcgcctctagctgcccctcactcgtctcgcccgccagtctccctcccgcgcgatggcctcggcgctgagctatgtctccaagttcaagtccttcgtgatcttgttcgtcaccccgctcctgctgctgccactcgtcattctgatgcccgccaaggtcagttgcatctccaggcagcccttcggacacccggcgtcctgtgcccactaacgggcaccgatcccgggagccctgagctggagcgcacggatttcgcggggagcacagctctcccggggcgcgcgc

SEQ ID NO: 5924 - DNA, 1731 bp, Homo sapiens
cggccggccttagctgtcactcaggcaaccccggagccgccgcagacaccggatccactggaagggggcgaagccgcggggaggaatgggggacactggggaaggggcgtcgcccctgccgcccccgccctctccagtgccattgggcggctgctgcggagcccgcgccaccttttctccatcccaccccgcccgtctggccccgcctggccgctggtccgcgccccgctgcgctcgtccgggggctggtccggcccgggcctttgacgtcaccagcaagtttgctgccctcggcgtcccacgtgtggcggcggccagcggcggcccaggaggcagccggtgagcgcctgcgagcagagtggcgggggccgctgacaggtcccgcgcagcccagcccagcccagccacgcggctcacaggtggggtccaagagcagtttggagcaacccggcgctacggagaggggtggacggctctgcacgggcctcctgtctcccgctcgggcagagggactcggggggacctcgctccttggctgagagaacctgaactcgggcggagagaacgcgcccaggcgggcaaggggaccagagaaagccggggctggaagtcactgtcgctcgccactgtctggagcgcacggagcgcagaggcccggcagccgcgcgtgccctcacggggaccgagccagtgatgcaggatcgctgagcggagatccgcgccgagaagtctctcggggccggggctgagacgcacgccttcgacaccgctgccaagaccccgattccggcgactcttgcggggaaccgaggggccaaggctgccccaagctcaggacttgggcgagtctaagacgatggtttcttaagcacggacccgcgttccccttcccgctccctcgactggaggcagggatcctgcgcggggcccccgggattccgtttccccgcggagccccggccgctgcctcccgggacagttcgcacggccacaggggcgcacggcgatgtggcctccgtccagcgcgctggcccgccggggggatgctctggcacctgtcggggtccaggcctagcatggccggcgcgttgcccgacgtcgcctccggctaggatggcccctccgggcccggccagtgccctctccacctcggccgagccgctgtcccgcagcatcttccggaagttcttgctgatgctctgctccctgctcacgtccctttacgtcttctactgcctggccgagcgctgccagaccctgtccggccccgtcgtggggctgtccggcggcggcgaggaggcgggggcccctggtggcggcgtcctggccggaggcccgagggagctggcggtgtggccggcggcggcacagagaaagcgcctcctgcaactgccgcagtggcggaggcgccggccgcccgcgccccgcgacgacggcgaggaggcggcctgggaagaagagtcccctggcctgtcagggggtccgggcggctccggggccggaagcaccgtggccgaggccccgccggggaccctggcgctgctcctggacgaaggcagcaagcagctgccgcaggccatcatcatcggagtgaagaagggcggcacgcgggcgctgctggagttcctgcgcgtgcaccccgacgtgcgcgccgtgggcgccgagccccacttcttcgaccgcagctacgacaagggcctcgcctggtaccggtgagcggggcgggcccgg

SEQ ID NO: 5925 - DNA, 3535 bp, Homo sapiens
cggccgcgccaggagctgctggtgcagtccaggaacgcagtgtttggggccagttgcggcatttacagtgggctcctccggcagcccgatccgccgggtcaccgccccgggccctgtgccccctggacccgggagtcctgcttgtcagttcagggagatggctcgggaggacgaagaacctcccgcctcccgcggcccagccaagcccttgcggccgcccgggtccagccgccatgcgtggccgctcgcagcgcagcccccgggcgcaagtcggcagccgaacctcccgggctgcgctgtccgctgcaggcgcgcggcgagggtttccacgcgacttcgttcttcattcagcgttttttagtcaatcaaaaagaacgtggcaggtggagggcagccgcctaagagactgcgtgagccttcctgtggggatttccatagcttgccccaggtgcttcaaaaccgcctgacattaagggttcagtccttttcctgccagttcctcccaacccggcccaagtgtgtctgatctcagaaaatcctaggctgcctcggggctctggcgggttccacctggaagggcgctagttatagcctgccgcctggccctggaatcaccatcccaggaggagggggagtggtggtggtagaagtcataacaatacaatcggtgacaatagctaacgattagagaggccctcacgtgcctgcgaggcaccttaccgtaccagcgcattcactcttcccatccctgcccagaacctgcattattcccactgcacagatgagagcaccaaggttcacgcgactagccaggacgtgaatccaggcgtcggactccagagaccccattcttatccaccagtgtcccgagaatgggtcacagcccgggaacggtgggaaagatgactgtcacggttggctaaacctcgagacttgggcaactcctgacaataataaaaaaccattaaggacaaaggggaaggggtaggacgaggctgggaagggagccgttttaatccgcggggtcagccctcttttattctccaacccacccaggtcccgacagtggggtgggcacagggagaggggttcagttatcttctcctcttttgttttcccaagtcttgagcgtctgtgaagctaattgggcctggaggggtgtctgaatgtcgtgctggctggggttacgggtggagaccccaacgaaaatgtgggggtcgttacctgggcccctagtcgaagacagttatcggaggccgaaatctagacctcctgcccactcgcgccttacccgaagctcgggcaacccaacagctcaccccaaagaccagcagctgcggaaagcagtgggcagaggtagtgattgtgaccccggggccactgtccctttggaacctgacccgcaacccgactcgagaacagaatttccggaagccgcgacctcgaagcaaccctcatttctcaatcaatgggccccgaatattctttgctccggacgtgtaaaagccccgcggagacacgcgtccttgctttccctatcccagcaccgagggcagggaggcggaaacgggcggcggtgcccggaggcccggacgccttcaaagcctcgcgccgctccagccggttgcagtgcgcgcctttgcccgacagggaccagcacagctccacgctccgcgcgccgcccgcccgccaggcggaggcgccgggccacccgcccggctcaccctcccgagcccaggcggctcgcgagcgaggcgggtctgacacccttggggttccggtaaccaggcggactgtaacaaaaagttaacagactctgcggcctcgccgggacgccgcggcccccaccccctctccccatctgggaagcagaagctgctctagaagttccttgagggcggagaccgaccaaaggggctcagaacattcccagcgtctcgggctccgggaggaaaaaatttaaaacgagtcataaaatacgattcgagtcggatacccccatggttagagggtggctcgctttgctgagggcggtctcagtcgctgcccttcttctttgcggcgaggtcgcctgatgaattcaagggcaccagtgctccgcgagaactttctgtgggttgtgacgagaaccaagcggagcgcaaccctcaccgcacccggacaggatgcgctgcgcaatctgccgtagtttccctgccctaccccgggtggtccgaagctgtaaccctgccaattccctatcatacgccatgtctcccttagctcagggtctgaatcgacgatggagaccctgcccctggcagggaaactcaccggtaccaagcgaggcccttgtcgtagctgcgatcgaagaaatggggctcggcgcccacggcgcgcacgtcggggtgcacgcgcagaaactccagcagcgcccgcgtgccgcccttcttcacgccgatgatgatggcctgcggcagctgcttgctcccagacccactgaaaaagctggagatggggcttggggagtccggcacctcgggactctgctcctccgggctcgcagcgccctcggccatctccttgcctgaagccagtggggtggctggcggcgcccggaacggcagcctggggggcgtcccgtccggagctgtggccagggctggcgggtcgtgtgcggcgcgggacccagagcccaggagcagcagccccggcgcggcggcgcaggagccggcgcacgagtacaggaacatatagagccagacgcagagcatggcgaagagcagcgcgagcttcctcctcaccggcggcgggggcggcggcggctgcggtaggagccggccggggacatcgaggcaagatctgccgccactcaggcgctgccccatgcgctgcccgcgggcgcggccagggacatggctcagcacatggcgtgggtcccgccgggcagtgagcgcagagagggttccccggcacgctggacgcccgggtggctcggtttattgcccccgtgtgcccgcggccgccgctgctgctgctgctcttccccaggtggcggcggcagctgtagcggcggcggctcttgacatgttgcccggcaggagctgcaactggaacggaaagtcgggacggcggtaactgctgggcgagggtctgctcccggggcgcgacgacgcgctcggggccaggaggacgttgcactctcgcgccctggccactctagactgtgcgcaccgccgcacgccggggctgcctccttgcagtcctaagaactgagcctcgagcagccccggcacttccccgcagaggctgcagaggcgaactgcgcaggaagagagctgtggaccgaggtggagtgggcggtcccggccttccagagtgacgggctgctctacctaccaaaaaccccgaacgccatgcaaatacaggcgcttctccgagagctcagcagccaacccgctcccaggacgagggggtgtggaaaggcttctgggcggtgtagggcggtcaggggttgctattggcttcggaacaaggggcgggcccaaaggggcgg

SEQ ID NO: 5926 - DNA, 2896 bp, Homo sapiens
cgacccccggccgcgaacccaagcctgccgccttcgccgcgcccaccccccagccccctccctgccccggcgccatcccaggtcgacgtctctaaccaaaacaagcccctcccccaggagccccctccccctgcccgaggcccagggtcagcagccccaggagggacctcctccccaccccactccccccggcagaggtgcgagatttcattgtcagcctggccactcgaccgcgcgtgagactggggcgcagggcaggggggccactgggcaggctctcgtgcggggagtggggaggggtctccaggggaagtgtttgaagccactcctgcagctctgtccagatccggaagccgccgaggaagggaggaaggcgggggtggggagagcgcgaccttaagcgctggcgggcggcgaggaggggccgcagcggcccgaggaagcgcctggaggcgtcaggggcgccgagtccccagggaggccgcgctctcgggaagtttcccatcggttgcccggagcaggatcggacgcgcggatcgccctccccggtccgaccagcttcggggcgcagattgcgaacttgaacagaactccttccttctctggcatctctcgcctccccatccgtggccaccagccccgccatctcagccccatgccttccgccaataccacattcgtcaagaccgctcaccaatgctttgtggaggaaaggggaggggggaatccccagcacaaccaaactgtggccaaaagcggccaaaaaaaaaaaaaaaaaaaggaaagaaagaaattccttcttctgagaccgattccctcaaccagcgtggaaaacccccaaacatgcaaatccgcaactccagccaagatcctggcgccgcgggaggggtgtccgcggcgggcggcgaccccagcctgcagccccggactccgggcaggtctgcgcgcggcggcgggccgggggctcggggagccctggcgcccacagcagcccgccgaaaacacaaagctccgccgccaacaatacctgcgggctcctcctgggtctcccgggcgccggcgctgcgcgtctcgccgtctccctttcccccgccgtctctctcctctcgcgcacgctctccctctcgcctcttccagaacgcggtggccagatgagatccttgggagaaacaaatgtgagcgctcgcacgaatcctttctctcgccagccgcttgcaacggccccaggctcgctcctttccctcgcgctcccgcgcgcgccgcgcctctcgcgccccgcgtttccttcttagcagcccctgcgagcgccctcagtagccattattcacaggccgccgggggtcaggaggtaattagagacggccccgtggccgcatccactcggtaagcgcgatgctggcgcggggcgcgcgcggggaggggcgcgcgatgagggggcttggctgcgcgcagcccgcgccccagactcgggggaagggaggaggaggagggggcagggaaggaggaggcgggcgggggggcgagagatgagctcgggaagggagcgggaggagggggcgccggggagacgctcccttggctctcaccgcggggcctcggggtcacccgctgcgaggctccgacgcgcttagggacggggggtgtgagtgtaagagtgcgcgcgcgcgcaggcgtgtgtatgtcaaagatagaggaggggagggagggaacgctttaatatttttccagtgacttacgagcctgcgggtgaggtcttggctgtgcgtttaggtccgtgtgtgtatcaatgtggctgtatatttctggtctgtcctacgagtgaatgtcacggggcttgggggggggggtctggatacaagctagtgaatgtgtttctgggtctcagtttgactgaatgatgtggcgctgcgtggggctgtgtctgtgcgattgtttataggggggttgtgtgactccgtgaggtactgcgtgggtgggattgcgcctgtgtgcggttgtgtgtatatgggattgtgcctgcgtggggctgagtgtccagagggcagttgtgtggccatgtgggcctgtttgcgagtgggctggtgggtgtgtggggccgtggggctgcgcatgtaggggcagtgcgcctgtacggggctttgggttaacttaaagggctgtggtgggtatctgcaggcggttgcgtgtgtggctggatctgcgtggggtctgaggcctggcgggtgggggttagtcctcctggcgtcggggatcgcaccgcggcagaagagccgcttaaggcgccaacaggcagcgccggggtcgcggcgcagcgcgacgtgtagtagcggtggggcgtagagagaaggcggagaagaggggggccttcatcgcgcgcctcccctagccgcatcagagacgcagcttggagatcctgccgcttgccggccccgcggtcctagaagcacagggtttgggggaccctccccagctgggggagacgcctactggccgggaaggcagcgagaactgagactcgatgattctggcgcagcacagaagcatgcggcaaggaccgccaggagaggtgggtcgcggcccggagacagccgagaactaggccgagacaaagaagagcgggaccggggaccttggggccaaaccgcgcctctaggtttcccggcggccgaggggagcgcactcaaggccggcgcgtggagcctggcggaggtggcgcgggcccctcttcgctgcagtcccagcagccgctccagagccctgggggcacgtaattaggcgccacagggcagggccacggtgaggggggttctgagtgcagctggcgggcgccgagccccggggctgtgattgagcgctcagctggcccgcccctctcccggccgctcaccgcccacgc

SEQ ID NO: 5927 - DNA, 2567 bp, Artificial Sequence
  Description of Artificial Sequence: Synthetic polynucleotide
gygttgggygatgagggatygttgggtaattgggggtataggatygggtttygttgggttyggggtagaagygtygaagtttygattyggaaygyggtgattttattaaygtagaagttygygtagtygagtagaggagtttttygtaggygattttyggatagaygtttttgygyggttygygtggtttagtttygttttaggaaatttttygygtagttttygttttatgygtttttatttagttttttttyggggtygttttttttttaaagtagtttttygggtttattgggygttttygtaatygggtyggaatttygaayggtttygygtgttattyggttattttggtaatattattyggyggygttyggyggtttaattttagtttgyggtttttttygagtttttygtaaggtggggatygggaygygatyggggatggggaagggggttgtaggaggtttygtttgygttgtygtttttgttgggtatagygttttttattattygyggygatttyggttttygtaaggtggggyggygagtaggagtyggggttaggttaggggttygagttttygttygaggggyggggaaggygggtgaygtgagtygggtygggygggyggagttgggatyggtttygggaggygggggygagygygyggagaggtagaygygaggagggaggyggttgagtagygygggyggttttgyggygggygyggtgggygygggyggyggggtttygggattttygygygtttttttygygyggygtygtygtygygygtttttaygtttygygttttayggygttttygtttygygygtttttygtgttygttttttgttagttttygggtygyggtygtttgtagagygagygtttagayggagttttygggtaatttgagtggygtygatyggyggyggagtttttggtagagtttttygattyggtagygyggaggggattygygttygttygygtygygttattttaaattttaagtagygtygttttatyggygyggagtttyggttggaggtaagagtygygygtygggagataygtatygtgagyggtagygtygtyggttttttttttygtygtttyggagggygaagtygyggttttttagttttttgttgygtygygatagygtyggaataygtttygtttygttgtygttttygttgtgtygtyggyggagggggtygygagtttygygtttyggtyggaggatgtgygttttygygggtygtttagtttgagttatgygttttaayggyggyggygygtyggtyggtatggagtttygygyggtygygttttgattygttgtgygtttygyggtyggygggyggygggaggyggyggatygagagtyggagatyggygtygygggayggaagygagygggygygggygtygygtagatggtttgggygagttaggtttgaggtttygtttttygaaaygtgattatgtggatttaatagtttttaggatttaggtgagygattyggtyggygtygggtgygtgtgggygygtgggtgttaggttgggyggaagyggygtttttttttatgttgtaaattaagggattttttttygtttttygtaagygggtaayggggtgtatyggtagtyggaaaggggygttygttyggagtttggagtagtatygyggttttggyggggagyggtygggtttttagggtttygygygttyggggtyggggtagyggygttygttttagtaattygggaagtggggtyggttaggygygttygtagttttaggagttagtagygtagtgttttggtyggttgtttyggygygtttttttttyggggttyggggygaggygtyggtygttgggygyggygggygygggggtyggggttgtyggggaaagttaaagtttygggtttttagygagagtttygtaggyggagttggaggaaattatagttaaatagttatttygttttttttttttttttttyggggtttyggggttgagtaggggttttttaggtttttagttgtygatttagttgtttgygggtgattttygggttygaygggygtttatagttggygggtagttggggygggagagttggggtttttggggagtttyggyggttatttygttgtaaatatataygtatataygttygtyggygygttyggggtttgtttgtgtttgggattttagggttagatggaagagggggttygagtttagagttygtggtgggggtgtttagaaagatttttttyggtaaattttgttagttygtyggggttttygggtttttttggtttttgtttggggtggtttagggtttattagagtatagttgtygtttttgttgggtaggttgtttttgagttttygtttttttgtyggggtatttatygagttygtgtatttgggtttygggttggaatygygagyggggaggatagaggtggaggyggagagtagygtgyggttttygagtttgtttattgggatgtattgygttttygygttggggayg

SEQ ID NO: 5928 - DNA, 573 bp, Artificial Sequence
  Description of Artificial Sequence: Synthetic polynucleotide
gygtttaagaagtyggggttttttttggttaygygttttygggggygttygygttttttaggttttggttgtttgggygtygattttygggaygygtyggtygatagtaggggaggyggtagtagggatygtagtagttttygttttygtayggttygtygggtygyggtgagtaaggygggtaggygyggygggaggygttygaygtttatttygggtttggygttttttttyggttattaygyggygtygtttttygggattttttagttttyggagtttygygygtttagagtygttyggagygygggyggggttagtttgggtagtygygggtygttgttgygtyggaagttttygtygttagggagttttttgggygttaggttttgggtttttgggygaagtygaygttagaatatgtttggtttygtatttagtttatygtatttttagygygygtgggtggggggygtyggttgaggtggggagggtatagtttagttttaggttatagtgtttygggyggggtagygyggtgyggggtgaaygttatyggttyggyggatagyg

SEQ ID NO: 5929 - DNA, 383 bp, Artificial Sequence
  Description of Artificial Sequence: Synthetic polynucleotide
tyggtttttatagyggtttygggttttyggatggygtgayggtttgtggggtttgyggggtgygttgttttyggatttgyggggggaggyggttgagttggyggygttygygggtttagtggtgagtgyggygtttttaygtttagttygaygttttyggagyggtygtygygtaggggtgggygygggtttttaggagggagggyggttgtgaaygygttttgtttttygygttttygtagttttttgygtagttgatgatttttataattagtttygttagttttattttttgtggatatttgggtaaggtygagtyggaygttgttaygttygtygttayggtgggtgtttgatttygtttttgtaggagtygaygggyg

SEQ ID NO: 5930 - DNA, 853 bp, Artificial Sequence
  Description of Artificial Sequence: Synthetic polynucleotide
tygttttaggggtatttygtaggygagatttttgtagattttagttaggaaaygttagtgaayggtagygtagggaayggggyggggtygttggtttygtttatygtygyggtgttgggggttgggggtggttttygggattggtgtggagtttgggtttgatttattgatttggttgagtggggagattggagggtygtattyggagttgggttyggggaygttygttggtgggaagggtgtgygygygtyggaggtygyggttgattttgtttyggygttgttaggtayggtattagttyggatagtattattttgtatyggtagagtatyggtayggtgtttatygtggatttggtttygygttaygagtgtgtygyggtggtgttgtattygtygtttatttygggtatgygygtygttttttttgatattaagaygatttattgtttygaygttttttttaagtgagyggtttgggyggggayggaggyggggyggggayggaggyggggyggggttygggtygggygttaagttttattygttttaygtttttttygtagtatygagaaggtgttttagattaygtygttygtgtttattatttayggtayggaggaygaggtgatygatttttygtaygggttggygttttaygagygttgttttaaggyggtggagtygttgtgggtggagggygtygggtataaygatatygagttttatagttagtatttggagygtttgygtygttttattttttaggagttgtttagttagygygtttagyggyggttttaatyggtyggattttagtaataaggyggttttyggattttatttygygtyg

SEQ ID NO: 5931 - DNA, 1062 bp, Artificial Sequence
  Description of Artificial Sequence: Synthetic polynucleotide
tygggatgaatgtagttayggaaygygttaatgtaggaggtttttaggatattttgagygttygggagaygttaggygyggtagygggtayggatagyggaaaggggygygatttygyggaatttttyggtagggtagggtttttgggtggtttygggtgtttagaggaaggggtgggttyggggaygyggagggaaattggggaygyggagggaaattgaggtygyggaggaygyggtygttggtagttygttgygtttgtyggtttygygtgggtygttttattygggaggaygygggttttttttgtttgtagygttttygtygtygtygttttygtygttttttttttttttttttattttygtygyggttttygtttttttttttttygttttttattgtttttttttttttttttttttatttttttttttttttttttttttttttttttttttttggagyggttggggttgyggygtygttgttgatayggatyggtygyggtygttatygggyggaggttgygyggygtagatttagaygggyggtttyggagggygygyggygatggyggyggygggtaggyggygggygyggygggygaggggttygggttgagttgygggtyggttyggatggygggyggygygggttggtygggygttttygyggttttgttgygtttygtgygtygtttgygygaggtgttygaggtgtgyggtygygatttygayggttttttgygygtggagygygtygyggygttyggattgygtttyggttagggygaggaggtaagttggttygattttagtttyggttyggggattttagtttagtttygtygttttttttttagttttttygtygggttattygygtggttygaggyggtggttttttttttaatttttttttttygtyggagtttaggatttyggtttttttygggtatttttggtttagtygggttttygtttttygtttttyggygttygtgtttygagygttaygygttaygtttagggtggtttttgygtttatttttttttttyg

SEQ ID NO: 5932 - DNA, 918 bp, Artificial Sequence
  Description of Artificial Sequence: Synthetic polynucleotide
tygtygtttttatagygygtttttaatatygttgtttttgtttygygttttagagygtttttagtttttttttttattttttttatgagtggagtygggtttggggygttttaggyggtgaygatttgtagaagtttttgagaatgtaagattttttggagttttyggttygttagggtygggtttagttaggaygtttygtttagatttttttttagtttggggtgggtttaggttygtttgtttttattgttttgtgttttaggagttttygttyggagtttagattyggtgttygaagatgagagtgtygttttttttygtygggtgagaagttagtttaygtttygtyggttaggtayggtgtttttyggggygttttaygggaatttttgtgtttttatyggygttttyggyggyggggtagttttggygtttttttttygtttttggtttaggttyggttygygggtgtagttttttttagggttttttttttttttygggtygygygttygtttygtatygyggyggtttttyggtagtgtttgtttttattggaygtatagtgatygtgaygggtayggggygygagtttttattattataatgggtgtgtatggygyggggyggggggygttgtyggtttygagygagggaggggagaggagggggtgygttygtgttttgttygtttygagttttygagttygygttttattatygtagygagtygtttttttgggtygtttttttgttttttttttttattygttttttttgtttyggttgttyggagatatgtttggtggygatyggggatttagagttyggtagtygtttttgtttttgtttttgygatttttgttttttttttttgttttttygygtagygtttttygtygyggaaatttygyg

SEQ ID NO: 5933 - DNA, 865 bp, Artificial Sequence
  Description of Artificial Sequence: Synthetic polynucleotide
aygtgygygttygtyggagattagggatgaggttattaaatgattgtttyggttaatttttatttygtttttattygtatygttttttttttaattgatttaattttttaattttagtttttygtttttggtatyggtttttttttaagtttttagattttaattttggttttygattygtttygttatagtttgggaagygggagaagtagygygygtttttttgyggatttttttttagggaagattgtggtgttagttgtttagggggattagggggttatygggatttagygtaatttttgtttygttttttaattttyggaagygttaatagtayggtttttaygtaatgtygggtttttaagtatttttaattygtatagttttyggggaggtygygtagatatyggggttttttatagtttattattttggtgtttgaagttattttggagtttttatygtaggggyggggattagtgttaatgggtagyggggtttggtttttttaattagtattttagaaagagggtttaggggygggggygggtggatagggagggaaygggtttgggtgaaaggggtttgtggagtttaaatttagtgaatagggttttaagtgtygtgttaggaygaaaagaaggyggaggttttgggataggagttggttygggggtygggggaygtttatttgygtttygggaagtttttagtttygggyggttttagygtagtygggygtttagygtttattgtttgttaatygttagttyggtttttaaagyggtaaggttttttygygagggggyggaggttyggaggagaggggaggtgaggagaaygyggaggtyggtataattyg

SEQ ID NO: 5934 - DNA, 408 bp, Artificial Sequence
  Description of Artificial Sequence: Synthetic polynucleotide
gygttyggttgttaggtaattyggttttyggttttttayggyggttttttyggtgtgttttattaagagygatagggttggtgattygaggggygygtgygyggtygttagtttgggatttgtayggatttttttttttttagtaygttygttygggggttttttttttgttaygtygttggggttygttygttatttatagttttygtagagtttttygggtatatygyggttggtygttyggggttaaggatggggygggagygtttatttattttygygtyggtyggggtatttaagaggygygttygtagttatayggygtttygtttttygtttygaaaaagtttttgtttttttggygyggtgtggygttttygttagtttagtyggatttttttygtttyg

SEQ ID NO: 5935 - DNA, 2245 bp, Artificial Sequence
  Description of Artificial Sequence: Synthetic polynucleotide
ayggtttyggggtttggyggggaggtttatygttgtttagagggttyggtyggtygggagggggygttgtgttttttttaygttttgttygygggtttttagtagygttygtygygttgtaaygtaatgygygttyggtttttttttgggtagygtttagtgttygtttgttttgtagggtatygtygttttttttttattttggggtttttaggtttaaagggtttttagatttagttttttgtttgaattaaagtggttaggtatttagtttgtaagatgaataaatgaaggaaagaaggaaygaatgaataagggtttattttgtagagygttygygttttagygygtattaggtatattagtgttaaaggtgttgggggtygggtttagygttyggygyggttggaatgggggyggygaggagttttttttagttagtygtagggygggaattgtttaaaygtaggtygtagttttattgggtttygyggyggtttygtttagtagggatygttttgttttttagtttttaatagtttygtttttataaatttatttgagtattttggtttaagttattttagatttttgggattttttaggtttygatttyggtygggygggaggttgattttttatygyggttttttttttttattttyggttttttttygggttgyggyggtygttattgttgttagygygtttygaggattgtygtaaatttygggygtagggaaaggggattttggyggygggatatagagagygggtygggggaaggggagggaayggaggaggygaggaggagttgggagggagtygaggggygaggygyggaggagggatygaaggggagyggaggggagagggagggggaggaaggggaggggaygagttgggygagggggyggggagtygaggygaggagyggygyggatygtgggggaggtggygggggygaggtyggtaagaggyggtygygggtygggttgygtygggaaayggyggttagattttttygggaaggggygagygagagtygggtygggtygggtygggtygyggggtygggaagygtygagtygggtatttttttattaggtagygatygaggagttyggtygtttatttygtgtygttygagttygtagtygttygtyggtttttttgggatgttygtaggattygggtatttaggayggtagtygagygagttygaggatgggagggtattygtagtttygtttygttaaggtaatagttygtyggttatttttygagygttggygttttyggtttttggyggaygygggayggggttgggttgtgggtgtgatgggggygggggygttgggagagtygtgtttaggtyggggaaggttgggtttyggggtagtttaattttttggatttttggagttagggttgggtaggtagggggagatttaggtgagaaaagaaatygtggygaagtygtygggatgttggyggaggagggggttygtttattygggtagtyggtttygygttaagaatygttttaggttttygggtagaygtttaggggaggggaggttttattttttaygttttttttgtagatttyggtttygggattggagattttgaagyggggtttttatttygttttagygtttttaaatagtttttygatttygtaygttttygttttagttttgggagygygttttgttttttttttttygyggygagttgygagttyggagagatgaatgtygttygygtttgygagtttttgattaatatygtagtttygggggaggagayggtgtttttggyggtagtttttgtttttygatygyggttgggagygygaygttygtttttygagtttgggtattygygattttygygttgygyggtygattttgygaygyggatygggygttggagtttaggaaagtagttagatygtaygtttagygtttgttygttgaagttygtgggyggtgggggyggttygygggttgtgtgagttagggaagggtygggaggtyggtagttyggttygtygttygtgttaggygttatttgtagttttaagygttttttagagygttttggttttgtagggtataggygygttygttgtagtyggtyggagaggygggtgggtttttgygttgttgtygggatatttygtttygygttagtttgggtatygttttattyggggttygggatttygtagggttyg

SEQ ID NO: 5936 - DNA, 2972 bp, Artificial Sequence
  Description of Artificial Sequence: Synthetic polynucleotide
gygggtygtagtyggagaggaataggaatygtagtggggaygttttggttttygggtttatagtattygggayggaygygtagtagygygggtygggaattgggtattagggygggatgggtgagaggttttaagggataaggtagggagaagygtagyggggtgyggggaatygtaygttttttttttgtttttgttttttatttygaggyggtagggygggygggygyggtttygggggtgggygggttgggyggggyggaggyggggtygtagtattggttttatttagtttttttygttygtagttagagygagtygagtygyggttagtttyggygggtagggggggygttggagygtagygtagygtagttttattagttygtaaagyggatygagttggaagtygagygttgtygygggaggygggygatgggggtaggtgttatyggtygygttatggaygggtygygtttgttgttgttgttgtttttgggggtgagtgttagtyggagggggttygttttttttttygggattagaatttygagaagagtygggygtygttattaaggaaatagaatagagtattggggttttagatattgagggtgggtggtgggaaaggatttttgatgtygggattaygaaggagggtttagggttttyggagygtagaggygattttttagggtggagatgagggtaagatyggagtayggatgtyggtttttaggtatygtagggggyggtgggggagttgggaggggttttttaagagggggtatggggtttttygatgtttaggtttttyggaagaggatattygaatgtygggatttygaagggattttttttttagtatttyggtttttggagagtygtgggatagaattaaggygagagaaggagggggaattggayggggattagagatgagaggggygagttgggttggggyggggagttygggaygaygggatggaataatggaggaggtyggagggattggaggtagaggggattyggtaaggataatggggatyggttagataatgggggggaggggygtyggagggagaggttggggagygggagagaggttgagaagtgggttagggagggtagaagaggggygayggygagggyggtagagagatggaagtagaaggaaaggagatagagyggggygyggattttgaagtggtyggggtttygtttgttygttgagggatagtgagaygagaagagagagtagaggtttggatatttttagygtttgttttygygtttttgttygyggttttttttagtttyggaattggggttgyggatttaaggttgggaggggagtgtttatttygtyggggygaattygttttyggggtttttttayggtyggygggttttttygaygygygtgtttttayggtttgaagtagygtagyggatygygagggayggagygggtgtgtttttattygggttggyggtggttaygtttyggggtgtagagygtyggggygtattaggyggggattttttttggtygygygtagttttggttaygtaggygggaggyggtaggtagggggygttgyggggygaggtaagtgtagttygtygttgtttgtttgygagtttggggttgygygtygttttttatttagttgygygattygagygtygygtttatygygtttygtgggttttygygtttygaagggtygggattyggtttgagttttttttggttttyggtgtaagtygttgggtatttaaygagaygggggygttyggaygtttyggattttgtagygyggtatttygggttatygattyggtaaaggtyggygggtttttygggtggttygaygagattgttagatgtggtttgttttatggttatgaatygaatgttttggaaggtttggtaayggaggaggygtttttatttttttygttagtattttttattagagtattgygttttaaatttyggttttatagatayggagattgaggttttgagagtttaaaygatttggttaagattttatagtaagttgggttagagtygtggttagatttttygatttgatttttagttyggtatttttttatttttttagggggtagtygttgttttagttyggggttayggttgygttttttagtagggyggggggggttgatattgtttttagagttygtyggyggtagagtttgygggtgaggtgggtagagattttgttygggtgygggttttagttygaaagtttagttttagttttttggagttgttaggatttgtggttgygttyggggatttgggagygatygygggtaygtttgttgattaaygtygttggttagagaygttgtttagaygygggtgggygagygtagattaggagagyggggaggagggatyggattttagaggggtaaygatttgggtttygggtttgggtaagagygagggttttygygygaagatttaaggaaggaggggagttgggygtggaggatttgggygtttgggaaggtgtatttygataggaatttgtygtttgtagtttttgyggttttygttttygtttyggygygyggttgttyggtttgggatggttgtgygyggttygagtttttttttgggtygyggtgagagagagagggttgaaattagagygygtttyggygggtyggttggygggtygygtyggtaatggaggtattttgttatttagaygtttgtaattagagtygtygggttggttaatgygtttaatagggatggaaygagggtagtaaatgggygtgygtgagyggtygggttgagttgggtggatggtggatggggaggtagtttygygggggaygggtttttatygtattgttttagtttagtttggtttaagygtttygttttttttttgggggatygygtggggaggygggaataatyg

SEQ ID NO: 5937 - DNA, 1026 bp, Artificial Sequence
  Description of Artificial Sequence: Synthetic polynucleotide
gygggygagtggagtgttttttagatttygyggattygaygggagggattttgtaatgtttaattagaatyggttgttatggygatagtttttaggtagygtgggttgagtttttygtaggaataaagggtgggtygtygttggattttgygygygttygttattaattttttttttagattygagaggggyggygygtttygttttygggtygygtaygtyggtgttyggyggygygtaygtttgygggagttttttttaggtaatttagtgttgatygttygtgtyggtgyggtygttaatygtttttgtyggagttttaggtttaaaagtagttttttattttttttgggttttttttaatttttttttyggtttgttttggggtatgagtagygatggtyggttgtatttttgaggagaaaatttatyggygttttttggagttatttttgggygagtttygyggatygtgyggyggyggygagtyggagtyggaattygaattygaattygaattygaattygagttygagttygagttygaatttgaattggtagaagttgaggyggtygaggtttyggtagaggaattyggggaggaggyggttayggtagtygygatggaggagggggattaggagtaagattyggagttygaggaggaggyggyggttgagggtgaggaggaggaggagggygyggygayggyggyggtagtttyggggtattyggtygtgtygtygtygtygttttagttgtygtttttgttttygttttygygatygttgttagagygtattattygygaggaggtggagggygaaagtttggatttgtgtttgtagtagttttataaatagttaagtagttgggtttggttggtggtgggttygyggtttttatygygtyggtttyggaygyggttttttyggttttttaaattgtttttttttttgtttttttttttygtattygygtttgtygtygttgaaagygttttygttgttyggattygggyggtyg

SEQ ID NO: 5938 - DNA, 10207 bp, Artificial Sequence
  Description of Artificial Sequence: Synthetic polynucleotide
gyggaggyggtatagttggagttyggattgtggtaygtygttatygtgttgtttyggggaatttygattygttttttgygaaagygttttygaaygygaatttagagtttgtgaaygygtyggtaagttttttatttttttatygtygttygtygtaggtgggttygttttaggggttttttttgygttttatttygttttttaagttatttagtygatygtttygtttaygttttygtgattttagatatttataattaygatttygtttttatgtatatttaaygtaygayggtgtatagaygtgtatttgatttttgyggattaggtgttttaagygtatagyggttattygyggaatygyggttyggggttagtgagtygtttgtagtttttygggttaggggattttttagaatttygggaaagttattygaagtttattygggatgyggttttggttttyggtygygtgatttygtttttaggtgtagaaygaygtttttttagggtttatagttgttaggttgggttttgttttygtatttttygggaagattagggayggggttatataggtygtggttgyggagaygttttttygggttatttygygattaggagggagtygagtygttygtttttttygygtttttygttttattttagttagttggttttattttgygygggataattgggaygggagggaggygaygggagggyggyggttttagagagattgygygtttgttagyggtaatttgtttaagtggaygggaygggtygggtygttgygggttggggttatygaggtygyggtttttattttaattagatttgggatygygggggagttyggttyggtygttaaatygggttggttggygttagggtttygggaggtgyggttyggyggggaagtygtgatgggaagygattttgtttagggagtgttttttattattatattttttaygtttaggtagtgatygayggtttggyggtatttttatagygggtttatagtayggggttatataygttttttgagtttagtttgggtatattygtttgttatygagggtttaagttagtttgtagttygygtttygttattyggaygtaagttygtygttygttttgttaygyggtygtatagttygagttttttgttgtttattgttygyggggttaygtaatttyggttttgtatatagaggaggaagyggyggggattttttgttatttggaggtttaattyggggaaggttttagtagtgttttttaattttgygagaggtgayggggtyggaggayggaagggtagttaygttaggtttaggatygyggttttattyggtttaggtygttttygttttygttttattttattgttgygggaagygyggggygtatagatygygygttattagtttaagttygttygaygttttggtyggagatygtttgygagagggaggggyggtygagygygygtttttygtttgtttgygggatttggtygatgygaagtgataggggtyggagttttgttgtggagtttyggtygtttggygttagtygttttygttygygttttttttttttagtttygggyggttygygaggygtttttyggggttttttaaaggaataygtatattyggttttyggggtttygttaggggagggggtttttgggaagggggagggggtyggtttaggtgggggaggggtttagyggaggttttayggygtygttttagggttttttaggtttttttagygttagttttyggtgagtttygggtatttttagttggagagtttggttgggggtygttatagattttttagagyggttgtagtaggattttagggtgatygygggatygyggggyggggygagtggtgggattttggttyggatagagtttyggaaagttagagggaaggtyggtgttattgtaggtggggtygtygtttttagatgtagtygttgtattgtygtygttaggtttttyggttaaataatttaggtttgagtgttttaaattttttaggtttyggatttttggattagttatggatggattaatgaaatggattaatgtttaaaaygtatatatttagatgtatatatatttttataaggataaaagtatgtgtttatatatatatatatatatatatatatatataygygygygygygygygygygattttgygaatgtatttayggatttttaggtyggtatttgggttttyggttaaggaaagttgttttggttattatttggttattttatyggttgygtaaaygtgtttataaygggttttttttygagaggttatatttygtttaaggtggagttagtaggtatttgtttgtggaaaattgtagtggattttgtttygtttgygtagattgygtagttyggagttaaagattygttttggttagagaggaggtattaagagaggtgygatttagttaagaaygaggtygtggagaaaattttgtgggggyggygtttatatatgyggtgatgaggagttgtgagggttttggggtyggtttygaaaagtagggataayggtygtagaggttatattgttttygtyggtttygaattygtattgttaggagagattyggtttttaaaygttgtttttaaygtttaataaygaagtgttttgygatyggtgtgygtagtgggygggygtttgtatgggttaatgttggatgtaygygtttattaygyggttgtaygggtgggaatgttattygtggttagtgtatgttttgtttttttttttagaaaaygatttttaggaattagtttgagtgttygygttygagttygattggaagtaggtgygtggtygttttatttttttygtgtatattttgagttatagttttygttgygtatagagggtattatayggggttygatatatatatatatatatatatatatatatatatatatatatatattattattttatgggggggaaattgaggttgtyggaagatagaaaaygaagattgattatagaagagggggttttaattataggtgttygtagatattttaatttttttaygygttatttagtattttttaatttaggagaygtgygttttygagagatgagaagaaattaaaaaagtggttggtagggygaagagaggaagtyggtatttyggaagaaggagattttygttttyggtatyggatagggygaaaattygttgggtygygggtggagaattyggggttygttygygyggtgtygttttgtgtttagygaaaggtgygtttatttttttggtttygaggattygtttttttyggtygttggaaagtttagggyggggttygggtttgyggagaattttaggtttttttygagtttttyggtgaaggygggygygggtagggggttttygygtttttttagygtaaggtygygtttygttttygttygygtyggttttagtagggttyggttatggttttatttattagttttygttatttgggattygttttyggatttyggtygttygagtttttygattygttygtttatyggtttygttttttagtgtttgttgttttttttyggggygtagggatttttaggyggygttaygattyggagttgggtyggaggttaggttggggttygggttagagyggtygggtttttgggygygggagaaggagggygtttttttttygttyggggtygtgttaatgttttgtatttggggtyggygtgyggttgygggtttttttttaaggtttygggattygggtttttttygttttaggttttttyggygggttaggtyggtttttygygttttttagttyggygtaggtagtygtaggygygggygggyggtgggggtyggggtaggaggaggggtttyggggttyggyggttygttattggttaatattttattttgttgatatgtttttttattgttgaggttttygatatttttttttaggttttttttttyggtyggagtttggtttgagttgttaaaatttygttttyggagatttataattggtttaaaaagygtaaaattagtaattaaggggggtttggttygttagygtaggggattygagttgggtaggatatgtgagatagttatagttttttagagattaygataagatttaattagtygygygtggttttyggygtyggagygggttagtttagttyggtttagttyggtttygygtagagttttygtygttttygygtatagagtygggtgttttttgyggtgygtyggaygggaagtttygaggagtagttgttgygttygttattygggtygttygtttatygygygygtygtygttygggtygggggttygagtygygygttttyggtttyggtttyggttttygggygtttgggtyggatgtttygatgagagagtyggygttggyggttagygttatggtttattattygttttaygygttayggttygtygatttttttatgttygtttttttggyggyggygtagtttttttttttttyggtattygygttgtygttyggygygttggttaagtygttgttygattygggtttggygggggyggyggtygyggyggyggyggyggtagtagyggtygaggyggggttgtaygtttyggtattgggttygtattygttygtygygtatttgygtttttttaagagtttggagttygaggaygaggtggaggaygattttaaggtgaygttggaggttaaggagttgtgggattagttttataagttaggtayggagatggttattattaagttygggaggtagggttgtyggtyggttggaaggygygygggygggygggygggttggggtaygggattgtayggattagagtagagttggggattttyggttttyggttttyggttttaggttttggttttgaygttaygtttygtttttayggataattaagttgatttttttygtttggtatyggagygatttttttttaaaataaaaaygttaaaatttttygaatgaaataaaaygaaaatatattgttaaagaatagttttaatygttttgagttttagygtagaggaggtttygyggtttggttttggyggtttttttygtttygygttttygtttttttgygttygggttygttttygagttygggggaaatttagttttttttagattttgtttygatttygaagtttttagtgggatttgggtttagttaattttaygttggttgttyggtttttggtagygagtttygggttagtygagtttttygttttatygggttgggagttttttttttatygygggtattygagttttggaygtattygtygttttaggttttaaagtttgaagaaagttatagtttyggtttttttatttttygatttagttatygagaatttaggtttygggtttatttttttttttygaattgtayggttaggatgttttattaggttttgtagtttagtttttaatataaatattttttagatttatttttgggagttttygttttaagtgggtattttttttgaaygaatttyggggagattaaggagaagygagaatatttttagagggtttagattttttttttgggtattagtttttattttagattagggagaaagagggtttttagatttgagtataaggtttaaaggaggttgtttaggagagggtttgataggtagaaatgggattttttgggagtaataattataggtggggtygttygggtagtgatgagagggtagagtagtygattataggggaaatagttaggyggtagyggtgtgygtaaygaggagggataaataaaggaggagtggggttttggaatttagaatagtyggttttaatgggattttttttttttttttttttttaggyggatgttttttttttttaaggtgygagttagyggtttggataagaaggttaagtatattttgttgatggatattgtagtygttgaygattgtygttataagttttataattygygttggatggtggygggtaaggtygattttgagatgtttaaaygtatgtatatttatttagatagtttagttaygggggagtagtggatggttaagtttgtggttttttataagttgaagttgattaataatatttttgataagtayggtttygtgagtgttggggtagggtggggayggtgtaggagtttgttgatttagtattgtagttgagtaggagagtagggyggtaggattttttagggggaagygttgggtaaatttttagagtgtttttgttygggttattgttttgtggtttaygtgggttgggtttgggtttgggttttagygtttttttttgtaagtttgggaaatggtggggttagtggttggtagtttataattttagttttttaggtygtggagggttttttgtatygttaatagggaggtaggtgttgttaggattgggtttgtagtgttggattayggaggttattttgtttttggtttgtaggtgtygagtttggaagatttgtttatgattttaatttgtttattatttttttgttaagattygygtttttggtttttttttaagattaggggatttaaaagttaaattattttttttatttatttttttagtttttttaagatttttttttttttttataggtagatgtttaattaggaggagagggtttgggggttttttttatttatgtttgagtaaggttttagygaaygggggtggtgttttatagggtaaaaggaattgtttattttgaggtagggtagttggtgagttttygaaggttggaattttttttttgtggggttagggggtttattagtgttagaaaggaagagagtgttaagagtggaattgtagggttttgttttgttttattttgtttgggttttttttgtggggaggggttgttttttggttggtttttttgttttgttttttgttttgttttgtttttgttttgttttatttttgtttttaattgggaaattttttttaatggtaagagaaaaagaagttgtgaaaagagaaaagygagaggaaaagtagaagaaaaagaaataagggtgagaaaagagtagagataggagaaaatggggaagaggaagaatygatagagagagagagagagagagagagagagagagagagagagaaagtggagaggaagaggttaggtatttaaagaatagaaaagttygggtyggggttggtggttgtyggttgatttttatttttttygtagattattttaaattttatgtataagtattagtygygtttttatatagtgygagttaaygatattttgaagttgttttatagtatttttygtatttaygtgttttyggagatygattttatygtygttattgtttattagaatgataaggtgygygyggygggyggtgggttaagtttttgtattgaygttttttaataygtgtaggtttaatygttygtttatygtttttygaagttttttgtaygggattygygtttttgyggttygttttygagtatygagtttygtatttataygygtagtatttayggaagtttttaaggygtttttttaattttatygygygtatatataggtttttttggggygagygaatagttgggtygtygttttgatggagatgtttatttaataattagttgagatttygggttygygttgatatttttatattttattygtttattttttggtttaggaatgagaatgtaagtgaagagagggygttygaggtaatttgtttaggttttatygatgtttagaattyggggtttagtttttattttttyggggggagttagagggtgggataggtgatatagttttttaaagtatttttggttattgttttgggttagtttaggttttagattttttgggaggygtttagagaattattttttaattaaagggttttttttgtttgyggtttttttatttttgttttagtggggtagagtattatttttttaggtttgtgtttttgtgygttattgtygagtgaaagagagggtaygagtgttygtgtyggtygttgtggttttgtgaattaaggtgtaygttgggttgtgygtgtttygtttggggtgtgttggatatttgtggaggtatgtgaattygtttggtttygtaggygtttgttatgtttgtgtatatttgygtgtgtgygagttygtgagtgtgatttggttttgtgtgtatttgtagttttgygtgtgaattgtagtttttgttygygtttgttygggtgyggagtygtttaatttgygtaagttygygggygggtgtgtatgtttgggttggtttygatattgtggtattgttttaggtttgtgtggggttgtttaggtttgtttagggataatttttygaatgaagtttttggaggatagatttygtygtttttygygaggtttttttatyggttttagttyggggygttttattttaggygggtgggtattaagtggaygtttttygggttttttttttgyggttagtattygttgatttyggggtgttatygattaygttggaagagttayggtttgatttagygtygtttttttggttttygtagattatatagttgaagatygataataattygtttgttaagggttttygggatatygggaayggtyggygggagaaaaggtgagaggtygaggatagtagttttgtggygggtgttygygggagtagygagtaggagggatggagggatgggtttttygttgatttggtttattygtttatttttaggaagtagttgaygttgtygtttttaygtttgtaygaggagtattgtaaattygagygygatggygyggagttagaygtttygtygtgygatttttttttygygygggaattatttattttttygggygtagygtttagttygttgygtttgtatygggttygaggtgagggtyggatyggaggagggatagggaggtggyggyggggggtttttaggtygttgggttggttttttgttgagttattygttaatttgaaaggttaggaaggaaaygtyggygagtgtttgggatggggttttygtttygggatttttttaygagggyggttttyggtagttagaagattyggtyggatttygagtttggttttttgggygtygtgtaattttatagttgtagggttttttttttagggttgggttttttttattgtaaatttggggttttggattaggtgatttgtagttgttttttgttygattttagtagttttttygatttggttttttygagagtagtttttttygagtgtttttgattttgttygtyggttttygtttaggtttttgtaattygygygtttttttttygtagttgaggagaagtygtgygtygyggatagygattyggagtttgagyggttgagygaggagygtgygggggygtygttaggtygtagttyggttttagatagygttagttttattygtttgatygaattygagygygttygggagyggygtagtttygagaggggtaaggagtyggtygagagyggyggggayggttygttyggtttgaggagtttggagaaggagygygtygaagttyggaggaaggaygaggggygtaaggaggyggtygagggtaaggagtagggtttggygtygttggtggtgtagatagatagtgygttttttttgggygtyggatatttgttyggtttggttttttttagttatttgtaygggtagtagttttttgggtygttgggagtyggttagtygttttttttgtattttggatagtttattatgggttttggygtttttttygttatgggtatgggttatttattggtttyggtggtaggyggyggtaayggyggaggtggygggtttgggatygtygyggggttggaygtaggygggttgggtttygyggttagygtagtaagtatygtygygtttttttygttttattttttttagtatatgttggtattttaggtaaggtttgtgatttygyggtagygttagygagggagaaggtttagggagttggyggygaggttagyg

SEQ ID NO: 5939 - DNA, 2392 bp, Artificial Sequence
  Description of Artificial Sequence: Synthetic polynucleotide
tyggattttttgttttttyggtgagtygttttttttttgtygtygggttttttttttttttttttgtttagttaaaattygaatttaggygttaggggagaggatygtygttttagtttgttttattgttgggggtayggagtttttgtttttttaaggttayggttttygttttygyggatttygttyggattttttttggttatygggaygtttygttttttttttttygtagtaattttttatattygggttgtgaagttyggggtatttttaggtyggygataaataatttatagggaaygtggtattaggtttttttygygggaggagggggygygagtagygagagttatygttattygyggtttaaggatattygygatgyggyggyggyggyggyggyggyggtttygggyggggattygygttaygttttttggyggttaagttgagtattaygtattyggygtttttygttttaygttgtttttygtyggygttygyggtttyggggtttttatttttatttttttaagttgggtygtgatttygagtttygtagtggggggattaagttagtttggtaggyggttttagtattattttaggttygttygggggttttgggygaatttaggtgtttyggatttgtttatttgtttttggtaygtttttatttttygggagtttagaaataggtttaaagttattagtatygttaagatttggaygggttttgaaatatagttagyggaatggtattttttttaaataagtgttttttttygatttttttgtggttyggggttagggattgaattaagataaygttattattygagggttgggggatygagttagaagtttttttggaygattagggttgggaaatygagtggaygaatggggtgggtattagggtttggygggaattttygttttgtttatttagtagttttttgtagggtygygggaygtatttgggggtttaggttgtygggtgtttttgtttygygtgttttygttttgttygygtaggtaggaaataggagattyggggtttttttttttygtygtyggggattttgggygaagtttttagagatyggygtaggyggttggtgygtagttagggtttagygttaggttttgttygtttagtgttttttttgtttatttttttttttgygttttggaagttygggagtygggtaygggttagtatttgtaagatgttattattttggaagtttatttygatttttttaggtygtaggaaggagagagttaggttggggtaaaggagatggggtagagttggaaggggaagaagygggattygyggygggggaaggggtttgggygtygaggygagtgygtagtaggtgtttagtagatttagggaaattggggtattgggttggggagtygtatagtttttttttattttttygatttttttttaatttttygttttggtggattttagtttyggtttttattttyggttttgtttttygtttttygtttyggyggtttttagtagtaatagtttgggttygyggtagtttagatttttttggtttygyggtgttgtygygttaagygaaggaggaggagggttyggygattttggggaygaaygttttggaygtttygttygygtttttttttygygttygtygygygtttgtttgttyggtttttttttygtttttttttyggtygttygggttaaaatttaaggttaggtttttgagggttygggttttttagtygttttttttttgagtttygagagttttgygtgggtttaatttttygggtgtttygtttttgttttygtygtttttgttygygygtygygggaatttagttttaagttggyggygaagttggtgtttttygttygtygttygttatttatygaggggaaggggygttgygttygygaygagagttygygtyggtygtttttttygyggtgtttgttttagagtttyggtttyggagggttggygygtttagttttagtttygygggygtyggagttygggygyggtggggygggggygggggygggtggygyggtttggttygttggtttygattygtttttgygtttygygattttttygaggttygtayggygttyggtttygtttygggttgggttgygtatygygttttttgtttttagagttygtagtygattgtgygggagtttttatygtygttygygagggttygtttygtyggggttygttattttygtttyggttyggttyggttygttgtttttygaggtttttttygtygtattttygggtttttttttttttttyggaatygygtttttagatttgatattyggggtaagtgygtttyg

SEQ ID NO: 5940 - DNA, 564 bp, Artificial Sequence
  Description of Artificial Sequence: Synthetic polynucleotide
tygattttttttygtggtygttagggtaggggtgggaggaatttggaagttaygtgygatgttyggagttgygttttttgttttggggygtgggttygygagygtygygtagtttttyggatygttttgagttgttgygttyggygttgtttttttttttttagtttygygtttttttttygygattttttttttgttttttyggttttggaagygttttaagatggggtgggggtatggagggagagaggggaggagggagttgttygggggtagtgtygttaggaagtgggayggggattttggygtttttttaggttgttgygygygggttggggatygtgtatygttttgygygttagaygatgtattttttggaayggtagttgaggtaatgyggggtgtgaagtggyggygggtagaggggttygtaggggttgggattygygtgtttttttttgtttyggtgyggagtaygatgtgttygggygggggygaggaygttygggaggggttgggttgygtaygttygyggggtygtygtagatgggyggtttggaggyg

SEQ ID NO: 5941 - DNA, 3277 bp, Artificial Sequence
  Description of Artificial Sequence: Synthetic polynucleotide
gyggttgtattgttgyggggtgtaagggygggggaaattatatygttaggygaggygyggggatygtgttggaaggttygyggygyggttttttttgggygattgygggggyggtttggtagggagttggggygagtggtygtygyggggtttygtaggygyggggaggtatyggtygggtattygygyggttgaggygagggygggggatgtttggtygggtagggaayggggtgggggagggtagaggggygagygagtyggagggggaatyggagtygagggygygygyggatttygaggttttttaggygggttttgagygattgtaaagtttgttygagttggttgagygtttyggyggtyggtgttygggataggtygtttatggtgtttttgttygagtygggttgtttgyggtygtygttygttygggtttygtyggtttyggggtttagygtgttttggttttygtagyggtttagtttggyggttagttygyggatggtttttttttggtttaggatggtttttttttgttgtagtatygtttygyggagttgtagtaygttgtttyggagtttttyggygtygtyggyggttayggaygyggygtatatgtyggygtttaygggtatygaggtgtagatgaagygygtyggttygaaattttgggtttyggygtttaggaggtagagggygagtagygtataggtgygygyggygyggtyggtyggtatggttgygggtatygggygtttygggttyggttyggttyggttggggttyggtttyggttgggattyggttygggttgtggtttygygagyggttygygttttgggygtygygtttttyggtygygyggtttatatygtygygttattaggtttttattgtygtttgygttgyggagttygygttttttatgtygtygygggaggggtttygagtygtygaygttagygggggaggaatttygttttaattgttygyggttygggttygyggygyggygggggttttaygagygygttatyggggttgttttygttygygtttttttygtttttttgggagttgtygyggtttttttttttttygttttygtttgggtyggygttgttgtttygaaggtttygagagtttagggggaaggaagtygggtttyggtttyggattygaggatggattatttgygtggtgttttygaattttygayggggttttaggygggygggaaattatygygttygggagatagaattyggttyggtttttttggttgtattgaatatttttgggtyggggtygtttggagtygggttgggtgtttaaggatttaggtygttaatattygagtgttyggtggttaayggttyggagtggggtttygyggygttattaagtttagagygggggttatygggtygtttygygttttttagatgttygtgtgttattgagaagtygtygggtagtttgggtatagggattttttaygggtyggggttttyggygtttttttttttttagttttygggttttgtggattyggtttygttttygggggattgttagtttttatttygtgygggyggggygttggggatttttyggaggtagatttagttgatygagttttttttgttygyggygtyggttygatygygggtaggyggygtygtyggggttggaygttygtagyggygtttyggaagggggtttygygggagtagtygttygygtttttagtagtttttttttgttaggygtygygygygttyggtattttygggtgtttatttgtgygtggggggttgtttttygtttgtttagtygygtttattttttaggtttaaaggttagtaggaagggtttyggaggtggttgggggygtttatttgagaagtttygttttygtttagatattttattyggtattygygtattygygtttttatttggatygyggggttyggttttygagatygyggttygggtttyggygtygggttgggggtttaggattagggttggygtagtygtttygtttygtttygtttyggggttattagagyggttaaagtttyggaaattttttygtttaygttttygtggtatagagaaggaaattgaggtttygagattgyggggtygggttatagtygtggtttttygattttttttygtygttttyggtttttttggtttttgygttttgtagtttttttttgygygtagtygggggttgggggtttttagttagtagggatttaygggtagtttygggtgtygggatygggygttygtttttygggygggagtagaggtyggttygatggagatttttttgagaaatggyggtttttattygttttttagttttygagygttygtygtttgygtttagtattttagtttttaagtttttttgagtyggggttgygttttygttgtttttttyggtygtygttttttggygttagagggatttygyggttygtaygggtttgttttyggtttygttyggagggtgtgygggttttygtttygttggtttygtttgtttattayggygygtttaaatttaygyggttygyggttttttgygtgttttgtygatttygggtygtaggaggggttagtttygtyggtttttaygyggggtttgygtyggtagygttaygggttggaaygygtttygggagaaattattygygyggggtygyggygttttttgttttaattttygtagggagtygttaggygggtgtttttttggttttagygttttggtttygtygttttttygtaygygtttagtggggaggtygygttygttaggtttggagtyggatygtgtttagtygagagygygygggygygggagaggagttttgttttgtttagggtaggttgtttagayggggygggaatttttagtttggtttygygtttttatttttagtagtygtggagtttttttagtygtttaaggttagggattttgtttggttttttttttagggtagtagattttagyggtttggtatttyggtatagaggagygtgtttttttttygtagaggaagggagtggayggygttagaaagggaggggagtttggggyggtgtttggggttagygggatttttgggtattgtggggttttaggagaggagattttygggtttagtttgtaattgttgtgtaggaggygttgggygggatatttgtaggygttgtatatataygygagggttattatgtygyg

SEQ ID NO: 5942 - DNA, 5692 bp, Artificial Sequence
  Description of Artificial Sequence: Synthetic polynucleotide
gygygttttygtagttygtyggttaygtatygtaygtaygygtttttttygygyggggtggyggtyggygggagttaygtggagtagtygyggtgttttyggttaygtttggttttygatgtygygaagggggttttggggtaggtttygtttttygaagttgtygttgyggtttttgttagtygggagaygaygaggggaaggggtgggtygygttgggtttttygtttattygtttttttttagttttgygggggttaaattygtttttaataaatttygygaaaaagtygagggggggaygygtygttgttggagaataggttagaagtgatagtagaatgggtygttgagattttygttttygtttyggtttttygtyggtttggygggyggygaygtggggaggggtygtttagaagtyggggtygttygggtyggggaattttttygygtygaygtttattttttaygggtygtattygtygaggggtygaaaggggttttagtggaggaygyggtgggagttgggtttygttttagttgtygaygtyggyggtgttygggttttygggagygtagtttttggtataaagtagygtygaagattttgtygggtgtttygtygyggttgtygttgtgttygygtagggtyggttygtgaatgygtgygggggttttygagggygttttttttattttgygygttygggggagttgttyggtygtygtyggtaggtagaggtttygggttttatgggtgttttygagatttyggatygtgygttgagaatgtygaygttttaaaygagttagtagagygggtyggagttttggtygggaatyggygtygygtgygtattggtyggygaggtttttggttygtyggggaaggagtttagagygtttgttttttyggtagaaattaatatatataaataattattygtattttttatattgggggattgggagtaaggagtaaggataggggaggggataggatttaattygttggttttttattttaaaaattatatattttatgttaygatygtttttygttaagattataaatatttaatttggtttggygtaataaaattagtyggagtttttttaaayggagttatttyggtgaattaagttgtgaaatttaatttattatatttataaaggagaatgtttttattgtaaatttaggttataaagaaattatatttgggtygtyggtttttttttyggatttattatttgaaggtttattaaattattttaaaatgttgggttattttttttatattttatggtaataaaaattaaaygtggtaatattttttttaatagtaggaaaggttaaaaataatygttataataaggggatataatttttaaaagatatttttttttatttygggatgtttttttygygtttggaagygttttttttatttttttaattaattygagtttttaaaatatttaaaygygttaygattttttttaggttttttttygttttaygaggygtttgaggygtagttttyggatggatygtaygtggggtygtagattttgggygttyggaygttagtyggaggygyggggatttygtggtttygttgygaatttgygttttatygyggttygtatatttgggtygagtyggggtygtttygggagtttttygttggtttttgggygttttattyggtttagtaatgttygggttagataaaggagtygttagggaggggttaattygttttttattttttttygttttttttttygttttttttttaggyggygyggaggagagaagatgyggtttttaataatgtgtttggtttaatttgyggggtgtgggtatttgttgygtttttttgggtgagggttgggtttttttttttttatttttttttatttttgtgtatgatattttggttggggtttggggygttttgygttggttagaagttagggttattagggatttttygttttygttttygaagaggggatttgygyggayggygaggaggatygatgygtttttgagtttttagggaaaygaggtygyggttgttgttaygtygygaggaagatttatgaggygygggtygagtatggttyggttyggyggaggtygttygygtatttaggttaatttttgatttttatttgattatttttttttttttgttatttttaagtyggygttyggaaaggygaataaagggaggaggatgggggatgggggygttaagyggtggygagggttyggttyggtaatttttttttttagtgggggtttttgggygttttaggttygygtttaatgyggggtttaggagggygtagtttgaaaggtgatygggttggggttgtyggagattygttttgyggggtggtttttttagtygttaggtttaygataggatttttagggaggggtttttgtaaatgtttttgggygaagagaggayggaaagaatatttttttttaaattgtaattaagggtgtgyggggygggggtgtttggggggtgttgyggtaggtygggttygtttaatyggaggtagtagtttagttttgggtygataaggtygagggaaaygggatttttttgtttttygtayggaaaagatttatttaagygggtaagagggaagygaagtttgtattttttatgttgaaaaaaaaatttaaaatggaaaattattttattggttattatttataagtaaattaaaaatagggataattagagtgtggggatttggagggattataaatttgyggygttttttttattggaattaggagtttttatggtttgttgttttattttgagagaaatgagatttttggttttggtgtaggygggtgtgygtttygagygtttttyggygggggggaggggggagtaggaggggygaggagatttgygtagttagggagtygygaatttygagtttyggttttygaaggyggtaggagaaatygygygttgtgtttygatttttttygttttggttaatygygatttgggaygagttggaggagtttttttygggtttyggaygttygygtygaaaatygggttatgggtattaaattygattttaggyggttatttattttgtttttatttaaattttgatgagttatttgggagtgygyggggattgggaagtgagggatttttataatatttttttttygatttyggttttygagtttattatttattttgtttttttygttttygttttttgttttaaattggggaggggggaggggggagagaaaaggatataaaattatygttttttygttaaatttttaaatttttaatttttygtaaaatggtttggaatttattttattttataggggttttattttttatygggtggaggttagttttttaattttttatataagtaggatttttttttatttttgaaagtttttaaatttagttattttaaatgtaaatatygtgtgaaattttattaattaggtaagaaagtagggagagttttgatttagttgtttttaattttgggaggagaaagagaaagtgagttttttttttattaagtattttaaaataatagygttttttttttttagttygttttaatygtagttttgtttttgttgaaagatttttgttttttttaggaaggggggyggggaggataggtttatatttygaagagttttgtttttaaaattgttygaagatttttttgtttgaygtgtatatgggggaggggaaggagttygtttaggttattyggttttttyggatttygtttaggttattyggttttttyggatttygtttaggttattyggttttttyggatttygtttaggttattyggttttttyggatttygtagaatatttttaaagtttatgggygttttttaatygtgtaagttyggggtttygggggttaggaggggttgttttaagataagggaagttgttygttagattggggttaatatygggtttttttaatttaagtttttttygaaaataatttttttaaaattgagtatttttattagaaaaaattygtattttttaggaggayggggtgggagagtttyggggaataaagttyggtttttttagttttgaggtygaggtagggygtatttttttttgggygaatttaatyggagttgtagaagagataagtatttttaaattggtattygtttygagtttaaggtgagggtggagaagggtttttggtggaagttgtaggaatattttgggtyggggtttatttygygttyggyggtttttygaatttygtagaaagataygtttgtagygaaaggtttttatatattagtygggattttattygttttttatygagagtgygttttgggagygygggaaataaggaaaaygtaygtatttggyggygtttygagggyggtttygygggtttttygttggygaaggtttttagaagttatttttygttyggttgttygttttayggttagttttttttttttyggygaygtatttygtygagttagtttataggaagygttaggagtyggagatttggttygttttttygggygttgygttygttttygatygttagggttygygtttttttttyggttayggtttattagagggatttygyggygggttttggttygggygygtttttttgygttygagtttttaggttttyggtygagttgyggagayggaygyggagttttyggggaagaygaggyggyggyggtygtygttygggtaggagtttyggggygggaggggtgtagggyggaggagygggygggattttagygtttygygtttygyggtygtygtttttyggggygtttagttttatttaygtggaatygtttygttttygtygtttygtttttaygagggaaggtattygagtttygtygtatattygygtttttyggtttygggttygaaatatygygttttttttttagygtygtgtttttygtttttttagygygyggttttygttygattygygygttygttygattygtttttaatttygtttaattatygtttttygyggttgttttttttgtttgagttttyggygtaggttaatggaattaygyggaggygygggyggtttggttaatggaaggtttagggggygtggttggygggaggggttgygggyggtygggttttatgygttgagattygagattgygtygtyggygggtgygtttaggtygtttagttagagtyggtaggatttygtygtygggttgtgggtttttgatttttttttygttgtygggagaagygtttgagtggggagggaggtgggaggaggtggtttygygtygggggtgyggggagygggayggyggtttggatggatayggttagtttygggtyggagagggttyggtttagagtagtttgggttttgtttagagttttattgtgtaygttttygygaggatttgyggagagaygtgtaggygaygtaggtttygggaaggaaggagggtatttgggttyggaygagygataaygttgtgttttgtgatttygtataaayggattttggagtttagggaaagygttttaggtttttagttygggtagggttygtgggattggygttyg

SEQ ID NO: 5943 - DNA, 7937 bp, Artificial Sequence
  Description of Artificial Sequence: Synthetic polynucleotide
gygtygtttgygaggggygttttgygtggattyggggtttyggggygygtttatttattygagttaggagagattgggttttayggtgttagtttygygttygggttygygygtygtttttagttygygttttttttattttyggagggtttygygggttttyggygaygggtttttgtttagggttygggaattttttttttttttttttttttaagygttattttttyggagtygggtyggtygttttyggtgtaygygggaagygggtagttttygtttgtattygyggggtygggattyggaggtattygttttttygatatattygttggggtygttgttygttgttttagtttttygaggttayggtaagagttygggggtyggygttatatatttttagtyggygatygygtttagggatttaatttaatygtttttagtttaatgaatagtygygygttaatyggattttygygygtttyggggatttaygtttttyggttttttttttygtgtttygyggttygttagaygtygttttygaaggygtyggtttggggtttggttaggggttyggtygyggggggtttyggtygtyggagtygggagaygtyggagaygggagtygggttygygygatygttattttygagttagtyggggtgggtttygygttttgttttgygttttyggttyggttygyggagygtyggtgtttatttgygagtttygggtttttyggagttttttttygggtygagtygttygaagygggygtyggygtaggtttygatttaggtaggygggaaatttyggagttttygttygyggttygtagttttttattttaggtyggygtggtttgygggggggaaggtyggtyggggtyggtygttygttttttttttttttttagatttttttgattygygggtttttygtygtatttyggttttygggttgtttyggtyggttygyggggattttggaaayggtttttagtttatttttttttattaagyggttttgggtygttttgaaatygyggagttagtaattgttttttttaggaggtttagtgyggattggataatagttaattagygttttgtttatattyggtgatggatagtttattggyggagtgttaattaattttagyggtttygygggagygggagtgggggyggggaaatagagagataataggttttgagtttaattttttygtgtttttgtyggaatgagayggtggagaatttygaatgygtgtgaatttgttagttggtttttagtttaaatattttttttttttttagagggggaggtagagatttatatggagaaagaggagtaaaaataaatgtatttatygttattaagatattatttygattttttgagaataaatagtatttgggtgggaaattaaattttaatagaaatatttgtttgyggaatattttagaagtggtttgtatttgattaygataaaaattgtttagtggtttgttttagttggagtgaggatttagtagataggtagatagggagtagtattgagaaatattatatatggtttattatattatattygttttttttattattaaattgaaaatattttttaaatttaggtgtagatgaagaaagggtaatttttgtttttttaataaatttttgatttttattttagtagttgttttgttgtaaagtgtggtagagggagataaaattgagagttagtaatgtagayggttggagatttagaatttattttttagggtttgatttttaggttatggggaggagagagtyggaygggttatttaaagtttttgttgtttaagtagygggygtgygtgygtgtattygygagttygggttygggtaggtagtagttttagagyggtagatgggttaggtaatttggggaggtttttgggtttggaggtttggtttatttgttatttgttagatagattttagggagaaaaagtagttatttttaaggggtggtggtgtttttttttttggttttttgtgyggtagaagttaaaygttagatttgttggattaaatatatatgtgtgtgtgtgtgtttgtgtttgtgtttaygttttttttttygtygggataygygtattygttygttttagttttttttttygttttgygttattatatttttatttagtagtaatgatttgygtagaggagttgygtagtygtygggtttgaattaggygttatygggtttggtagtagtttygttgttttttgattggtagttttttggttyggygttagtttattgggaggtttgtttaygtygaatgagtggtaygagttttyggtygtggagggttgygyggttaattagygygttggttgtttygggttgagtggtaygagtttattagtatgtagggttygtggttygtygygttaggttgtaggtttgagagtygttttggatgggttygttagagtygttgttgtggaagyggtgtatttatagtgtaatagttagtatattgaaaatattaataggaatataaaataaagttatatttattgatttaattgtattgtatttagttgtatttaggaaatagtttttagtaagtaattgaaattgtttttattttttttttgtttttgtatttttattattattttattttttattttggttttggggttttatattttttttagtaaaagaaatttaggattgtgatgttaagaagtatatatttttttttttaataaaattygttaaaatgttgaggttttttttttttttaaaaaatatggattatgagygatttttttttttttgaaaaattttatygatyggtttaaaattattttygtaatgtatttttgttttgttttgagygtttgttgtttygatygatatttagtattaaaaataaatattygaagataggatagggatygttaggttgygtttggygygagtygygygggtggtatygggyggatagtaggygaagttygggygtygttagygtgygtttagttttgggtgatttaygaaygaattttaatattygtttttttattttgttttttttttyggaatagttttgggttggttttgttyggtyggttygyggygaggggaattggtygggtygtggtatttayggtygttgttttgaggggtttttygggtygaagttaggggtyggggaggggaatggttatggygagtttttygggttttygtttttaatttagaatttttttttttyggagaagtgggggtggaggagggggatygagtaaggtyggygtagyggggygtttttatygygygygttygggayggygygyggggttygggttayggttygtgtggyggggttygygggttggtttttttygggygygggggttaggygygattttagtttttatgatttttttagggagygggtgyggttgtttygtagggagygggttttgyggygayggtygagttattygygttttaaggygygtttggttttagttyggtttgtaggttttatygygttygygttttyggagaygaygtyggagggaggtagaygggttagagttttggttttyggtaggygggygaggagagagygggtttttagatgtaaaagtaggaaataaagtaaatttgtagaagttttagattttggagygygttagttaygtttggggtygyggtaagagggatyggyggttttagggttaygttttgttttttygggagggagttttgtgtttttaggtttagtttttttygaaatgttttygttagygatttttygttygttyggggttttttgttygtygttatttttygttttatttttttttttattttagttygatttggygttgyggygtygttttygyggtttttyggygyggttttttttggagttgggttgggagtgggtttygggtttyggtattyggygggtggyggygtygtygttgygggattgtgggatttttagttygggtygtgtggtygttttttttygttttattttttggtygttttaggttttttaggttttygaagttyggygygggtagaygyggaggygyggygyggttttttttygggaggagagaatataaagaaaagttttttttaattyggttagagtygtggyggygtaggtaggygatagtaatttattttttgtttgtttaaaaagtygagtaggttggtgagaaaggaataatygggtttgygattygttygtagggggtgggagattaaaattgttgtttygtagtygagttygygtttygagaatygtyggtagttygygtttttttaattttgaaattttttattggagagaaaaaaaaaaaaaaaaataattataaaataaaagtatagtatataygattttttggaggtygttaggaagtttggtattttygygtgygtagttttyggttttttttyggttttyggygtttttgaagttgtaggtttttgatttttttttttttttttttttttttttgtttygttyggygtttttyggggttygggaggygtyggtyggggttgggggtttttaygtttttagtttagttygggtagttttttttttgatttttgygttygtagttttttygttagagtatttttygggttttggyggtygggygttygttttgtaggtygggatyggggtttgggagtygagttatttgttagattyggggagagagttggygatttttagagggaagggagttttaaaygtttttgtatgtagttgttagataaagagaattttttgtgtagatttatttatttataatgtaaaagtttttygaataaatattaaaaaagtttattagttgagtaaatatgtatttatttaatatattatgttttyggttatagattaaattaaatataaaatagtttgtaaataagaygttttagaattyggattataaaatatygtaatttaaaaaggtatttagtagatggaaaatattttaatygttttgttgttatggtggaatggttataaaaatataaggtttttygtaaagtttttaattaggaatattaagtttatttattttttttttgttggaggtgataaatattaaaataataygtatttagaagatgaggagtaatatgtgaagtgygtttagggagygttttyggagggaygtttgggagtayggtggtgtaygtagtttttattattggtttygatttttygtatttagagtttaaaattgtttttaatttygtttgagtggatgtttygygttgggtgggggtggaagaaaatggaggtgagggttattttaggtggtygaggttygggtagggtttgttggtagaaggttgtgttgggtygggtttatttttttyggttagagggtygagttgggygtygtagatttygygtatttaggtygttyggtattgttyggagyggagatyggtttttgttygyggttttyggtaggygttgaaggaagaaattttagggtygatttgggtygttgagagagagtattttgattttgaaagtattttttttatatatatttttaagtttttaattygtagaggaagattttgggygaatttgattggggggyggggtgattgttatagttttaataggaagttttyggtttygggatagtaggtygggtattgyggygtggyggtttaggtgatgtyggtggyggttgygggttttyggggttttgaggagtyggtttggggttttagygygatgttggggataggagttggtttygttggggttggggaggggggattayggtggatttagaagaatgggtygaaagatgtatgagggggatgggagtggggagaaaaggaaggttattaaaaaaaaaaaaaatttttgagttataattaataaaattattygtttaattagtatggttattyggttaagyggaatgtagtaaaagttggatttyggtatgaggtggggagagggggagagttagtgtggattttaggttttttttttygagatatttttgggtagygggggaggggagagggtgtgygtgtgagtgtgtgtgtgtgtgtgtgtgtgtgygagtgtgygtgatggtttygtagatttgggtttttattatttagtagagttagtagttttttygtygyggygttttagttgtagggattygyggggaygagaaygggaggyggygagtagtgyggttgggttttttyggttgtttygggttaagygtggtygggayggtgygtgygygygyggggtttygggtgttgggttgygygygygtgyggyggggagatatygagygtttyggtttygttattyggtttggtygtygttygttygggtyggygggggtggggggtggggggagtgggtgagygggyggggyggggattttygggygagtygagttttttagttattygtgttttttttgtttttgtttttatagattatggattygtatagyggtygttggttyggtgygyggtygttygtygagaagtttagttttttygygtgttgatyggtttygtygttattatygtttgtgatttyggaygtygtygtttttgygtygttygygygtygagtygttttygggtttyggtygygttgtttygaggaagyggyggyggatyggggtyggggttyggtatggatggtygygattttgygtygtygtygtatttgttgtyggagygygggagtttgggttatygtagygtygttgtygtygygygtttygtttyggttgggttygtygygtagtttttygtatatttttagtygggaaagtatttttygtygtygttgtttatggtttygtatataggttagtgttyggtyggggygggygygggaygggagygttygagagyggaatagggygtttattttttygttttygggagtagagaagttttggttttatttttyggtttyggtygyggtggttgtttgggygttgagyggggtygygygtttygttagttttttaagttgygtygtygyggtttagagaggtttttttttggttattttttttygggggtttyggaggggtagtttyggagtyggttgaaattaaagttttttygygtttygttattttttttygtttttttttgtagatttaaattttayggaaattttttttttgtattttgtatttatttttttaagaygtttyggggttgggataaygaggygttttttgyggaaataaaayggttgttgtggyggggggaggggattagggtaygtygyggtttygyggattagagtggtgtgtgygtygggygagygttaatagggattgttggtgtaagaygagtaaattttgtttttatataaagttttaaagtgttagggygagaatgggtttgtagggatgtatttgttttaaygagtgtttttggtatttygttaaagtyggataaagygtggttagagtgyggtttagttttttagtttgyggttyggggaggagggtagygygggygygggttgggggtggygyggggyggygtttaggatttyggtgtaggygagagtgyggyggatttgttttaagaggagagygaggyggatttgttttaagaggagagygtggggygtygtgttgggtttygtagggayggattttttygggyggttttttttgattttttgttygagaggattagtttttggtagagygggtttaggtttttagggtagtttttttttyggtggttttgatatgagtgtygagggaggttagggtaggggtagttattaygtttgaagttttagaggttattaggyggygygggtagattygggggaagygygtagggttgygttagggattygtyg

SEQ ID NO: 5944 - DNA, 1408 bp, Artificial Sequence
  Description of Artificial Sequence: Synthetic polynucleotide
tygaggtttttygaygtggatatttaaygtttttggaaagggagtgaattggtaggatattatygtttyggttagtttygygggagttgttttttagaaaaaaaattttttagagttaaaagttattttttaagygttttggggtttttygggygtttttttyggayggtaattttagaagttaaagygattgtatygttaggtttgtggyggttggaagyggggtgatygyggttagatggtatttygtatttaygtagggttgtgttattttagtatagaattagtaatttttataygaagttttgtgtaaatattaygygggtttatttttgaaygattttttgatgttttygttgyggttatttattttatatataaattaggatttygttgataaattttygtgtttttattaaatagaaggttgttttgtagtttttttygtgtttttttttaaagtaygataatatttgatatttttataaatyggtttgtagaggatatygygtagggggygattaattagttgaggtgtgttattttaaaatattagtgggtatattttaaggygggtaygtggaagggaygyggaatygagggtaattattttttagtyggtgaatttgatggagaaagatgttaaatgtatttttygagttagttgaatttttygggtatttaattattgttagatgtggygagggygtayggagaatatttttagtttyggagaaaatattyggtygttagygyggggatygttygggtygggaaayggttagaggygggaggagagaggattgggygagygtggggagygttgyggygtggaaaagygatygggagggatggygatgtttttatttttttyggtaggtttttttaattaaaaagttggaaaygggaattygtaaataaygatttagggttttaaattatttgtaaagaygygatggggaggggaatatttgygygttttaaaattttaatttygaggtttttagtygygtttgattygggagtygggtgygtttttagtgttygygtaygaattyggygttttggtagtttygatttttygggttygtagtttaagggaaggttygygygggaggtattttygtggtttttygygygtttygaagttygtttttttygtttagagtttygyggagttgtygtygttttattttttatggtgatygtggggaygtatygtyggtyggggagtttygygygagygtygygtagtygaggaagtygtttygagyggttgtttatygtaygtttatggtagtygygtygygygtyggtygtttgygttttygttttttttygtygtygtyggttygygtttttygygttttyggtttygygttttgttgtttyggggttgtygygygyg

SEQ ID NO: 5945 - DNA, 208 bp, Artificial Sequence
  Description of Artificial Sequence: Synthetic polynucleotide
gygggygtgggggggaaggggaagaagttyggygagattagaggggaaattygaaaaagtaagtttttgyggtagtagttaggaaatattygttaggaattggttgygattttaattttagyggttygaagttttagtttttttatttttatygyggtagagtygttttygtagatatttttygaggagaatygyggtttygagggyg

SEQ ID NO: 5946 - DNA, 805 bp, Artificial Sequence
  Description of Artificial Sequence: Synthetic polynucleotide
tygttttttgtttttygtattttttygggggaggggtyggttygygttygtttttagttygaggggtaatttaaaatatggygtttygggygggggatttgtgtaaattggyggagaagggaygyggggatygagtygttttttyggttagggattttagggaggtttttaggtyggaggtyggggtttaggttttgygygtyggtttagttattattgygtygtggygggyggagygggyggggggygyggygygtaggttyggttyggtgggggtttyggygagygggagggyggttggggatttyggtygygtygggygyggggttygggattygggagatygygyggygtygaagttaygygttagttttattgtttygygygtttygttttaggtttygggtttttttttygtatttygtaaagtygagattttttygtagttttttatttygagaggyggaaaagttatttgggattagtagggagttygggygygtygyggygtggggattaggttygggygygygttttyggyggyggtgygtaggagattygggygtggggaggaagtygtagtttagggttgttygtygttgtttttttygttttttgttgtaggagatatygaggtttygyggagttgyggygggggtttaygtttagagatygtgygaggaaagttaatttygttttgtttgtttttttagtygygggggagggggttatygtagtattttaggatagttatatgggtatagtttttttygttttggygtagggttaggtttygyggaygayg

SEQ ID NO: 5947 - DNA, 2462 bp, Artificial Sequence
  Description of Artificial Sequence: Synthetic polynucleotide
tygyggtttagttttaatttatygtattttagagggaattaygagggagttgyggattggygggggygggggtttgtaattaatattaggtgtttgtgagagagttttaagggygggggtagtattttttggttgggttgggttygtttggtttygtttygttttygggatttttggygtttagygtygttttttygttattgygttattygttagagttyggygttttttttttttttgttttgtggaygtygtttttygttttygggaggatttygtttttagtattttaggtttttttggygtaaaggtygttagttygagygagtttaggyggyggttttatttttgtagagggaaagygaaagaygyggtyggygggtygagggggyggtygaaygygtygygtggttgttgttttygaattygtagyggyggygttagggyggttatygagttttgyggatttyggtttaatttttagygttattygggtgtttygagttygtygtagttttyggygygttttttagtygyggtaygtagtttttgaygygttyggggygttttttygtagtattagttaggttattttatttttygygtygygttttttygttagtygtyggttaggagtttttyggtttttgagtaggaygygttaaagggagttgggaggtttagtagtttttagygtygttttttygggtgaygtgaygttttttttggagygygggttygttttygttaagtttttatygtaggtttttatagtygagttaygggaagatgtaaygtygggygaggggygtttttyggattttgaaaaatagttttattygtttygggaaygtttygattttttattygtattttttggttagatgattttaattttgggatttygygttggtygtgggggtatygggagttggagttggaggagaggagtyggtagygyggagttgtyggggtgtagttgygygtagttggyggygaggggaggyggtttttgyggtttygtygggttgggggaattggtttttgygtttttgtttttyggaggatygtattygtttatttttatatattatatatatatatatatatatatatatatatatattgtygttagygttttttaygttataagtyggaatgyggaggttagagttattgtttatttgaaagtaggaaagtaggggttgaaaygttgagatggaggyggaggttttggttttatttgygaggttygtattttttyggaaggtttttttttttttygygtttttttagggygagtaaggtttagtttttgagatttygttttttgggttagyggttygagttgtaggggggyggggayggattyggagggagtattagagagagagttygygtttatttttgtttttttygtaaagaattggttagttttattygygtttagtttataattaggttgtygggatyggggagttagattttaggtygttttaatttyggygagggyggggaggggagtgatagtagtaattagygygygttggtaaaagtatagagtttyggaataggttaaayggtyggygyggaggggtggaggtaagagggggyggaggaggagttgttygagyggagagggatgaygttttttagggttttgggtttygaggaatygaagattggtgygttygtygggtttygygtattagttttggggttygtagaggygtygygttyggttttygyggtagttttaatatagygygtaggyggtygatttyggttagtttaaatygggygtaagttttttgttttttttaaagtatttttttgttygtttttagtttttaggtgttygtttgagagtttttgtygttttygggyggattyggttaggtagttttyggtygggttagtttygtttttttttygtttttttttttatygatttygagttaagggtaggyggttygtattygygtttttgtttayggggttaggyggygttttyggtttaygttyggttgttaagaagagaaaggygtttatttgagttatygaagtttttttttggggtttttttyggagtttgttygtagttygtaggtataattttttttggagaaaaaaagtagygtaagggtagagagaggtagggttgtttataggttttttygtaggggttttttttttygaatttttyggggtttagtttygggttyggyggygggaaagagtttttggaggttggaaggggtygttagattygggtttttttygtagttgyggtggyggtatttttaagttgttatttgtagygygtttygggygtttgtgatagttygygtygtttagttttygygggttygtttttttygttygttygttggttgygttyggtgttygggyggttttygygttttgtttygttttgagttygttttttagtygygygttyg

SEQ ID NO: 5948 - DNA, 990 bp, Artificial Sequence
  Description of Artificial Sequence: Synthetic polynucleotide
aygtggtgtgtgtgtgygygygygagtgtgtgagygttaggggtygttygttygtygyggtttttygtgggttggtygggttaatgagygygyggttgtaggggyggygggyggggagggggygtygagttttgyggatggaggygygggtagygyggygygtttatttygygygggygttgttggyggggggyggygtagttattggattyggatyggggtygygattyggggtggygggtggygtgggyggygttyggggttgggatgygtygggggtttagtggyggyggyggygttggyggtggygtyggyggttgtagggggaygagttagygtygyggygttgggagttagttgagttyggtyggygagyggaggyggtagygtaggtagagyggyggyggtagygggagttygagygttgygygtttattatggtygtttagggagagttyggttatttggyggygtagtyggatttyggttttaatagygagygtagtatygattttttagtgttyggtttygaggaygatttggtygtyggggygattttgtatagttyggagtggagygaggagygttttygygtggataggaagaaatttgaggttatgttataaggtaggtatttttygtgttttyggatttttygattgagtttttaattttttttyggatatttttatygygygtttyggygttygttattttagtttayggtyggtyggtttagttttaggttygttttttygyggagtyggaggatatttagggattggagatttygygggattttttatttttttaygttttttagatttttaggygttgggggttttgtgygaatttgattggttttagaaaagtygaaggtygagtttgtattggygygtttaagttgygttttggattttggagatgttaattttagttyggatatttgggttgtgttattyggattattygggtygtatagagtatgyg

SEQ ID NO: 5949 - DNA, 2274 bp, Artificial Sequence
  Description of Artificial Sequence: Synthetic polynucleotide
tygtttttygtgtattgtttgyggttygtttygggtttataygggatatygaggtatgatgaggaygtagaatagtagaagygygttttgtttttygggygttagtgttyggggttagyggygtgtattyggygggttyggtygggagygggttggygatygyggggttyggygttttyggttttygygttatttttyggygttygttaatttygtttygttygyggygtagagaagttygtagtttttyggagttttagygattttttggttygtttttttygtagtygtygagtagygtaggttyggygatttygggtgtagttggttttgtgyggtgatatygtygttyggygttaggttygaagtygtttggtygygttygyggggtygtaggtygttggtttygttyggtygygtttataaattattygyggttygtgattygggataaatttttggyggyggygtagttttttttatagttattttttttagagttagttattaaaatagaagaygyggtyggggygaggaggtgggyggggggagttyggtggtygttttttttygygyggttgaygttygtttyggyggyggtagtggttgtggtygyggggtygtttttagtygagttttyggaggygttygggygygggtyggyggggtaygggygtttaygttttttagygggtygyggyggygtygggyggtygtgaygtgagygttttttttagtyggtttgyggggtatygttagttagtyggggagtaagagtttygygygtagtyggygygggttyggttatyggygygtygtygttyggggttgggtttggggttgtttgtggagaggyggygggyggaaygygygyggttayggttayggttatygttayggttayggttggtagttygggtttygggtttygggtaggggaaggggagaggyggygagtttagtaatyggaatygagggaagattttggtttygygggttygtttttygttttttttgttagyggygttagaygtygagtggggttagggataggggaggaggatttaggattttgtgttygygtttttggagtygttggagttyggatttttgtaattgttggtattttgggggtttggtttagygttttgttgtttattygttttttttygttgtttyggaattaaagttttyggtttttttygttttygygygtttatttatygtygtyggggagyggttyggttygtatttagtattatgaggggatttgggatttgtttggygattttggtyggatttttgttaattgyggygggygagaygtttttaggtaagygggatygtttttgtygttttygaggygygygggtyggygygggaygttygggaygtygatagttttttggtggtagagttttaaggttggygtyggggtygggyggggggygyggygggtyggatatygtttttgtttgtgagtygggygttgggygaggggtygtggggttggtaggtatttagttttygggygggyggagyggayggatttygagggygagttttttagtygggattgttagttyggtygtygttttttygyggtttgggttagtgtttaaggttgggyggtttgtatttttgagtttttggtyggttgtaaaaggaatagtagaaaattttgtttgaagtttttagttgtagtygtygggtygtttggygtaggygttgygyggttttygtygatttygagtagyggtygggtttaggtygttggtgttyggttgygttygtagygatygtygggaattggyggtygtttyggyggyggygatttttyggtgttttgttttttttgtygttttttgttyggygyggttggygatttygggaggttttygyggtygtgtagygtttgyggagaggttggggggagtttttygtyggttttagyggtagggtttggyggtygyggagggaagygggtaggtttttaggttttggttayggttttgygtttygttgggttttttttttttattttygtttttttagyggagygtygyggttagttgtaatttgtttatttagttyggttgttygggggttttaggtgggaaggagaggtattggyggtgtgygagtaagygtgtgagtgtgtgygygtgtgtgtttgtaygygygygygggggygttttaagtttagaggaattttttayggagaggatttgtggatyggagtygggggttyggygtgggggygaattyggtayg

SEQ ID NO: 5950 - DNA, 882 bp, Artificial Sequence
  Description of Artificial Sequence: Synthetic polynucleotide
gygaagtgattttttaygtttggataaagygttygaaagtttaggttygygggttagttttagtygttgggtttgataggggttagggaggygggtyggttttatagttaagttatagttttagggtttggtygtatttgagtagygyggtttygggttgttgttggygttgtaggtttygygtttgattttttagtttgygtagygggtattyggtygggaagaatttttttagtaggyggtttagtattaygtttaygygttygygttygygttygygttygtggtygygygggttttagttttaygtagygtttatagatygtgagttygtagggtagtgttatyggtttgtgtagtagtttygggtagttaagtaggtygyggggygygtygggygttagggtyggttttttttagttttgagttygtygttyggttttttygttaatagtggtygttygygtaggtygggatatattaggtygttygttagtttttttagttttttyggtygtagygtttttagtttttyggttatayggaaygygtttagggttatygggaggyggtyggygygggttagagygttttttagttttaggtatyggtygyggtygggttgygttagtygggttagtatggagyggaagagttygattgttttttggtattygttygygyggaaggtttygtygtttttttttaagygttgggygattggtttttygtagtagtagttygttattggggyggyggygggatyggtttagtgttgattttygyggggttgagatygtgygggtttggagygaaggygyggagtaggggygatgagttgttgttgggaattggtyggygggagygyggttatagttttyg

SEQ ID NO: 5951 - DNA, 4359 bp, Artificial Sequence
  Description of Artificial Sequence: Synthetic polynucleotide
tygtgttttayggaaattattattatygtatttataggtttygaggggyggatataaagttttttgggggaagtggggtygtagatttttttygattygaatatagattygtatagggygygtttgggygtagtttyggattttaygtygggttygatttggttgtttttggggaggatgtaagtgttttttagygagggyggttgggggyggtggtggtgggagggatgggtgggggggtggtgggagtggtgtygtgtygtttygtttagagtttyggygtagtagttttgyggggygggygagtttagtttggtgttaatgttygygatgttgttgagygtggygatggagayggygtygatgtagtggttggtgtaggttttggagagtttggtygttttggagagtatttgtattygagtgtttagtaagtttttgtygatggttttgttttygtattaggttatatygttttygttgtagtggtttyggggtygttggaagaaygttttgtagagagggttgygtttygataggtatttgaygaagttggygtaggggtagaattyggtgttygttttatatatgyggggtaagtttttttygtygttgttttyggygygttttttgttttaygaygaygagygygatttgtggtagggttygagggatttgaagtagaygaatttgygatygttttygtttatggttagtttaaaagagtttttttttaatttaygttggttttygyggtygygggtatagaagtatatgtaygtttygaattagattttgttgagtagttygaagggygtgttggtgttgaagaygttggaggtgtatagtttgygtaggtyggygygygtgatggtttgtttttgtattatyggttyggygttttgtttttygagtttgyggatgatygyggttagygttaggttggygttgygtagttyggggtttttggtgaggtygagygtgyggtagtaygggggtttattgaggtagyggttgagggagttgyggatgttgatgagygaygatttgttgtagagttggtygtttttggagygggtttyggtatagaaggagygtagtaygyggtatagygtttttttgtttatggtttygaagttygggttttgygttttttygtttaggtattttyggaagatgygtayggygtagygggtggttagtygggtgttttygtttagtygggttygttyggggygttgtagtaygtyggggtttagttyggagtygttttygggyggtttatygygggttyggggygttagtagtygyggyggygtttygggttttagygyggygttttggtttatattgattatatggatyggttygggttttagttttttttyggtygagttttygggttttaggggttygttttagtttagttttattttttttttttttttttttttttygtttttttttagttttttattttygttttttttttttttttygtttttygttatttgtattttttggatttygtttttttttttttttttttttttttttttgttygygttgtagtagtgyggayggttgtggyggyggtygyggtttttygygtygygttygttttygtttygttttttattgttttyggyggyggyggyggtagygttggygttgtygttygygttggtgttatagttttygttgttaggtattttygttatattgtygtttttttgttagttttygggtagggygtatgygttatattggatygtagygttgagagtttttgtgtttaatgatttttagttatygggaggtaaagtygggtttttaaaggagtygygttttaattgttattttygagygtagtttyggaggggtagyggygygtaggggatggaggggaggggggagggggggataagttagatyggagagatagggtaaaggayggaggttgattagatttttttttttttttattyggtttttatttttaagaaaattttgaaggaaaaaaaaaaggaaagggagggagagttgtyggtgggggygaaatatttttaatttattttttggyggagaattgygygggttygggygggagagagggagggtyggygagagggygggayggtttygtttttttaagtaatgttygaggagtagtgttttttttattgtttttttattgtttttyggagtyggggggtyggggyggyggttgygtygggygggtygygggtgttgtygygggaaattygtgtttggggtygttyggagyggagyggagtaggtaggttaatgagtagggtggaggaggtayggygaggtttygtattttttyggygttygyggttagggygtagygggygaggtttgggagygggatggggttggyggyggyggyggtttttttatttatttgttggyggygaggygygggggtttggggttagtygygyggtttttaatttttttttygatttttgtaaaggagygaaataygttttaygttagttatatttttttygatttttttaatagttatatttaagttgttattaaagatttggggygtttttygtaggtttggggtaagttygygtyggtttagttagtttygggaaggagygaggtagagaagattgggaggggtyggtgggaggggagaygagggaagaggygtttgggattttaggggttatagggatttttttttattygtttagggygtygttttttttgtttttgagtaaagtgatataattttttygggygaggygttttattaagttggagttgaagtttttttaaggtttatygggtaggyggaaaaagygaatttgtgtttyggtygattttgtygtagttataattyggtaattyggattyggagygtatttttatttaaagtttgttaatygttattygttygtttttygggttgygttgttttaggygygygggggygggtatttyggaaattggaaaagtagttaaagagttygtygggtttygtttttttataggagatattgttttatttttagttaaaygttygttttyggygygtttaggtttygggygygtttttgygtygtygtttttygttttttyggtttaggggtagttttttagagtygtyggggatttyggttgtttttttaggaggtatagtttaggttattttyggagttygtgttgtattttaatttttattttttttygtagttygtgtgtattttggygygygggttagttgygagtttttggggtgaggggataygagggagttaggtttttagtagtgygtttyggtgttaggtygttttgttgggaggtagtttygtttgtttttygggtgygttttygaatttatttttaagttygaattttyggtagttaggttgtgagagttatgttaattgtttgttttttttttttttggtttttttgttttgtttttaagggaagtattttaygtattaattgaaatttatttattaatttgtattttttttttttaagaaagaatgaaagattaggttttagggtagtgtgggtttttgagtgggagttgaygatgtttttttttgtagygaaygttgttggtttttygygtgtttgttyggttttggaygttattygagtttyggggaaatygygttaggtgtgaaataagttagagtaagtttttgtttygygggtygttttyggttttttagggaaatataagatatatagatatatatatatatatatatatatatatatatatatatattaygtttttattygttyggtttttygyggagaatygttygggaatygttttygaggtgyggygygggaggtggtyggttttgtttataatgtattgttygtygtattygttttggataygtgtagaaaggygtgttygttttttygaggttgyggtgagtagttaagttagttgtatattgggatttttatataygagttggtatatattagttatatayggttaattttagagggttggttttttgttttgggaygtttttaggttttygggtygyggtgyggagaatttaggtgggtgttyggtaagttatttattaggggttgttttttygygattttygttataagygtagggattygggggtygygttggtttygggttgygtttttggtttggtaggggattaggtttaygttgtagtttgggagyggagtygttttttaggtttttttatttttgygggyggyggggtttattttttttttattagtttttttttttattgggygagttgttttgaattgttygtagtttgtyggaggyggtgtgttgggttggaygtttyg

SEQ ID NO: 5952 - DNA, 2762 bp, Artificial Sequence
  Description of Artificial Sequence: Synthetic polynucleotide
aygattygggaggagagygtggagtygggtagggataggygtgtygtattatggygtattatggatagggtttygygyggyggyggtttaygatygtttaggggttgygggagaaagygygagagattgyggaggttagtttygtttagtttttgttttygttttagtagtatttatttttyggygggtyggagygygttaggttttgattygtgaagattayggagyggggtaatttatattatttgtttttattttyggagtaggtattttygagttgygttygtatttttyggggttgttagttggtagtagagtatttttttttttgtttygagggygataggtagggggatttttygtggatttttttgtttygyggygagggtgggtaygtttttttttygtaattttygagggattttayggtaggyggagatygatttgggattagggtattgtattygtttagttagagggtttyggtygaggttgtgtgaagtggtttttaggtttgggttggttggtygggaggagtttgggggtattttygggttggaggyggyggaaagttgggttgttttygggttgggaattygtagygtgtagtggygagggaatttgygttyggattggagtaggtgttttttgtygyggaggagttttttagtagagattaaatgaaaaggttygttggttttttttygagggtatgaaaagtayggaaggttttaggtaaaggygttttyggggygtatatagggtataggtagtyggatagagaaaggagtagtygygtaayggaatttttygttygggggagatattaggygtgagaggttagattygttttataggtaggygttgatyggtagagattttttygggtaagagggttagattttttttttaggtgggaygaatatagaatattgtgagggtaagagaagaagaaaaggaggtaattttagattgggataaagataataggatagtagagtttttgagtatygggaggygtaygggtgtagggtggggtaaggtggaggtaagtttygtaattaagatattagagtgagaatttttattgtaaattygygatttatttttgtagaaataaataaaaaaattggagtaaagtattatgygaggggygaaaggtatagaaaattgtaaaatttgggagttattttgttttatttttttgttgtttggggatatttttygygagtttgttyggtttygaagaaggagtagaggggattygtaatttagtttttagagtttygttaggaaaggygygagagatttattggtttyggtaattttgtttyggygttyggayggagttygatgtttgygtagttatyggttgygyggygyggygyggygyggygtggtattttttttttygggtgygtagttyggtttygtagyggygyggggaataaagggattyggygtygttygttttatttygttygtggttyggttygyggggatygtygygtatttgaagtagggtygttagtagyggtagtagggttygtagygttttygttattyggtatatggaggyggagaggggtygagygaagagtyggaggaggyggyggyggyggyggyggyggyggaggaggaggaggtagyggtagtattaatagyggygyggagaaayggttttaggtagtttttattttttttttttttttttttttttttattttttttttygttgtttttygtttttygttaatggagagygagttgatgataaatagygggtygyggagttygygggattygtattaggagtaataaaatagatttagagattaaggagttggggagggggygggggaatagggagggagagygtgtgagygtttgygagtgtgtggaggyggttgttgtggtagygtaggyggttyggtttyggttyggagygtagyggaagtygygagggatgtagyggyggggattttggtyggtggaggatgtggaggtggaagtggagyggatggygttttttaagagtttygttaygygaggtttygggttygtggttttgtttttttygggttttygttttagggtygttyggygygaygaagaygtyggggatagygtygyggggagggygtttygggtygtgygtgttgtatttataaagagtagtagtttygttatttygygttttygttgygtgggggtygaggggygtttttyggttttttttttyggtttttyggygagttggagattgtttttyggtttyggtygtaagggggtgaggygaggggtyggygyggtttttttygtygyggtttygtttygygtagttgttgtygtagtygtttttgttgttygygtatyggtattygttygtyggttttygttttgygtygtttattygygygygtygtttttygtygtygatygygtatttygttyggttttygttgygygatttgggygagtygtygtygtttttttygygttygttttaygygttgtttggttgygyggttygttttttttttttatttttttygtygtygtygtygttttygttttygtttttttttttygttgagttttttygttygygtygtggttaatyggaggttattaagttgyggttgtagtyggtyggattygyggtagtygttygttttygtttygtygaagygtttygtattttgttgtagttygyggggggtygtyggagggaagtttagagtgygtygagtatygtttyg

SEQ ID NO: 5953 - DNA, 338 bp, Artificial Sequence
  Description of Artificial Sequence: Synthetic polynucleotide
tygygggagtygygtaggygggyggttagggggagtgggygtygttyggtagygtttygygtygaggtataagygttygygtygaggtataagygttttygatttatyggtttygygygttttttygygygtttttyggattygygtttgtttattttttyggttttgttgyggtygaggttttaagtyggttatttygtgtttaggtaatygygggggyggyggyggyggygtgaggagygggyggttgttgtttyggggttttttggttygagtttttagttttygattttyggygtttyggygttygattagygttttaggtygttttygtttyg

SEQ ID NO: 5954 - DNA, 1435 bp, Artificial Sequence
  Description of Artificial Sequence: Synthetic polynucleotide
tygyggtaaygatttttgggagtgatygaggtattygggttgtttygtgtttttygggtagygatttaaygataaaatttgatagtgttttggggaaaattttatatttatygttagygttatattygggttttatgttaataaggagatattgtagattatygattagattygtttgtttttagagygtgyggtygggtttttagtttggtttttaggygyggtggyggyggtgggataygygttaggygtttagagaaggatatgggataatggtttagttygaggaygttagaygtygtygttygattyggggaaggaagtttttgtagtyggttygggaattygaggyggggagggaggttagttttggaggtgygttgtygttttaaaataaaggattataaagattgtatagtggggaaaaygygtttggttaatgygagtggggaygatttggggagggggttgaggaaggtagggggtataygagttaayggyggtttayggttttttttttttttygtttttttttttttttttttttygtygggttgtttyggtagataaataatagaggaaggygagttatttatygtggttttgataggtaygtagagtatttgtttggygtygtygtttttttygyggatttygttyggttggtttagttggaagtttttygatttgatttagaatttaaatttggygttgttygtggagttygattyggagttattgaggagttggaygattygttygtattttttaygggttatygttttggttttgtttgagttttygtaagttttgaggtattagttttggaattggyggtatatgtygygttygttttttatgtttttygygttyggtygttggtyggatgtttttagygtatttygtatttgtttattttaggtttatgaaaaatgtagtttyggttaygttgtagggatgygaggtttyggtygtagygggagtttgttttgggtgggggaagggatgggaagaggggaggagggttyggttgggtattagtaattaatgtttygtgttattaagtttggtttattygtaattgtaayggttgtttyggaygttttttttgtttttttagyggtyggtttttttaatattttgtgattaggattattttaatattattttggtttagaggagttgggtttttaataattaaaattttattttttggtttattaaaaattttaatattgaattggggtggtttttagaygtttygttttygggttgygttyggggttgggtaggtggagygtagygtygttttttygygygygttttagaagtttttttagttattggtttygtggtttaggagtgagggttgygtttttttygaaagtagtygttygtttagygtttttgagtttygaagggtataygggtttyg

SEQ ID NO: 5955 - DNA, 510 bp, Artificial Sequence
  Description of Artificial Sequence: Synthetic polynucleotide
tygaggygygatagtttattaaagaygagggttggttttttaaataaatygyggtgattttatttgyggygtttttttttaygtyggttttttttttttttattagagyggttygygtygattygatgggyggattygatygygtaygyggttygygggttyggyggaggtagttttygtttyggggattygggaygygtygttttttygttttaggttgttygygtaggaattttayggttayggttaagtggggtttttgtttyggatttygttgggttyggayggtygagagtttagggatttgggggggygygygggttttygagtttaggyggggyggygggygttttgtygtttttttttygygygtygygtygtygttyggtttttygaagtygttttttgtyggygygtyggtygtttgygttayggygggygttatttatttygggtagagttttttgttygtgtagygygttttgggtttttagygttgatttaygttyg

SEQ ID NO: 5956 - DNA, 2722 bp, Artificial Sequence
  Description of Artificial Sequence: Synthetic polynucleotide
ayggygatggatagtattttyggttttyggtyggttaggagttygygagttygttygtttagygttttgggttygatyggtgtagttttttttatttttattttttaggtygttgtatttaaaaatttaagtttygttttttygattttttttttttttttttttatyggygttygttgttttttttatggtatygtttttattagtatttygtttaaaatttagttttgttttagygaatagttttttaygtattttagttttggttttygttgttygagygtttttttttatygygttygttygaggttttttttygtttagttygtygttygttagtygtyggtyggtyggtyggttygttagttygtttttgtttttyggtaaagttgggagggaaaggtgtatttatttttgtgtatgtttgtgaatttgttttttagaatygtaagttygtagattttgttaaatttttygaagaggggtttgaggttttttttatttaggttgygggggatttgtttaatgaatagtttgatggtatygtggttttttatgggaatggtygaygggtttttygggttgtggtttaattygtttatgtgttyggtattgttygggttgttgtygagttygttggtattgaggtttgygttgttagtttgttygtttgttaaygtggttatttttatatatatagagaaaattttttttttttttattttttttygtttatattttttygtttttttttttygttygttygygtttatataygtataygtatatatatattygggttttttttttttyggtttttttatatttygtttttygttygttttttgttttttttttttttttttttttttygttygttygygttygygttttttttttgttttttttttttttttttttttttttttttttttttttttttttttttttttttttttttttttttttttttttttttttttttttttggtttgatttgatttttttttttttttttttttttttttttttttttttttttttttatattgaatagataggatttttgtttttttygtttaaataggttggatyggtttaagtttttagttagattaggggtgggggtggygagtgtgygygygyggaggagggygyggggggtygggaatgggygygttgtgggggttygygttayggygggyggyggtygggggtagggyggygtggggyggyggttatygygtttttttygtyggyggtttygygtygtggygatggtatagttygagayggttttyggttataaatagygttaggygtatggtttttygggaggygttgagatttygggttyggyggtygyggggagygggtgttygtgaggagtygggtagtyggttttttttttttgttttttgggggttttttttgtaatagtagtaggtgtaattttttgtattttaaaaatagtgatttttattttygtgtgggtatgtaggggggttttatttattaagttatgttttattagggygttaggygggygaagtaaaggtagggatggygggyggggyggyggyggaggtggaatgggygttttttttttttatttggttttatttatttatttagattagaaaagygagtyggtttggagggagttygttyggggattygagygygtatttattagtgtygagagaaaaaaagttatataaatatatattatgtggataaatttatagataagagttttttygygygygttttttttttgtttttttgtgtgtgtttttttttgttttttttttttttttgtatttttaatttgttagagtagttttatatttttttttygttyggtatttatygttatttaagttatttgttaggatggggttgggagttgtygggtygygtyggggggtagagggayggggagtagagattyggggttygattttygttttaattygttttygaaggyggaaggtgggggttttygtttygggyggtttttttygtttyggagagygyggttggtttttyggtggttggygggaggaaggtaggagtygggygtttttgttygttygttygtyggagggggaggaaggygttgggygyggtggtyggtgagttagygygggggatggtttgatttgttttygtttgttttaygggtttaaatagaatatatttttttaattattattaaaagaataaagtttttgaatygttatttgggttgtygtyggatygagattygygyggygtgygttgttttygygggtttygttttyggtatttatagttttygaggtgygaggttgagtygtttttgtygtggggatygggggtygagtygttyggttyggatttygtyggatttttygttaggtttattggggttggtatttyggttgygygggaaagggagtggtaggygyggagtygggagtagggttygagyggtttygtttgtaggggtgaatattggtggtgaatttggttggggtagtagatttttaygttaatgatatttatttgtatttygtttttttttatgtttgtttttttagggtagttttttygttttagaagtttggtaaattgaaataaygygttygttttttygygggttgyggggttggggagttggggyggyggggttgagyggttggtttaattttygtyggttttyggttagttattttyg

SEQ ID NO: 5957 - DNA, 1133 bp, Artificial Sequence
  Description of Artificial Sequence: Synthetic polynucleotide
aygaygyggtgygttaggtagagagtttggggagtgtgygtgttttatttgtgtttgtatygtgtgttttttttgtgtgtttttgagaatgygtttttggtaygygttttgygttaataaggygtttggtgtgtgtatgtttgtgtgatagtgtttgggttttgtttgyggttgtttgttygtattttagttttttttgtgttygtagttaggttttataygtgygttagttttygagygtaygttttygagtgattygtgygyggtgtgtagggattttagggtygtgtgtattaagggygttygtgttygtttttttgtattaaggaaygtatttttatatgtttgagtgtaygtttttttttatgtgtgtaygtttygtgtttaygtygtttatgtttgtgtaggggygttttaygygygtttttttyggttygygggyggttagggattygygttgggttttaygtttttygtggggttgatttttttttygygtttygtagygggtygtagygattggtygtyggtttttttttagtygttattttttttttttttygttattygygygttygyggttttygttgtttttygyggtttyggygaggtygygtygygttgygtttygtttttattggttgygygygtttttgtgtggyggtagttgyggttttagygtttttgaatgtygagaggggtygggaagggagtttttttatgggttatttgttttttygttagtygtygttttatygtygttygygtttygygtttygtttttygtttyggyggttttygtagtttygtygtygttygygttygygttttggagtygygttataaagggttygygygtagtygtygtygtygtygtygtgygaggagttaggatggttttggtttaygtyggttatttygtgtttttagtgtttggttttgtgygaaatagaggtatygtttttttttttyggggtttgtttyggagygtggatygtygtaggtatyggggygggggygggygtygygggyggtygggggtttagggtatattygygaggaygtagggygagyggtggtttttttttattttattttagggggattttygagggtgggggyggtygttttyg

SEQ ID NO: 5958 - DNA, 2401 bp, Artificial Sequence
  Description of Artificial Sequence: Synthetic polynucleotide
tygaaggtgtygttagttttagtgtyggtgggygtttgtattaggaatagttaaagtygaygatatttagttatttygagygttagggaagaygtttygygtaaaatygyggttttaggyggattttygttttagtttygygttgttggtggtattttyggggatttaaagtgggtggtttgggggtaaaggaatagaggtygaagaatttggggtatgttttattagagtatttaagggayggagtgggaggttatattagatatgygatttygatatattttaaaagtggtagtttygtgggttatttttaatagtgggatggatttttttaatttttttygtttttygaagtttttttgttatttygggttatgtttttttttygggatttttttgtgtaaaattatttttttttttgtttaaaggattttttttttttttttgattttaygaatttatttttttaataggtttttaaagtatgggyggatgtgttttttttygtttatygttaggagtygagtttyggtaggtgagyggtgtaaaataygtatttagttgtttttagtttttttygttttygttgagttggttgtttttatttygtattayggtattygagtttgtgagttttygatttyggttttagtygtagtygttaataattttataataaataagaggataggattgagygttygygtttyggagygtattggttgggggtaattttttattttyggygygtygttygttgtttygattygagagtatygggagagtygagggaagggaaggyggygaggggaaggtaggyggggatggagggaggtayggygyggygyggagygaggaggtgggttgtaggggaygtygagaagyggtggggttggygtagagggygggygttyggggygygygttattttygttttgttttygtagtggtagtatayggtttataggtatttgagygttygttagagtaagatgatgaagaggttttygaagaaagttattatggaggaggttaggaaagtttattatatgygttggtttyggttgtygtayggtatttttatggttatygggatgatgagygtatttattttgggttygtggattgaggaygaggaggaagaggaggaggaagaagaagaagaggaagaggaggaggaggaggaggaggaygygtttaggttgagatggttygygtggatattgttatttattttaagattgttgttttygtygtygtygtygtygtygttgttgtygtygtygtygtygttattatttgttatagttagtaaygggtagtyggygtaggggttygggggagtttttttygtygttagygttattttaaatatttattaatagttatattgttgttattgttgtygtygtygtygtygtygtggagygygggaggggggyggggaggygtttgggttyggggygttgtgygygatttggyggggtgygtygagatatatatagygagtygtygtygttygttygggggggagggggatggagtgygygggtagtttttttttttyggttygygtttygttygtttygggttgygttggtttygagygtygagagttagggggygtygygggtygttygygttyggggtttgygtygttttygggttygtttyggtttygygygyggtttygggtgttttyggygtygygtygttygtygtgygttaygggtgtgygttgygttyggtyggtgattttttttttygagygtttttygygyggttaaygagtygtttttygtttattaggtggtaattygttaataatggataatyggtttttttygttygggygtttttgygttagtttttttttttyggttgygttyggtttyggttygtygygttagtgygygttyggtygyggtaggtttatygygttyggtygtyggttygtggtygtttgttagtttatgttttygggattttttagttttgtygttaygtygttgagtttttyggttttygttygttttttttttttgtygttttygattttttttygttttygttttygtygtttaagttttttyggygygygtttygygtttttygtagtygttagtagtagtagttgtagtaattggagygggygyggatttaggaygatttaggygggaggggaggaggttygtygygttggttygtttgggtttygggttgggtaggggtgggtagggtttttyggtagyggttyggtaagygtttttgatttttagggygtaaggtagagygtttttagtttaggygyggggttaggygtttttttttaaggtgttgygtttttagtygagagyggtggggtatattgggaggayggyggggygtttyggttaggtyg

SEQ ID NO: 5959 - DNA, 769 bp, Artificial Sequence
  Description of Artificial Sequence: Synthetic polynucleotide
tygggaaygaaygtgygtggggtagtttaaatttttgagtttagatttygtttttygyggttagatggtgyggtyggtggggttygagggatgygtatagttgtgtttgagaggtgttgttttttygttatygaagtygttgggaaattttgttgtattgagatattttaatgtyggatgttttaattttgygggtaaaaaaaaaaaaaaagtttgaattaggtattgggtttttgttayggtgaattttattygygtttygygtygtttttttatttatttaggygaggtggtttggatttgtatttygttgaagaagttttttatgygatattttygttagtatttygygyggatttggttgggyggyggyggggagttagtttgttatygtayggyggtygggatygtagtttttgggtgygtagtgygtttttygttgygtttttttagagygygggtttygtgtttgtgttyggygygaygygatttttttgttagtygggtttygygtgtttttygygtttttygtagttttygygtagttygtagygttttttagtttygtttygyggtygygggaattyggygtttgtagtttygttyggaatygatygttaggygttgttgtygtyggttaygtaaygyggggtttttgtttggtattagttttaggtgttttgtttygggtygtgttgtygygygatattggggatttaataggtygtyggttatttagttggtttygtagtttttttgyggtttagyg

SEQ ID NO: 5960 - DNA, 1169 bp, Artificial Sequence
  Description of Artificial Sequence: Synthetic polynucleotide
tygtgtttttttygagtggatttggtttyggttttaaatttagtygagggtyggttygtttttggggattygyggatgtygygagggggygtygygttattgaaggttgggaygggggyggtgygyggggyggygtyggagttygggatgtyggttttagagaygtygygtttygtttygaggaggtygtyggtygggtaagyggagttyggagttygyggagtttggatygtaggtaaagttgagygygtygtggggtygggggtggggggttygyggygaaggagtyggggtygtagtgggyggtggggyggggggygygggtttttgtttgatggtttygygygtagtttttttttygggtgygyggtgygygygggygygggagggtygaaggggattttggaatttttttgttygggttaagggggygggggyggttyggggtygggyggggttggtgtttttttttttygtttagygtttagagttygggagtygaggggggygtygggtyggaggygttygtyggtttggtygygtygygygygtggatggaggtttyggtygyggatygtttygtttattygygttggttttgygggagttygggtgagtygaaggygaggaaggggygygggtttygggaaaattygattttttyggygttygtttyggttyggttgggggygtattyggttygygyggagagygggyggggtgtgggygaatgttyggygygttgygtttttttyggtttttttttttttyggagatgaaygttttattttygttyggatatayggtygtatttttattttgtttttttygattagtyggggygyggttygaattgggggagagaagatttagttttygtagtygygaattttgtaaattyggagtttatgygtttygtttttyggttyggggagtttttagttttgttygtygagygtagttygggttyggattgtggttattggggaygagaagggttttttttgyggggttttygggttyggatggayggagggggygttyggtaggtgaattgggttygtttygygtttygaaygtttttttaaatttataagtttyggagattttggggtattttgygatttyggagtgatyggtggagttttygttygygygtttggttttyg

SEQ ID NO: 5961 - DNA, 6036 bp, Artificial Sequence
  Description of Artificial Sequence: Synthetic polynucleotide
tygtatagtttgattatygtgagtaaygygtgyggtaygttttggaatttgtyggttygtagygttygtgattaggagttgttgtgggatttgggygtygtgggtatgttgygtaatttggtgtattttaagtataagatgatygttatgggtagygtygtygttttgygtaatttgttggtttatyggttygttaagtattaggyggtygttatygtygtgtttttaggtagttgygtgtttagtttgtaygtgygtaagtagygggygttggaggtygagttggaygtayggtatttygygtaggygttggagtatttggagaagtagggttygtyggtagtygaggtygttattaagaagtygttgtygtttttgygatatttggayggtttggtttaagattatgttttygattygggttgttttgaygaygaygatgtatygttatttttggttgyggtygyggttatyggggagttagttagttttgtygygttgtttttttttttgggtagtttttttttgtaggggtaggygttggttygtatttygtttattygtygaggyggtaaggaggtagagaaggatattagtggggaggtagtygtggyggttaaggttaaggttaagttggygtttgtagtggygygtatygattagttggtggaggatattttygttttgtatatttygttygaygatagttttagttttagttttggagattygggataggaggygttaygggagggtygygtttagttttgttygttatgtygyggttyggagggygggyggygagaggtaggaagtygggygtattygttgttgyggtttaaggyggtttaygttagtttttttaaygatagttttaatagyggtagtgttagygaygggtattgtttaygygaatatatgttgttttgttygttggtygtattggtttygygtygygaggattttaggtgtgggtagtttyggtttagtyggtttgattttgatttgttyggttgttaggtygagttttyggttygygaggttattttygtygaygttygygtgygtattattaagttgtygtttatttattagtaygtgttattgtttgagggtgttttaagggygggtgtagagtttttygyggggtttggaatttttttaggggttyggaagtaggtttggttgtyggtagattatttgagtaaggttttygagaagttggyggttgtttygttgtttgtggttagtaaggtattgtagaaattggyggygtaagaggggttattttygttgtttygatgtagtttttttttttygttgttttyggtyggtygtttaggttttagygagggtggtgatttggatgatagtgatttttttttggaggggttggaggaggtyggttttagygaggttgagttggatagtaygtggygggygttyggggttatttygttgttygtagttatttyggtttttyggygtaatygaggtyggggtttgggggtggaagaygttaygtygtttagttygtyggagaattaygtgtaggagatatygtttgtgttgagtygttgtagttttgtgagttygttgggtagtttygagagttygtttatygttagttttatttttagtgaattttgtagygggtagggtagyggtattattagttttagygagttgttygatagtttyggatagattatgttttttagtyggagtaagaygttatygttggygttygygttatagggttttttygaggttatttagtttagtttgtagtgggagagttaygtgaagygttttttggatatygtygattgtygggagygttgtyggttgttatttgagttggaygtaggtagygtgygttttatygtggagaagttagaygagaatttttygtgygtttttagttttagygygttggttttgtaygagtattaygtgtagtaggaygtggagttgyggttgttgttttyggtttgtttygagygyggygggggygtygggggygtyggtttttattttgtagggtatyggyggygggaggaggggtyggygtttaygggttttygttttygyggygtygyggattaggagttggaattgttgygggagtgtttgggagtygtygtgtttgttyggttgygtaaggtggttttygygttggtgttaggtygtygygtatttttygtgttygtttatatgttggtgttygtttyggtttyggtttaggaggaygatttttgtattgatttygyggagggtaygtyggttaatttttttagygtygtttygtttagygaygagaygttgtagggattttttagggattagttygggggattagygggtaggtaaagatttatyggtygttttatttttgttagataggttatggggtatyggtataaggygggaggygtyggtygtagygyggagtagtttyggggygygggtaagaatagagtagggttggagttgtttttgggtyggttttygagygttttygtagataaggayggtttaaagttyggtyggattygyggggayggggygttttagtygttgtgttttaygaygtttattgaggaggtygtgtattgtttttayggtaaygattyggaygaggagttttyggyggtygygtttaygttaatttatyggygtatatyggttatttttygygtttttaygygggagygttygtagggtyggaaggaggtttttgtttygtttaaggttgtattagttgtttygtygttygttyggatttagtttagttttattgttgaygagatttygttttgttattttttgagttttttygttagtttttttagygagttygagttttyggagtygtyggtygtttatttaygaggtygggagttygyggttattaaggattygggtttaggaggyggaygygatagttygtttagttygygggtygyggaggagtttttgtagyggtgtattagttyggttttgtttaggygtyggtttttygtgtttggtttgyggygtygtaagtttygagttattyggttggatgagyggttygtagaggggtttygggaaygyggygaggaggtagygggttyggatygggttttygatttggatagygtggagtggygygttatttaggagggygttaatttaattgttaygtggttgtattaggtagtagttgttaygygggaggtttygttygagttygattttattttgtttttygtattygggttgttagtgggatttattttatagttttttaagtataggaagggaygataggyggagggagaaatgggtagtgttyggyggttagagaaaaggggygtagttttagttaagattagygggagttttygtttttttgtaggtttygagaagttaygtggtatatagaagattaygttyggggtgttagttgtgtttyggggaygaatagtgatttaygtttttagttyggtatttygtgtttagtttaaagggattttyggttttygygttatatygyggaaggtggygtttttttgtttggtatagttygyggttttagttaaagtttygagtttygggtagtagyggtygyggagtttatatyggtttgttaagatttyggagttggygaygttgagttagttttttagaagygttatatygttygttygtttygttaagatttttttttttagttttttttagatttygttygttttttagtttttgtttagaaagygtttttyggttatttaggttgttggggttttgttyggtttyggagttttttyggtgtttaaaaygtyggygygtatttttttggygaagtagtataagaygtagagatygttygtgyggatttygtttatgtagaggtyggttyggygtgggtygttatygttggttygggtagtttyggagtygggttttaggggtygggyggggatygaggygggttygggggygygygggggtygtttgggtttggtgygtgtggttttagttttttttagyggtagygagtttttygatygttygggttttyggygatagttaatttttattaaggagtygtygggtttgyggygtygtygtttygagttgttttyggtygagttygyggtttttgttttttagggygtttygtttygtygyggtyggttygygttgttygtygtttttttttgtttttygygttgygaagagtttygagyggtatttyggtagggttyggtttyggttyggtagyggtttttygyggttygatttagttttggygagygttttgttyggtgtattattttygagagttygtttygtttgtttgtgygygygttygtygttyggtyggagattgttaagygttaygygtygttgtygtatattagygtggttygtaggttygayggygtygttttygyggtttttgttttagtygaygtygygygtygtagtagygayggggagtttyggtygttttttagggtggtygygtygggtaygatttggyggygtattygagatgaggaygtgttttatattttgygtagtaygtttttygttayggttttgttattgyggggttttaygttygaggaygtttyggtygggttttygtygygtaagattagygaygtygtggtttagatygaggaggtygtygtttttaagattaattttagtaygttttygagtttggagattagggagtttttyggggttttygtyggyggttagtttttttttttyggtagygaygtggayggttttagtttygttaaggtttttattttygtatttttygtgtaygagggtttgggggtygtygtggggggttttttygttagtyggtayggtttttttagtygttyggttygagtatttttttttaattatgtgtttagttttatggtggtygtagttattatygattyggtygyggagaaagtttyggttattgttttygttatttttttggaatagtggtttaggtyggttttttggaaygttttttttyggttttgyggygyggtttggttgttttatgggtttgygttgtagaygttttttataggtygttttagggtttttgtttattygagttttattatttttagaattttygtttagygtayggygatttygygttttatyggaagattttgtttttgtgtygyggaggtttaggaggaaayggggyggtygttaggttttaagtttygatygtggagygttggtaagggygttttggtttagttttgagygygyggttttttttttgtyggaagtygttgtttgatttygggygagggaggyggtagttttygggttygggtttgggtttgggttygttgtttygtagggatagygttggggaggtgayggygttygtygtaggtggggygaggttgggggagggyggygtygyggygggtttgttagttgggggtttttgyggygygtaggggygaagtttgtaattattgtagtygtyggtaattygttaatgagggttttgtagggattgtttttatttttagttttagttgtgggagtgygggtgggggtgtggtygagtttyggtaggaagtttygtttagayggtgtttagggaattyggagtttaagygtttyggyggagtttaaaagggtgggggtgggaggggtagaggttaayggatttttttgtttgtygtattttttggygggagaygggaaggtagygggttgygtaygatgggattttggtgtagaygtygggtyggttgatatttggattttattttagaggagatgttggttattagttggggygattttaagggtygttggagttagtatyggttyggygtagtygyggygggygaggttaatggaaaggagattgaggggagtttyggtagtgagttygaggttttgggatttggagttygygttggtttttttttagyggagtttgtaygttayggagattattatatgtgggygtggttagtgtttaggatygtatyg

SEQ ID NO: 5962 - DNA, 3400 bp, Artificial Sequence
  Description of Artificial Sequence: Synthetic polynucleotide
gygtagaattagtggygatgggaggaaggggatyggtagagyggggttgggtaagtttttatttagtygggttgagttttggttttygtagagtttttgtttttttygagatattygttatttggtgttagyggtggatygttttgygggggtttggygyggtttygggttggttttgattttgtagtttygyggagagggtaggttygygtggagagggayggggagtygggtygattgttttygggtttttagtttttgagttagtygygtgtttatttatygtagattttyggttgagtatygttyggttgtaggtattgttgttyggygaygattatygttgttttatayggatgatttyggttttgtttttgttgtygyggttygagttygygtygttgtttgygtayggttagttggatatygtgtttttttygtygtttaggtgygygtaggtatygggatayggggtaggagygggygggggyggygtggtttygtggtygtttttaatttttttaattgygggttttaggttattygyggaattygaggagtygttatttagygtagatttttttttggagaygtttaygygtttggtgygggygttgygggttttttyggttygggttttygygtygygtttggttttggattyggaygygttggtyggtttttygtagggtttagttaatttgtyggatttygyggygttggagygtttattygayggygaggagtygttgttgttgttgttgaggtttattgyggttattatyggggattttgygtttttgtaygattttaygtyggygtygtgggttayggttttggygygtygygtggttgttgaattgtaagyggyggttgtygagttgygaagtttttygggtttgttttyggttatagtttygttgttggygygtttgttygygttttgtttaggtggtttyggyggtttyggygattttttgygagygttgttgtttttgaaggygttgtagggtttgygygtggagtggygygggygggattygygygggtygggtygggtatagygtagygygggggttatygtygtygaygggtygtgygygttgygygagtttagygtagattttygygtygagygtttygtatttattttygagatttattaggttaataattgttagggygtgtgyggttggttttagttygatygtaattygygttayggtaattaygtggtgttgttgttgaagatgtaggttygtggggtygttttggygygtttattttgttgygtgtttatygtttaygygggtaagttgtttattagtttgtyggaggagygtattagygygtattaygtgtttaatatggtggttatygagtgtggttgtyggtgatttttgygtygygyggatttttgtttygagggttyggaygygttttagttygygtttttttttatatttattyggattttaagtatygttttaataaagattagtaagtaatyggttggggtgttygtgygtgttagggggttygtgggattttttttgtygttttttttygygtayggttygggttygttttgtagygttygttgttttttttttgtttgaagygttttattatygttttttaggtttyggatttggtgtygggtttaggygtaaaggagtaggtgattttgyggtygtagtattygttttatttygttagagtygyggggygtttagaaggggtttttggatttyggygyggggtyggtttagtttygttttttgtttgygyggagtttttggygatttttaggtygttgtttttygtygggaygtttyggggatatttaggtttgtttttttttgggttyggygtttttggagtttygtgtttayggtyggtggtttttttygygtgatttttagygttggggtagggtttttyggggttttttggyggttygtggtttttttttttttygyggttttttttttttaggtttttttttttttygyggttttttttttygyggtttttttttttttygaggtttttttttgggttttyggtttgygagggttatayggttttttyggayggttttttyggtggtttygtygggttttttttygtygttttttgtagtttttygattttygggaattttgggtttgatttttgtttyggttyggggygtaggyggygttgatggaggygtttgggtttygaatttaggttgtaagatagagtggggttttggggtaagygtttatttttttttyggttygggttttttttttttttggggatgaaggttttaatgttygyggttagtggaaggaagtttttattaggggygaygatggttttttyggggttgagtttggygggatttagggttygggtataygtgtttggagtgttgtttttttagggayggygtttgtagygatagggtygggattygagttagttgggtygaggtayggtttatattgtttattttttttttatttttagagtttttttttttggatagttggagtggggttttttyggtayggttgagattaaggatgttttygagtygtgggaagggatttygggatttygttgtygyggygtttttttttygaatttygtttttttaattggttattttttttttygattaygggttgtaggaggtttttagtaagggaggggtygtaggagtgttttyggggggygtttaygagttgagyggtttttagagagggygtaggggaaaggyggtagaaygttaygaggtaggaggggttgtataaggtttattyggaagttagaatttattygyggygaggggaatgggtttygtaaaaggtttatatygggtgagaggggygygtaaggttygttatttaaggggagatgtataaattaattttgggggygtgtaagatttagttttggagaggaggtttttagattttattttggyggtatagygtttttttttggaggaataggygtataggtggattttagtttygttttatttttggggagtttgygtttatygyggtatagttggaaagtygagtttagtagygttattagygaggygagtattaggtatttgttgagygataggtttttttagggtagtttttygtttagggtygggggyggyggyggyggttgtaggggyggygyggtttgygtttttttgygygyggggaygtttygagggtttgygggggtaagtgygygttgygttgtggttattggttttgtgtygttttttttttygggygtaggggataagagataggtttgtgttttgaattyggttttttttgtttgtttgtgyggtttygggygtaggtgaatttagtttygggtgtttygtagttgtayg

SEQ ID NO: 5963 - DNA, 1143 bp, Artificial Sequence
  Description of Artificial Sequence: Synthetic polynucleotide
tygatygttagtggttgggaagtgggyggtgttggggggtgagtttyggtttttttaagatgygttttttatgaaattttttagttttaygtgtatttataygtatayggatgtatgtataygtatagaaatatatagggttyggatatagttgygygtagataagtaaaggattaygtttaygtggaaataggtgtgygtataygttttygygtattygygygtataagygttttatatttgggaaygtgygtatttgtttttygttttyggtatatatatagtygttttatattggaatatttgggygttagygtygggttattygggtaygtagggygttaygtagggtygygtataygtttttyggttataygygtatagttttttaygtggaygygygggtatataygttyggggttygtagtygygtatattygtatttaggaaattttagttattattaygyggggttygatygtttttgagtatttttygttttagtygygtattygttgygygttygggaygygtatattygygtatatatyggttttttttgygtaygtttygggtttattttygtttagagttttyggggtttttttttatttyggtttyggggtttttttaygttttttygtygaygtgtttatttgtttagggggygttttygagtygygtttygygttygtttttaggagggttttygygagtyggttgtatatttygaggyggtttyggttgtataatttggagygagttgtttygtttttttattttgggggygaagaagggtyggggagtgggggaaagygggaggygtygyggtttgggaggttttygygggttttagygtyggtygtattgyggtttttttygygygtygtygtygtygtyggttttttttygtttygttttygyggttttyggygtttttygygygtttygggyggggtttyggggygtaygygggttttaygtttggttttgatttggttttgtygggygtgtattttttatttattttgggaagyggggtttttggagygtggaaygggygtygttagtgygygyggyggggatygggggtgagggagagtgagttgttygttyggggagataagtaaggygttaagttyg

SEQ ID NO: 5964 - DNA, 220 bp, Artificial Sequence
  Description of Artificial Sequence: Synthetic polynucleotide
aygtgtyggtgaygtttygtggagttggygagtttygtttgtttygygattgagtttgyggtygtttygattttttagtagattttggygtggggtatttgagattttygttattgaaaaggygttatagaaatgtaaggaattatgattttaataaaattgttttatttaggagygagtttttgygttgtttttgtygtyggagttygggtttgttayg

SEQ ID NO: 5965 - DNA, 1860 bp, Artificial Sequence
  Description of Artificial Sequence: Synthetic polynucleotide
tygygatgttagttayggttygyggyggttayggagttattttagtatttygygatggatagtgattttyggygtggygygagttttttgyggtttttaygygggtttgggyggygggtttttttayggtttygtttagatattyggaggtatttgttaaagttgyggaggtggaygatygggygtttaagtaygaattttttygtygaggtayggttgtygggtttygttttgagggtttggggyggygaggatygtyggggaggagggygygygagtyggaggttagagtygggtygggtagggygygtttaggagtaggggagayggygattygggtygaggygggayggggataygttatttgttygtggagygyggggaaggggtgygyggyggyggyggyggyggagtttggygtagagggtagyggtagtagygggagtatyggttygttyggggtyggttagtyggggagatyggggagtagyggggtygygggyggyggggtygaggygagtagtatygggggaattaygattttygygttgagtyggagtagttyggtygagttyggtattatttagatttagggyggyggyggyggyggttttgygtttatyggttagaggagaggttgtygtygtyggggttgttgttgttgtagttgtygtygtygtygttggaatttggygttygtttgtattttatattttygygttgayggyggyggygggggyggygggygttygagatgttgggtyggyggyggygyggtttyggagygaatttatttggtttygyggygyggtygttygtttygtttttgtttygygygggaagtttttttttttttygttygygtygtygtygttttyggattyggttttygtttyggttttygttygttygygttttttttygtyggatttygtttygttttygygtttttyggttttggtyggggtttttttttygttgygtttttggattygggyggtygyggaggaygtgggtgggagagggtygagggygygttyggttgggttttygtygatgtyggttttttggtggtttttggttttttgggatttagygtatygygagggaggtttygggtttygtatttaagggtaagyggaagtygaggtggyggygtyggagttaggtatgtttygttgtttagygyggggttgagggygtagayggggatygygygagtygttttttatttggttttttyggagtttagggygyggagggtattgggttgyggattyggygtaggyggtttyggaygttgttaggygygggyggatttttgttgtataaatgggttaaataggttygtaaggttttygygggttttttggttyggaagttgagtygygggtgtttggtttgaagtttygygttttatagtggttygygggtttyggyggtttttgttttaygttttttaaggtattaggtaggtggttttagggtttttgtttaygatattttttgggtggggtaggattatttttttgtgaattygttttggatgtttttaggtatagtttgtattttttttttttttagtataygyggtttttgaygttgtaygtygagttttttgggatttaggaygaatygggttttaaggattttygtttygttyggattataygtaggtagygtyggtygagtygagtttgggttygtattggttaygygtagttatygttagayggygttagttttttttygttgtagattttgtttyggaggtygttagttttttttttatttygggtttatagttttagtgtagtttttggygaygygygttgatagttgggtagagattttygtgyg

SEQ ID NO: 5966 - DNA, 441 bp, Artificial Sequence
  Description of Artificial Sequence: Synthetic polynucleotide
gyggggttttaaaygttatttaatyggggatattgggyggggggtygtttaattaggttygtagttggagtagatagggyggttttygggatttggygyggtttttgtttttygttgtygtygaagttttaattttygtttgtttgttttgtgttttttgtaygtagaagtttagtttgtgtggttttgygatttgygggtattgggagatttatagttaagaygttagggttttttggaagtttagaaatggtgagagtgtyggttygatatttygagagagggaayggggttggttggaatyggtgggaagyggttgtggygggatttaggttttttygtagttagttttataatttgygtttagagtttttgtttagttyggttttagttttttttagttataygatggyggtygygttgatagtyggggtttyggyg

SEQ ID NO: 5967 - DNA, 5587 bp, Artificial Sequence
  Description of Artificial Sequence: Synthetic polynucleotide
gyggtgttttygggaggttggtagtyggggaagtaggtaygtgaatttatygggttgttttattttaatttgaggttagagttgaggygtaggggtyggggtaggggtagaggtgtygaaaygtattagttggggattttygggggaaggagataggagagatttaaggygagttttaggattygtttttatgattatgattaygygttgygttygaattatatgtttatttygtatttgttttyggggattagatygygtttttttagatggttggggagggagtagatttygggtgaaggttgggggaggtatygggatgtygagtaygttagagtaggygggggatgggtttyggttttttgtygtttyggtatttygttttgtatygggtaaagaaggggttaygatyggygaagagygygtggagatatagggattygygatttaggggtaggaatttygttttttttyggaaatttttygggttttgagtygtgttyggygttttttattttattttattttygtygtttttgtygttatttayggtygttgygggttggttagygtgtgygtttttygygtygtaggtatttgttygttgggygttgtgygtttatttttttttygygtattgtagattttyggygttgtygtygttatttagygtagttttyggttgggtatagygtttygtttttttygyggtttygggygtttatttattygttatggtttaggtttgggttaaatagyggggtagttggttgtttaaattggggtaaggagttgagggttgggagttgtagagaggatygagggatatayggggagtagggatgagyggtygtttygagtygtgtagattgggaagaagttagggagagtttgggtgggaggatttttaatttaagygggtgyggggyggggttgtattttaattagaaagayggtggttttttygagygattttygaggagagagggggagygttttggggygggggyggggygggttgtggtaggagaggggagggygggggygatgtagyggtggaggyggtttggygtttagttattgatygttttttttttttttttttttttttttttttttygttttttttyggtttygggttygttaygtyggattygtttttttygygttgygttgggtyggaygttaggtttgygygtygyggttgagygtttattygttttgyggaaagagtygyggaggaatyggygggggyggttgygggagtygaaggaggtggtaatygggagtagaattagaaggagatagggaggtagaagttygyggtttygtggtaygtattttttyggttagggatgggtttyggygyggtttagtttttgttyggttygtygggtagagattgaatygyggatttttatygttttgtggaygatyggatagagagaggtattgatygatygttagtagtttttyggtgggatygygttttttgtatatttygygtagygtttttygtyggagtygtatygggtaagtyggygagggagyggggttgattggyggtygtyggyggttaggggagggggygtygygyggggttatggtaggttyggaggygttttagttygagtyggagtygattygagtttaygyggtygtygttttttygttttygggttttygtygttatygygtttttygygggagatggaatagyggaatyggttyggtgttttyggatatttgtygtttttgttgttgtatgttttgttgtttttygtggtygayggtgagygygggaattttgttgtygttgtggattygggggggtttttgttggggtygttatygagaagaagaagaaagagaaygaatygggaagtttygyggtttttagtaatttygttgtgtagtttgggttyggaggggtagggagaggygagyggygaagggtygtygtagtagtagygtygygttygagtygtttttagtttygtyggggtttyggttgyggaaaggatgtttgyggggagygggagtaggygygttttagttaggttttggyggtgyggttaggggygggggagaagtaygagtygtttttgtygtttygttttattyggagggaagtagtaggtagtygatggtyggtttttgtttyggttttgtagtygttttttygaattttgttagttttttyggtygtgygttagggagtagttgyggggtggggggtataaggttagttagttagagatygattgtttygttttaggttgttttaggttttygatttatagttggttaygtttttttttttttttttatttttagttgtatttatagaagtttttaaagatgtgatagtaygggagggagaygatatygaaatgttttgygygtttygggttagyggagttatttygtattygttggagatttagtggtggtattttaaggagttatttygggagttgttgtaygagttggygtttagygtgtygggygttyggagtaaggtaattygtygtttaygyggtatyggygygygttyggttygygttyggggyggygaaggttaatttagggagggaagtagygggttttattygygtagggygtygttttgtggygtagtttattttttattttygtattttaaagtatttttaaagttagtagtggttatttttaaatttgttaattattttgatagtatygttgtttttattattttttagaattttatttaygtttagtttttaaagagttatattttagtttggtygtttgttygtgttygttggttgyggttttttgatgggtgttgggtagtgaaggaagtttttttggttttattaggtttttttygttttttgttattttgaggattttagggtttttayggttgygttttagaggttattagaaaatygagtatyggaaagtyggtaggatttttagtttttaggggtatagaggggttatttttttgtggtygaaaataggtttaygttgtttgtttgttttaaaatttatatttttttatatattttagtgtgttygygtgtatatatatttatatatatatttatatttatatatatttatatttttttagggttttatttagagttatttttattgagtttttygttgggtgttgtttagatatagyggttttttttttagttttttayggtttttagtgagttgggggaggattttgagttaygyggtagggtttaaggatgtttagagggaaggagaggggtttttttttttattttggtgtttatttagtttttttagtttagtyggtaggtgtgtattagggtagttattygttggttaggtattatgttagttttaaagttygtttttttttgggaaatttttggaaagtyggaygttttttgtgtttttaatttttatttttygggyggtttyggttttagtttgtyggaggagggtgtttttgtttaaaggyggattygagtttttttagttagaaggtygygagttttaygtttttttttttttttttgtattttaggtaataaataaggatgtaattaaaattagygtaagtgtggagtttagygygggtygygggagattttttttggtygtttygggtttygtagtttttttttttagtaagtygyggyggtygygtatgtggggtygygtaagtagggtagygatygtagttttgtatyggtggttgttyggygtgttygggygttatttgtygtyggttgtagggtygggtttttttttgtgtaaattaagggtttaaggtttgagttttttaattyggttyggygttgatttgtaaaattttttttggtyggattgygygtttagggtttttygygtttgttagttttygttttgygggtattttttttagtatygggagygygyggttgttygttttygtygygatygtggygttagtttttygttttttttgtttygttttgagtatttgttttgygtttttygttgtaattttttatttttygtttggattgygggtttgggtgyggggtgttgtaggtttgtaggggayggggtagggggtggttgtgttaggttgygaggggttygggttatggggttgttaattttgggaggagatgygtttaagttttttatttggagygtagaaaggtttggagatgaygaagttttttygtgggttyggtttagaggtgagggttttttgggtgtttgttgagagtygtagagtagtatttttygaagtttttatyggggygtaggggaggagtatttygttggggggtttttggagatttygyggaaaggygggttggtagtaggtggttagggagttaggtagtagttttagygttgtttgtttttttaagaaagtatagtgttagttgtaaagggyggggttyggtgatagggtggttttttttaggaagygattygggtaggtttttygtgtttygggaggtgaggagggtyggttggggygggattgtyggttggagygygtyggggygggaaagaygtggggaagttaaggaataaggaatttagtttggggttttttgaaggtgtaggagggaggaaggagaggtggattttgtttttttgaagygttagttaygggaagataagtagtgttggtttgtatgggyggggtagatgtaaggtgggygtttggttaaygtgatggggaygtggggatatagtttaaagagttggttgtttggygtttaygtagagttggaagttttatgttattgggtagaygygggtgaaagggaagtyggatygtgatggtgggtaaattaggattygggaagtgttggggtgygyggatgagggggygygayggttagggtggttagaagagtaggtttgggagttgtttagttyggtttttaattttgtttttttgtagatygtaygygtttagggtaatgatattttatatyggtttyggttgtttgtygtgyggttgtaggaygagggygtgtaygagtgtygygtgtyggattatagygaygaygataygtaggagtataaggtttaggygatgttgygygtgttttygygtttygygtygtttaatatgtaggtygtygaggtygtgttttatatttagagtagyggttygygtygttayggtttagttagygtygttaaygttaataaygygggygtygygagtygtattattttygagttyggtygyggygataagagttygtygttygggagttttttygtygttatygatttygtagttttygaggtygyggtagtttyggyggtttataygtttattattatagtygyggtagttgttgttgtttygttagygtygtygttatygggataggyggttttgttgygttagaggtayggttygggtaagggatygyggagagggggygtaygygyggggatggygtagggttagggttgygtygggaygtttyggggggtttyggatttaggattygttttttgggygtatttgtatatgtatatttttttttagttaggtygggagygttttttttagggtttttttttygyg

SEQ ID NO: 5968 - DNA, 3643 bp, Artificial Sequence
  Description of Artificial Sequence: Synthetic polynucleotide
ayggggygattttgaaaagaggttgatgaaaatygagttygttttgtttyggttgggttgggaatagttygtagggttttgtygagtgggygagtgaggygygygagtagggygttygtttttttttagtttyggaaaatgattaagttaatygtgtgggtatgttttattatttattgaatataattttttataaygtttygtttaygtgttygagtttgtttttgaygttygygttttaatgtttaaggtaaggaaaataaaggtgggggggggattgyggggygyggygyggtgyggggggygyggygygggggggyggyggygggtgggggggtagtttyggygttygggaggtggtaaagtgagtttggatttttggygyggttttttygttttttttttttttttatttyggygaggtttgtygttyggttttttttygttttatygygattaaaaaatayggtttaattaaatattygtggttgtgaygttggygagagaagttgttagygggtggggggtggggggaaagaagaggaaaatygagtyggyggttgyggtygggtatygtatggygttagagaatttyggyggygagygggatttgygtttgggtygtygttttttygttygyggtttygggatygttattttgaaaaggagtttygaggtttggygttyggygygygatygggatttygygtttagtttyggggattyggtyggygttttttattygygagyggttygygagttatttttaggtttygggaaatttttaagagggtttggggggtggggggagtaaaaaggggagggggtaggttggggtygyggaaatttttgtttaagtgattttttttatttttttttttgtttgggaygggggttygttttgygttttttttttggttygygtttattgyggggtttyggttttttygttygtggagagagggtaatttgtaatttttttttttttttaattaaagttagttgatgtttataatgtgttaaatttgygggygtygagagtygttgagatttgttattttgtgattgtatyggttttttgtgtttygggagtttggttaggttgaggtyggagagttggttttagggttgaggtgttagggttygaattygygattttaggaaaggtygtggygtttgtaagygtaggyggygttygtagtatttgttttagtygggtttyggtttgggggtttagtygggggttaaagaggaaataaataaataaataagtaataggttatggagggaaaagagtyggttagttttaggttggagaaatgaggttaattagagygaggaagtgygggygtgggggttttggaaggtagaggagaggtagggtttgygyggygtttgggaagagtgtaatttggggggaygtttttygtttttttagygtagatgtatgattggggtaggaatgatttttgttgataagtttttttttgtttgttttaagatattatttttygaagatgaattgaggaaaatagtygtaggygagattyggggtgtattttaggtaaaaaaaaaaaagttagggttgggggagagtttttttttgatgagtaggaaagtgtttagatttygaygygtttatttgttgtagttttgtaaataatttaaaatatagatatttttatatagayggatgtatgtgaagtggaggaaggtygaaaygyggggaagttagggaaaaagaaagaaaaagggttgggtagagagagatttgtgttgtttattttttattttgyggagtgaatttyggtagggttttttttggggataggtggaaagttaagtttttttttttttatttttgtattgtgagtggtttttattgtgtgtttgttggagaatatgtttatygttttygagttaggtggaggattggaatgttggggggyggggagygttggagttgaggaygtagtggttaggggttgggggtygagaaagagtagggyggggttttagtttygygtgygggtggtagyggyggtygggttttgtttgttagatattgttatgtttaaygggtgtttygtyggagaygtgatttgttagtygttttygtttttattttagtagaaaatayggtagttgygaggtgtttyggtttgyggggttygggtattyggtgygttttgggggttgggtygtgtgygygggtgggagtyggyggtyggyggggtyggggygaggggygagygggaggggyggagtgagygagygygyggtayggtttttyggttttttttgygttttttttyggtagtygtygtygtygtygtygtygttgtgtaatttagtagaaattygataggggtygygtttgttgagygtattyggyggtygggtagttygagygggtygtygggtttggtyggtyggtgtagaggygyggagggggtyggyggaggggatyggyggggatgggygygggaagtaygtttgattagagtaygygtygttttttaattttggtgttttyggygagttgggtagtttygygygttttgattttgaygttttagtttttagttagggtttaggtgaatttggggtggggtgtgygtgygtgygtgtgtatgtgygtgygtgtgtgtgtgtggaaggggtggtgagattgggaaygygttgtttttttttttagtttgatattagtaattggatttttattttaagatyggttttgttttttgttggggttgggagggggggygatttttttttattatttatatttttgtttattgtttattgagtggaaggtaggygatttaaagagaygaaagagaggaaaaaggggtgagagayggagagaggaaaaagaggggggyggttagaagagggaaggagaggygtggggatagggttttygttttygtyggggtygggtttgatggtgaaatagtaaatttaygtayggagggtygttaggaaagtggatattatygttttaattaatttygagatgtttyggyggygggatttggygtagtygtgaygygtttttataaatttgttyggttyggggttgtttygagaattygtatagtagyggygttagatttatttygygttttttagttyggagtttatttgtataattggattttttttttttgtttttttttttttttttgaaatttgtttgaaaatttaagtgaaaatygygaygatttgtatatttaaaagtaagtgttaagtaagtgttttgyggtggtttyggygygtttyggggtgagygygtaaagtygggagygaggtgtygygagttgygygtygtttygggtyggtttygygtgtgggyggttgggyggttgggyggygggaggayggttttygygggtttygggattgttyggttggttgttygtataattttttttttttttttygtttgttgatttttygggttaggtgaagtgtttgggttaygygtgtatttgtggygagattygggaggygattttggggggygygyggtygtagttgggtattttgtttgggtygggggygggtagtyggttttagtggtygtygttgagggtagagttgygagygagyggggtyggttgttggtygygtygygtyg

SEQ ID NO: 5969 - DNA, 808 bp, Artificial Sequence
  Description of Artificial Sequence: Synthetic polynucleotide
tygggggagttgygaggttatttttagtyggygttygggyggattgygagttttygygggttyggtygggggagyggagattggtttttygttygggttggggygtttgtygttygygagtyggaagagygttttatttaygagtaggtagttttggtagagggttaattgaggattattgttgttggttttaggaggagygaagygtttggagatygggygygygggygyggttttgggagygggggaaggtgaggggaaatgggatatgatggtattaataatygttattaaagayggtgggagtaataaaggaatgygttttygagaygtygtttagtttyggggtgttttttggygyggtygyggtgtaggaaygygagtttygtygtygagtttttygtygtttgygttygttggygyggygttyggyggtagtgttatttygaggtygagygttgttttygtyggttygyggttgttagtyggttttgttygygttygggtttygygagyggtygtattttattttayggaggggagataatgagattaattagaggygtygttatygygtyggagatagttgtygtygtatagtaattattygygggttgggtgygygggggtttttygttatttgygygtttgttgtttttattaygyggtatygattygggygygttttyggtttttgttygtagtttatagttatatygygtattttatattttttttgygtttttgttggggagtttattttttttattygtatagtgygttgyggttyggggtgtgggaggtttyg

SEQ ID NO: 5970 - DNA, 3415 bp, Artificial Sequence
  Description of Artificial Sequence: Synthetic polynucleotide
tygaggggatyggttygtttattygttygygttttttggttyggyggatattaggtagtttttyggyggtyggtygttyggaggaygyggaagatgtttyggggaatttaggtgatttygttygttatttatagaaagagttaggtyggggttgttttttattttttttgtagtyggagagttgaggaggtagggatttggygyggtttagygygtttygygagyggttttttaaatgggtgygagagggaagagggtagagygyggyggggygttyggggggygttyggtattygaggygggygtaygtatttaaataggagagyggygttyggagttatttagtgygggtagaagagyggggygaggagyggggtygygttygttggaggygyggggygagtggaggaagaggaggaggagagtagaaggaaggggaagyggttygtatttgttgygygtyggggygtttgttgtttttttttyggtatgatgttttttyggygattgttattgtygtygtygtygtygttgtygggttgaggatagggagggagggggyggygggttygygggggggygaggygggtttgtttttagtttttttttyggagagyggtygttygtaggatgttgttgygtttaggtttttygygtttttttygygtygygtttygtygygaatttygaaygtgyggagggaagaaggagggygggygagggaggttyggggagggaggagtaygggggggaggaggaggtagaggaggaggaggtggaggaggaggaggaggatygygttgtyggyggaatgggaagtttgataaatygttttagaggttagaggaggagggggyggggaggagyggyggttttgttttttttygtttygtttttagaygaggtgygyggggttyggggttggggggyggggagagggygggtagagyggtgggaggaggagygygggagyggttyggatyggtattgtttyggttttygtttttaggtygggggttayggtattyggggggaygygtagtygtygtygyggttyggggttyggyggtttagttttttgttygtggygyggttggagyggyggygtyggtaataggtaagtttaaaggaaaaggagatgatygtgttaatygttygttygygggggygtygygttttygttttyggttttaggttygygtgggattttygtttygttagygaaaggggtgtygttttttygttttygtttygtgygtataygygggggygyggygttagtttygtygagttygtttyggggygttygttattttttatttttatttttatttagygttygtttttagttattttttagttgttttattyggttygtatttttttttattygtygatttyggagtttttagygtggttttygggtyggggttggygtttttyggggaagttagagtttaygggtaggttttttttagggaggaggygggygygggtyggggygggtgggggtagtttttagatttygygttatttagttttttttttaggattygtygtagttattttttttaatttttttttttyggataaatttttttgggttygtttygggggtyggtgtgggagggggtttttttaagtttttttttttgattttgggatgattagggtttttttatttygtttttygttttygggagtygggtygygttttttatttayggygygggtygattttagggygggaygggggygggagaaggaaatygggtttttttgtttatttttygttaggggtttttttygagagtttagggggtygtygygtygtgtttygygttyggtttgtyggggttgttggattagagggattgattattgattggtgatyggggtygttgaggtttygggtyggttyggtygattggtygyggtaagaaggagttggttgggyggygtgggyggyggggygaygygggtttatttaygggyggyggtgagggygygggtgggtyggagtttatgygggygattttygggyggyggyggttgagygggagtyggagttygagyggygygggyggyggygtatygatgygttgygggttygattgygtttttttgggttagtttttaggtygggaatggggyggtygygtyggggtyggtttygggygttgtygggyggyggttgttggagygygggggyggttttygggtttattattttygaggyggttttgygttygggygygtyggttggggttttggygttttygtaggtttygaggtygatagtttyggygagggygggygtttygygttttagtatyggttgtttgagygtttttggagtagtaaattttagatttttttttttttttttttttttttttttttttttttttttatttttttttttttttagtttttttttttttttttttttgttttgtgttttttttattttttttttaygattgtttttgtaagtttgttttaaaagtttatagtatgttttttttttttttagatygggagatagtgattttatttatayggtaagattaaaagttttygttygtttagtttgygggtttgggttgggtttagaygttttttaggatgtagatgygtygtygttggttttttyggttataaagtygtttttagygttttttygygygtaggagygttyggagttgtggggtayggattttaggyggggtagggagttygaggygggttgyggyggggttttygggttggyggattygggggttgaggygtygtgygygttgggtgttygyggtygtagaggttagaatygttatttttttaggtyggggagaygyggtygtggagygtgaaaygttttttgtaagygaggaaayggtgagttggtygatatygtyggyggttttattattttggtggtygygttgagtttttgtygtttggaggygggttgygtygtayggggttagttttygtyggtttttagtttattttygaagtttttatttaggygygttyggtgyggygtgtgtatagygyggggygtygtatayggaagygtgtagttttttttggtygygtttttttttttttttttattttttygttgtttttgtaaatttttgttttttyggtttttttttattgygggtygyggtttgaattygggttttygygtagtyggtygtygtygttgggtygttgtttggttttttttygtttaggygtygagygttgtgygattygttttaatatttgttygtttaattattggygtatttattagtgttaatgggttgtatattgtagygatagttygttaygtataataygggttatgyggagtgtaygtagtaattatattgttatgtygggataygtaaaaaggttttyg

SEQ ID NO: 5971 - DNA, 3415 bp, Artificial Sequence; identical to SEQ ID NO: 5970
  Description of Artificial Sequence: Synthetic polynucleotide

SEQ ID NO: 5972 - DNA, 1592 bp, Artificial Sequence
  Description of Artificial Sequence: Synthetic polynucleotide
gygaagygatttagygygaggattagtttttaattaattygtttttagttttgggygttttttttagtagttagatgggggttttagaggtyggtgygyggttatatggtttygggttaggtagggggtygtggggaygtatttgygttaggygtatagtatttttgggygygggaygggygaagygtygtgggttttaagttgagttgggtyggttttgtagygtyggagagtaaggyggygtagggaagggagatggggygggatgtggggaaagttgtygattgtttggattttttyggttyggatggygttagttgtttttagtttagtttgyggaaattygagttttttttagyggttygayggttygggygtttygtagattttgggtttttttygyggtgttttygtygttygtttttgygttttggttyggtttttaygttttttygaggtttyggygtagygyggtygtygttattttttttatattttagaggtygtagygtygttttttttttygtatttttgttttygtaaaggagttttttygtttygygygaggtygyggygaggagggggygyggttyggygtttgggagtttatattttttygtygygygygtygtygagtagggygtygygtttttyggttygygygtggtygtyggaaygatttyggttyggygtyggtttygtttygtttygygtttaggggtttyggggygggtttygggtttygggyggaygatgyggyggttyggtyggagyggyggygggaagyggaggyggaggtgaygygttagggtyggygggtygggttatgtagygttttagggygggygyggaygaggyggttttatttttggtygggttggttttgygggagttggagttygggtgyggttttttyggtygggggyggygggggtygyggtttgggtttggagaygaggyggygttygygttgggtygtagagggaagggtagyggyggtttygaggtyggggyggayggattgagtygyggggagyggggttttyggygygyggyggtttyggagtttagygygtagtttgygggtagtttaygggttagtttggyggggttygayggyggyggyggtggyggtagygttygatttagyggtattagtttgggttaygattagygttayggtagttygygtttyggtygttyggattygygtttyggtttygggtygttttyggtgggtagygttygttttagygtttttagtttyggttttyggggttyggtyggygtttaygttgattttttttygttyggygtttgtttygygttygttygtttttyggagtttgyggggtyggtttttttttygttgtttgtattttygttgttttttggtygggagggyggtttaagygyggtygagyggyggttggaggygtttattygggagttggagygggygttygaggygygtayggygygggattatttyggtgagttygttyggttyggtagttttttgygygtatggttggggttyggggtttygagattgtttygggtaggyggtyggattagyggaggagagtayg

SEQ ID NO: 5973 - DNA, 903 bp, Artificial Sequence
  Description of Artificial Sequence: Synthetic polynucleotide
gygattttagaattygttttttatttygagttygtttttygtygttttttygtttttgggagggyggttttattaattttygygattygggtygtttttggyggttttgatttygttatttygtttygyggygggggtttgggggtgaggggygygttttggggtagaggattgygyggtagggtttgttatagggtagaggttagggtttttygggaaaaaggtaggygtatatatgtttttttttttgggaaaagayggggaggggggttttttttgggagattttaggtttygaaatttttygttttttatttttyggttttygtattttttttttttttygttaygtatttttttttttttttagttatttgttttatttygtagygtygygataaatayggttttagttygttttygtttttgtttagttttttttttaagtttyggggagtgggggagtgagtagaygttttttttttaggaggtyggaatttttgtttttattttttatyggggttyggttggttagaggtaagtttygagattttttattaattattattatygttgygagggtyggtgaggttgtagataaygtttgtaaggaygggagtyggggagggtgtagggygagtttaaaggaygggtagagtaagtttygggaagaggtaggggttttttttttygggtygtygtttttygtattttyggagttagtygtagttaygtagygtygtttgtygggtatattaaggatttggygygtaygtggygtttatttttattttygggttygtttttggttygygtttagtttttttagattattygtaaattgaggatttyggatatagagtgtagagatttyggtaagtttattgaaagttagtygaattyg

SEQ ID NO: 5974 - DNA, 1592 bp, Artificial Sequence; identical to SEQ ID NO: 5972
  Description of Artificial Sequence: Synthetic polynucleotide

SEQ ID NO: 5975 - DNA, 382 bp, Artificial Sequence
  Description of Artificial Sequence: Synthetic polynucleotide
ayggattgttygtttagtaatatttgattaygttttttattggttatygttttyggaagttygttttttygttttyggaattttygtaggygttgggtttgtagatggygtttaggtatatagtggygagtgtgatttygtagttttgggttgtttggttaagygttygtyggatatggtaygtygaagggttatyggygtggagttttygtttttagygttygyggttgggaaatyggttatygttayggygggaattgggattygggttgygtttyggtttttttatatyggtttatygtattygtgggygttygtattggtgttgatataattttttgatttttgattygtattgtttygygattaaaggtaaaaaayg

SEQ ID NO: 5976 - DNA, 665 bp, Artificial Sequence
  Description of Artificial Sequence: Synthetic polynucleotide
gygtttttaygaaattygtttayggataygatttyggggttatatttagttagaygaatgtttggtaaatgatagttattttaygttagatttttatagttttttataygttatttttattgttttagggaattataagtataggtatygtttygttyggygtttttttttaaagattggggtattaggatygygggtttttatttttatttagtataaagagttyggygtttagagttagyggtttttygaggatttattattaagttygyggatataggtttygattttatatttaaygttgttaaagtggtagagtyggygygggttgggatagaggyggtattgaggtyggygttgtyggtggttgagagygttataagtttyggttygttatattaggggygaygttttttagaggttttygyggtttattygggygggattggttttattgtttgygygttttgagaagtagattayggtgttttagggtttatagtttygygtaggggagtttagtttaggttttgtaygagyggtttttygygagtttagttttgagagattgggagygtaatttggtgttgagaagaatygaatygtttygttgttttttgygtygaattatattttttagaggttttygyggttttattttttyg

SEQ ID NO: 5977 - DNA, 764 bp, Artificial Sequence
  Description of Artificial Sequence: Synthetic polynucleotide
aygygttattagygygtttttaygtataaattttttttttgyggttaatttgygatttttaatttttygttttggttgttaagggaggygygtagagygtttgtgtttgygtatttttatattagttygtgtagtgtgaygttgggtttygtttttgtgatygggttaggttyggagttgtagggaattyggattttygggttttttggaaggtyggggagaggttagtgtgggaggatttggtggggaggaggtygtgttataaattttgygyggagttgtatygttgttgttagatattgygaygtygygattttttttatttyggattaygttttttagyggatttygygggagttgggtyggyggtttttttgtgtttttygggggyggaggtagttgaggygttttttttygggttygtaagggttgggttttatttaattaagggtagyggtgagattygagtgtagatttttygagttttyggggtaggaaggagattttttattagttttgttttgtaggtygggagtgggttgaggagtggygtgtgggttttyggaagttygtygtaggttatttgtgtgatttyggtgygagtggaggttggtatygtttagtgygaggttgttatttygtgtgtttgtttaygttttgtgtgattgggtgygaggaagttaatggtatygtggaatgtgaggttgtgagttgaggygggagygggygattgttygttgtattttgttgggtygatattygyg

SEQ ID NO: 5978 - DNA, 1394 bp, Artificial Sequence
  Description of Artificial Sequence: Synthetic polynucleotide
tygygtttgggttygtagtttygggtaygttgtagtttygtattyggttgtttaygttygggattatttattgtgttttttyggaattgtttagygtgtttttttagattttagatatttattttaaatttaggttttagygttttgtaggggatttttattttggggygtttatttttgattttttttttgggttttttygttayggtygagtttaagtggttgaagygyggaygaggatgygyggggtttyggtttttaattgtattataggtygtatttaygaatttggttyggtatagttattatygttygggtttttaggttttagggttgtagaagtttagtttygggaaaaaaagtatatyggtttgaggttttataggaattttttttttattttggttyggtttgtaaaatttggtttatttygygttttttttttttagaaaagtagyggttatagtggygttyggtttttagttttagttttattygatttagaggatagtttagttttgggagttagyggygttagaataygggagagygtttgttttygtygygaatgygttagygygygggggggyggaggtaagtttygtagttgtttygggtygggaggggygygtggggtygggtttyggyggggatagtygggtyggggagayggagttagaggggtygtagtgtttttygttttaggtttttatttgtaatggtygtttygtgattgattagtgttattaaagataatttaggtttgtttttttgtggatattgyggtttaaaatttaaaaaaataatatttygtttttttattttttatttggttttyggttyggagataggyggaggttgygagtttygtttygtttttagygaygttttatyggaatttttggaaatyggtttttgtttygagtgygtaagygygyggggggygaaygttggggttttttagggagtaagggagaagtgtggggtygtatttgtygaggggtygggaggtttggaggagggtggaggttggttataggatttygatggggatggagtgtttaaatttaggtttgtagtygtgattttggygtgagttggatggaggaaattttagtatygygagtttggattaaggygyggygygtgttgtttgtggtgtttgttgagtgayggtygtygygttttygygtatttggatygagtgtttggtygttggyggagtagtgttttygtgtayggggttgttgygtgygygtgtgtygttttttagygggggattaggatggtgtygtagagaaggttgygyggtggtgtttgattttgaygttggttgtagygggtttttggggtttttgyggtttgtgtttgygtttgtgaygtatttgatatyg

SEQ ID NO: 5979 - DNA, 949 bp, Artificial Sequence
  Description of Artificial Sequence: Synthetic polynucleotide
aygtygtgtttygttattttaaaaaagaaaagttattttygttaggtttttttttttttttattttygtgtgtgtttygaggtygagatgtagagagtaagaaaaaggagygaaggggatttttgygygttttaagtatttattagygtttayggtgtgagatgaaggygtattttttgggygygaagtttttaaagtatttgtttagggagatatttttgaagttgttagggttttttttttgtttttttttagattygggttttgtataaattttggagggttagygggygaggyggttatygtagyggtygttaaygagtagttgtayggaggtgtagaagaaggaggttattgttatttttttgataagttgggggygtgggaggtttygggagttygaagtygtttygagygggggtgggyggtgagyggattttygggtgttgattaggtgtttggtggtagagtagggaaggggggaayggaygtygattttagggattttttattygtttaygttttttggygttggttataygtygtygttttagtattaattggaggtttttagtggaygagtagtygttygagggtagtygtttgagtyggtagatagyggttagttggggtagyggttygaattgttttygtaataygttttttagtatttyggtttgyggggtgtttaggagygygggyggygyggygyggggatttaggaygtygggygyggggtttatggtagggtygaggtygttgaggtygggtttttatttgygtattyggggtygtaygaggtttgggygggggyggggygggggygggagttggattatttgtaattatttttyggttgygtattttaatttyggttttttttttggaggttgygtttaggtatygygttgaataagtygtataggtgtgattygggagygttggagyg

SEQ ID NO: 5980 - DNA, 1365 bp, Artificial Sequence
  Description of Artificial Sequence: Synthetic polynucleotide
tygygyggttttaggtgaatttggtygaggtttttgygttaaggayggygygggttagttgaggttaagatygtaggtattgttttatygttttttagattatagtttygtttttgtaaggtttyggggaaaygggtattttttttttagtgagtaaaggagaaagayggagttyggtggttgggtgtttygtttaggattattagygagtttagagttttttttaygatygttttagggtgggtatttttaaaagyggaggaagggagggaatatattttttggtgttgtgtttattttgtttygtatagagygggygtttataggttttgggggtttygttyggatygtagtggggagaggtygttttatgtttygtttygttaaatttaagagttttygtygagygttaggaggtttttagataatyggttttgttygttgttttttgtagaatttttttatttttttygagtttttttttttgygttygttygggtaayggtygygttatgtttagttttaggtygygaggtagttygttattygttttttygggttttygggttygattttygygttttggtygtttttyggygtttaggttttttattggttygaataygtttygygttttyggaygtttygagttttttttttyggtygaggttattttggygaggttygatttttgygygtyggyggttttttagtygtygggtttygtttgygtttattyggttttttggatygttgtttttttgtgygttatygggggtttgttttgggtttgttygatatygtggttgttygtttatttgagygtaggtttttattttgtgttagggtygygygtggttttygtttgyggtttgttgggtttyggygttataggtattgyggtttyggygttygtaygygggggattgggygggggttggagagtttaggtygttattgtyggygttttagtgtaggagagggtattgagtgtgagaattatatayggttggagtgggaaggggttttgttatygtttattttgtagttgaagtygaggatygygatagttttgttgaaaaagatttyggygygaggtttttttygtaygttgttgaggtgggagagggtgggtgtgagggyggygtagygtttgaatgyggtgggtaggaggttagygttggggttgtaaggggatttagttttgttttyggttttygygttttttgattttttygtatatttyggggtagygtttagtgatagagaygttttttaaagyggttttygattygaattaatggttttgttttttttttttayggggtagggggaagtggaygtttygggyggtgttgttgagyg

SEQ ID NO: 5981 - DNA, 2638 bp, Artificial Sequence
  Description of Artificial Sequence: Synthetic polynucleotide
tygggggtygygttggaattttataggaaaaaggygyggaaagtygtygggtatttttyggggttttatagatgtttttagtgttttagttygtgtattagttygygtattyggagggattttaggtagggggagggtttygyggttagtatgtgygttygaggttttttygtagggggtagtgtygttygttygygygtygatayggtgggagggggtgggaatttgygyggagttttggaggttttttgggagaaagttaggggatgyggaggggtgggygtaagatttttaggattttagggaggtygtggggagggtygtygagggtgtagtgtgaggygtaggagggggttgggggyggtgtaygttgtagggagaygtagtttttggaagatgygagtgtgaatgtgtgagtgtgagtgygtgtgtatgtgtgtgtgtgygygygtatygtagtttttygggtttygygaggygygygggtgttagtttgtagtyggggttttttttttyggtttttttgtttagttyggyggtttttttttttttttttttygttygttttttttyggygggttaggggttgggaygtttyggyggagtaggyggyggyggtggygagttggggagttttaggttyggygttgtyggaggggttygagtygagtygtttgygtttyggtygggtagygtygggttygtttttygyggggttaygttttgttaaattttgttgyggyggttagygtagygggttygtaagygggygggaggggygtygggtygggtygggtagggygygggyggttaggggtttygagagyggyggtttyggttygyggttttattatgttttagttyggyggygggggyggyggyggyggyggyggtagygggggaggyggyggttttagygtyggggyggtyggyggaggggaygatttyggggygaaygaygagttgatttttttttaggaygaggggggygaggagtaggagtygagtagygatagygtttyggygtagygggatttagaygaggttaagtygtttttggttaaygagtyggagaattagagtagtagttyggattyggaggtaaggaagtatygyggttattttygggggatttyggttttgygttygtttattygtttttgtttttgtgtttttttygtaggyggagaggygttygtagttygttygggatattttttagaagtygygggattatttygtygaaggtatgtgttygttgggatagttttttattttygattttygttgygtttygttgtttagttygggyggtttatygttttttttgtttgggtggaygtatttttgtttttygtttttattggyggtagttttygtggggygygygtggggggygttggggtttttagttttygtttygagttttttgtygyggygttgttagtttygggggtttgggttttatttygttttggttttgttygtagtgagaaggttttaggatagygygttttttaaaggattttygtattttgggtatttttttttgatgatttyggatttgagtagttygtatttttttaayggatttttgtttttyggaggagygygtatygtgagtgttygtygggygygtyggggagggtgggaggtygyggttygtaggatgygttttygggtttggttatggagtgggggatggggttttttgygtygattttaagtagaatttgtttgyggagttgaattattttttggyggtygagygygaggttgygttggttagtgtttggatgaaagtaaagttattttaatttttttttttttgygggttgaggttttggagtttatttttgggattttttttggtttttagaatttttygtttgtatygaaggaaatttggatttgtgttygttttgggggggtttygtttttttttttggaaatyggttagttttttttggtagtggggtaaggggtttagggagttgggttggygaygttgtttttygatttygggtttattgggyggttgtaggttggtttttaagaaatttagttttygtggygggttatttatagttttygtttttatttttagttttygtatyggggttttagtttttttgyggagttagtttygaattttaaattygygtagatgatttygaggygatttaaggtattttttaagttgaggaatttggtttttttttttttttgtygtttgttttttttatttaaagygagygttgygatattttaaatttgttaatgggygygtattgtgtgttgttygttggtatttagagyggtgattaagtaaattgatygggttttagaygaygtgtaaatgagggyggattttttygttttttttttttggttttaaattttygtttttygygttgygaggggygtagttgggggttggygaggtttttgtgttttttaagtygttattttatttttaggttttttgtttaggtgttgggttygatgatagatgttgggtgaaygtttatttattgtgtgttaggttttygygtgttgttgtttgggygygatgtgaatygtagtagttttttgtttttygtttagatttttattgtttgttatttygttgtygayg

SEQ ID NO: 5982 - DNA, 1531 bp, Artificial Sequence
  Description of Artificial Sequence: Synthetic polynucleotide
tygtatatygatttttgygtyggtttttgygattygygttygtttttttyggttgggaagtatttgttagyggtttttatttgggtygttttygtygyggggtatttttttgaagtagtygttgagygataggttgtggyggatggagttttgttagtyggttttgttgygttggtagaaggggaagttatyggygaygaattggtagatgtggttgagagtgagtttgygttygggygygttttgaatggttatggygatgagygtygaataygagtagggyggtygtattatttttattaggttttygyggttggttatggatagttagtttagtttttygggtttygygggygyggygggygaggygggygyggygggygygggttgygygaagggtygttgagagtagtygaagtgtyggyggtaggyggtggttgtagaaagggttyggtygyggtttyggggggyggyggyggyggyggagygtttaggtaygyggyggyggttgyggyggyggyggagggygggttttttaygtygggttygttgagttataggtaggggttggyggyggyggtyggyggygyggygtagtyggttagttygtaaggygttttggttgtygggggggygttyggggyggyggyggtggyggygggygggggtaggtygggttgygaatatatttygaagttgtygtygtagtagagggttatgtyggyggtygtgggyggttgyggygyggtygyggygaggggygagyggggttggtttygtygttygggygagagtatttttttgggggttaattttgyggtttygtttttattygygttgggygttyggtgtttygggtyggggtygggygggtgttagyggagygtttgttagtyggttttttataatygagttyggygyggttttttttgggtyggttyggagyggggyggtggtygygggtttgggttttttaygttttygttaygttttatttgttygygygtttaaattyggagttygttygtttygtttttatygtttttttgttygggttygggagygtttgggaggtyggygtttttaggtttygggtaaaaagtagtattttatttttagtttaygttttttaatattataataagtaaagttaygaatattaaagagaagataattygaatagtaygaatgatttttaaaaagttaatttggggtggtygttygggttatttgtttagttatttttttggtttttttatttttttttttttaattttttgtgatygagtygyggaatttaygtttagttttaatygatyggtttttagtygaaaataatygatgtgatttataaygttttggggtatayggtagaggttattaataggttygtttggygtgttttttttttttyggggattttgtgattggaggaayggaaattagtgttgagtttttttaattaaattgtaggttygtttatattygggaagtatttattygttttttgtgyggtttgtaygggttttyg

SEQ ID NO: 5983 - DNA, 2045 bp, Artificial Sequence
  Description of Artificial Sequence: Synthetic polynucleotide
gygaaayggtagaggtyggtagttygyggtttaygtgtatttgtttagggaatygttttagygaaatttgattyggatyggaattttttygtagtatagyggtygtgtttatyggaatggaaygttataagttgttatttgtattttttttttagttttgatagggaataygygttgtttttaygtttatatygatattyggatttttatttagttyggttagagttttaggggttagggattagtgtagggagaaggttttttattttagtttttaggatttttaattatagtttattygtttttattttgttyggttttaggtttagtygaatttatatgttttygtagtgtygagygttattatttatagtygttttttaaattgtgatttttatttgggagattyggaattatttaggattttggtgtggggggtagtattttttatatttgtttttygaaaattgttatggagtagtygygtttyggygggtaggtgagggggtygagtttattagygtygtagtttygttgtttattttttttagygtyggttgtygttttygggtagatatygtyggttttgattttggggttgatatygttaaagggtagttagtgttygtttaggttatttygggaggtttaggggtayggygaggggtyggggaaaggygatygtttattatagttygygygtttagattgagggaggagtygggttgtagaatyggyggyggatggagaygggagggaggttgygaggtygttygaggagagattaaggttttagaaayggagaagygggygttttgygggaggyggyggygttgtygttggtygttaagggygggaagtgttttgggatttttattaggggtygygagtttygagygttaaattttygyggygttygtttagygygttgttgtggygggygyggagggygygygtyggtagtgggggttgyggyggyggagggtaygggttttygtttagygtttttatttttttggtgtagttgtttttygygagtygagatatttttgttagggaagaggagygtttyggttgtttttttagagttttttgttggggggatatygtttttatgaagaaaatttttaaataaattttagtttaggaggaggttataygattatgttygygggttgtyggtyggaggggygaggaygygygggyggaggygyggttgtygtgtttaggtagggagtygagtttygggtgttygtygygygtttttygtyggggttatgtattttygtttgygttygatatygygggttggaggygagtgtagyggygatagttygttagygtygyggttygtttygtttygggttygtttttttygtttygggygttttgygtyggggttygttttygtagttttttttagtttttttttagtttgggtttttttagtttygttttagtttgtggygygtttggygggygtttttttatatatgttagtatatyggttatyggttgattttttyggtttgtgatttygygtgggtgtagttygtaggagtttatyggtttgtgttaygtaygggggtttttagtgtayggataygygtttttttygttatttgtttatttttattagattttattttttttygygtygtgttygyggyggaaggygtttttgtagygygtgtattygyggagyggtggygattttagtttgagtagaggagttgtagtgatttttgtttygtttttagyggattgyggagggaattttttattttattttattggggatagggtggtaygtygtagagtgtygtagttgtataaatttggaagtttatagtatygtttgattttttgtgtaatttygaaygttagtttgttygggtaattttgagtgggtttttgtagtyggttatgttagyggtttttgtatatttgtattygyggttttygttgtttgtaggttgtagagaygggggtattttaaaygtgaaagagtaatgaaggaaaatgtagatagagygaggaygtyg

SEQ ID NO: 5984 - DNA, 476 bp, Artificial Sequence
  Description of Artificial Sequence: Synthetic polynucleotide
tyggttygygygggaggagtgtgatttaggtgtygttttttttygtygtygagggttaggagttygggagygygattttttttyggttyggtttggttyggtttggttagttttygyggtttttgttygggttgaygtttaggaatgtggtygaygagaagttttaatagtayggygtggttttttagtttyggtgagtattygtygtggggaagggttttggggatttattggaggtygyggttygtagtagttaggggtygagttayggttayggaygttttggtgtttyggttygtgtygggtttttaggyggaggaggygttygttgggtttagattttygattttagtttyggtttttyggygtttgggttgygyggagtttttgtttygygtttyggatttttaygygtagtttttaygygtttygagttggagaagtygttagttygtttttttagggygtgtygttyg

SEQ ID NO: 5985 - DNA, 455 bp, Artificial Sequence
  Description of Artificial Sequence: Synthetic polynucleotide
aygygggyggygttyggggtttgygggtaggtaggyggtttggtygyggaggttttttygagttttgygtttttttagagagggaggggtttatatyggttggtatagttattaygggtatygaaatttggggaygtgttygattatgtttttttyggtggttygggggttatttygtattgtttagaagtttygtttttygttttttttttttggtttagtttattattttttyggtgattttgggtatgttaygtttattttttaggttttagtttttttatttgtgttgtgaggagtggaaggaaygggatgattaggagttttttaagatygagtattygaggtttttttyggtttygyggagttaggaggtgttagtygagatgygygtgtygygygygttttttagtgttyggttttygtttttgtayggttttygttgggtaagggyg

SEQ ID NO: 5986 - DNA, 749 bp, Artificial Sequence
  Description of Artificial Sequence: Synthetic polynucleotide
tygggyggygygtttaggtgtaggttygttttgyggaggagggygggggtygggtaagtagagggygtttagttygggggygtyggtttgggttgggygtttagagtttatttyggygygygggtygygggygygtggggtagtggtttttttagtygggaagttgttgtttaygtttyggtggttgttgyggtttygttagggttgtatyggggtttygygtagaygttttttygygatttgttgtagtttaggyggtggyggtggyggtagtagyggyggyggtggaggtggygygggygatagttyggttyggygyggtttttgaattgtttaatttttgttygygtygggtttaagygttyggtygttgttttygygttgagygtttgygtatygggtttygtttaggtgaggggygtgtgttyggagttygttgggygtgttyggttyggttyggtttygtygtaygttygtttttttggtttggttgaggatttyggggtttggaygtgttaaygttattttygygygtygaagttgtgayggtttattaagtagagatttgygaggtatatagagagggaatgaggyggaatygttygggggttygttgatattgtagagtttttygtagtatygttgttttaaatttygtttttttaggygtgygygtatagygagttagaggaggtttygtttygatttggggtttttygyggtttttagttygggggttygggttttyg

SEQ ID NO: 5987 - DNA, 1134 bp, Artificial Sequence
  Description of Artificial Sequence: Synthetic polynucleotide
tygaaaaataygttttaggygtygggattttagatatttgggaaatagagtgtaygtagttgttgagaggtttygygtttggttttttttattattgaggygtagaggtgttgtggatagtttagatttatayggygttygaggtgaaatagaatttttagtttttttatgaggttattggtattttyggttgtttttagagtttttygatttagagttgaatgtaaagtaagygttygaaatgtagaagtagtyggggtygtttayggtatttgtttygttyggggygagagaagaygttaggttgaggttttagygattttaggtattagtttygaaggagggyggggagatygtaaaggggaagtgttyggagggttaayggttttygygtattttgygtttttttgaagygygtygttttttygygtyggggattgggatttgtttttggggaattygtttagaagayggyggyggattggggtygggtattttttagggttgttaggttttttttagttttgtatttgtygygtygttttatttygttaggaagttttagagatttyggggatggggtgggagygtttttttatygygggtttaaaaagaaggaaggaygtttttaggggtygtagaaggaggattagttttaagttataatttttttyggatttaaggtaggtyggttggggtttygygtttatayggtttttggygggggttygygygtttygggagtttygyggttyggggaggaaagaggagataagagataggygaggattayggggttgatttagtyggggtagggattatygtggaaaaattttggygaggtggggggaygyggaaagagagyggttygygttttgtattttgygtygggtatttygygttagtgtttygtttttagtgtttygygtttygygtttygygttttgtttttatttygggttagttgtatygygttygygtygtaggaatygtggagttggaaagtgggggygtygyggttggggggttgttttagttgygtttyggttagygatyggygggtygggtttaaatttagttaggttgggtaggyggtggtygygygattggggatygggygtttygtttttttyg

SEQ ID NO: 5988 - DNA, 1645 bp, Artificial Sequence
  Description of Artificial Sequence: Synthetic polynucleotide
tygygtatygaattygagttaggtttggttttagggtagatttaattatttatttygatygagttttygaggtyggygttttagtttttatgtttatttttyggagaygtttygtggagattttggygtttaaaattgygggagtttatttattgygtttaggtggttagtttttgagttttttttattygtggttttttgtyggtatgtaggtatgtataagtatatygtygagtaggaggatttaaygaatttagtttgtggatatgttttaatttttattttygttttttttaggtttgtttaggtgaggatgatgggagggaaaagyggtgtatagtygtaatattggtattttgtaagagtygtyggggtattgatatagagggatatygtattggagatgyggtgtttayggagatttattgygygyggtgaaatattttaagtatygygyggaataattgggtttagtttttttatttyggattttttttaggattataygttattttttattttygaatttaggggtttttttaygttgygtttatttgttttgtttygtaatgattattttagtttggtggyggtggaatttgagttatagaggtyggttgtataggtagaygtgggtayggaagttagaatttggaatttttaggttttttagtttttygtaagatttygtygttgyggttttagggtayggttygtagagyggagttttttggttgtattgataggtgttygggtygtygttttygtygttgttatygttygygttattgttygtatyggtttttgggtygaattgygttttttygggtgggtatatagtygyggggaagtygtyggggggtagtatggagtygtaggggtagygygtttygttaggagtygggtatataggttygtggggygttttagtygtygtttggtaygggaagagtgagtagggygtagttagtttygatttttgaggatygggggattggaggtagtatygttyggagtttaggttgtttatggagtagygtgtagtggtygtagtygyggyggyggyggyggyggyggttgtagyggyggagggtagtttttttttttygtagggggagtttttgyggtygttygggggtttyggtttggttattgtygtagygttggtaaatgygttttyggygtyggtgttattaagtatggtygygggggtttttgygttggyggttgygggtttttygtttatygtttygtaggagagattgtyggaaaattttttggaygttttgtttaagtttaatttttgaggagagggggtygygttggggaggtggttagygttttygtygttgtygtttygygtattttttagygggtagaagtgygygttaggtaggtttattgagtttattaagagttgtttttttaattgtatgttttgtaaagygtagayggtagttggttgttttttttttttyggtggttttattataaaggtaggatgggggagttagygttttttttygaggggaaggtaattttttttttttttygygtyggggttatttatttgtygattygygggtygttattgygygtattggygygttttgaatttagygtttttttyggaaggaaagygtyg

SEQ ID NO: 5989 - DNA, 4698 bp, Artificial Sequence
  Description of Artificial Sequence: Synthetic polynucleotide
gygtttygggaaygttttttygttgtattttataggaggtygtgggyggtggtttaatagttttagtgtagagtttgaattttatygtttagaaggaaaggtgagtgggggattygggygggaggtgaggtttgtyggtagyggtttttaggygtgttgggtagtayggttagtagaggyggygtttggttttggatgttgtagyggagaygttaaggagattgaatgtagggagygaggygtagyggtygyggagggtggggtygttyggaaatttaggyggygttagttttgtagtatttgtaggtygggggygygtataygaggggtaygtgggtgtggaggaatyggygyggyggggttttttttttgtagygtygyggyggtygagtgttygtgttggaggaayggygagtggggtgtttgtttygygtaggyggtattygtygttttagtttygtatatagtaggtayggttagggatygggatygtggtttagygtttggaggygttttttaygygtatttttttygatgtyggggygggaagtygagtggttttgttyggagatgttaggggatgtgggtaggggaygaagaggttttttaattggttaaattttggtttgaggaaagattgaggtggttattgattygtgggagygttttggggtttygagggaayggtagtygagttygggagattggtgttgggtattygygggggtyggygggttttaygtgggtggatttygagttgagggtagggtagggtygyggatygttgatttatgagtttttttattttygtataaggatatttgtatatggattygggtttttattygtttttggttgggttggygtygggagygygtaggggagggayggyggyggagtgyggggtttggygggtgaggtgggtgaggtgtggtygygggggagggggygaaggtattagaaggttgyggtygygttgtygttgttgtttttatygtyggygyggggygyggagggggygaagaggtgtttgttagtygtattgyggtttaggggtgaaaggaaaagggtttatgtaaaggagaaagggtaggtagagatttttgttggtgttagtaggtayggaaggatgtggtygyggggatttggagtttagagggtaaygttgggtgttataatgtyggagatgatttygggtgtagaggygattttagttgggtagagttatagagaaygtggttygagaaggggagtttttttaaattagatatattttgtgttgttttaaatttagtatttatttttttttatttygtttttataatttttagggttttagyggagttatttaagygtttagtattattagttttattttaggtaaaaattaagattaattttgtattttattaattttttygtatttaagttattayggggtagttttttatagttttaaggygtggttattttaagtttatagygagttgttygtgttttyggtttttgtttygtaaatttyggaygatgttatyggaggaygttgaaggtaaaggttggtggggttaggygtyggygagattgtygygttagtatagttttygygggagtygagtgttgaygggtttygygattttttttygagggtaaayggttyggttttttagggatatttggttagtgttattttttttttatygggtgtygygtatttttttaatagaaygtgatttygtagayggatgaattyggaatyggtaaaattygtttgtttttgtttagtttttttgttttattatattattgttttttattgyggattgygtygtgtgygtttygggatygtttttgtatttttgtttatagttttttattattaaggtagtyggaggaagattttttygagttatttgttttaygttagtagttatatygaggyggtttttttygtattattttttaagtgtagagtttttgaaagttygaggtttttgtgttaygtatttttttttttgyggggygatttygygtatgygtgtgtgtgttaygygtttaatygtatagagtaatttttagaygtgtaagataaagtattttaagtaaagatggtttagagtttaaattggaaagtatatttygaggygttgaatttgttttygtygtttgtttyggtttttggggygtygtatttaggagaagggttttaattttttgttagattygttyggaattagtttttttggyggtgtagtaataagtggtttygtygttttttttgtgtattyggagggattatatttttttttttttttagtttttagtttaaaygggagtaggtaatggyggggaaagggggaggtgaygagagyggggagaaggaagtatatattttttaattgtgaaattgtttgtttgygtgttgtgttttgggatttttttgttttaattaattttaattttaaygtggtygtaaygttaagattaagatttagaaatgaaaaygtatttattttttttattataaaggtygtttgttgttgttgtttttttaaaatattaagtaattttttttttttttttttayggatttatattttgtttatgagatttttttaattttggtggtttggagaaatgaggtgggggaggggaggattaagggtagtaagaygtttattaygaaaataagatatttattaatttaatagggtygtttttttttatataagatgtttttttattttttattaatttataataggtaaattttgagtttttttaaagtttygttatttagygtttatgttygaagttttaygaataaattttttttttaggtaaatttgtttaatttttgttttatgtttagygaagtttaggtaygatgggttaaggatttttggtttttatattgtttgagttaygttttagttggaaaggttattttgggygagggaygtgttgttygattggtttaaataaggaaagaaagtggagtattaaagaattaagggtttttgtttttttttatttygttattattattatyggttttygggttttgttgagygttgyggyggttttggttgaaaattgygttttygtttaaatygagygtaaaatttttttggatagaagtttgaaagaatttagtgtagaaatagattttttygtttaatttggttttaattagtaattatataagtatatttatataattatttaagtggagagtagaygtttagatttayggtttttaygtgttgttggagttggygtagaygygtgtgygggtatagyggyggaygtgatatygtatttttttygaatttttgttatttagggtggtgtygttttaagagggggtygtggggaggtggggtaataggttgygtaatttatttgttttgggggagtttagggtttagagtagagygtaatttyggggggttgtygtatagttttatttttttatattagaagagtaatgttttttatggatgattaatagtygggttttttttgattatgyggygygtttttgtyggtattatttagttgttttaatttgatttttattagtaaygtgtttttagaggttgygagttggattygtattaygataayggttttttttttttttattyggtyggttttttgggaaggatyggggattgtagttttygygaygttttttttttttgygtagggagtaggtttgagtttttttaygtaatgatttgggagattttaggtatttyggggtttggtyggagggttttygggttttggagttgggyggtgtttgtagtgtatygtygtgagtttttttygggtataatgtgttggtgtgtagagaggaggaaaggaaaaaaaaaaaatttaatattatttttaagtggtattggtatttatgaagtggtagtggtttatattgagygtgtttttgtttggaggtgtagggggyggttattgtagtygaggggagggtattgyggttaagggtagggygagaggatagttaaggtyggttggtygygtgggagtttttttttttygggtttagyggtyggaattattagtattgyggttaaaggggttggtaggtttttttgtatttygygtgttttttygttttttttgtgtttttyggtttttttaggaggaagatggggtgtttatygygaatggggygygtygggtygtttggtygggyggttaygtgttttttttttttygttattgyggygggagttttaattagagygygttagggggtttttttygggtaggaattattyggttyggyggyggagggtgggtygtygttatttgatygttygttttygtttttygygagtaaggggyggtggtagygtttgttyggttataaatggtttttttygttyggttygttygttygttygggttyggygyggattygtttgggygtgtttttttygtyggttttaggygttttatygttttgttyggygttagttygyggttttagttatttttgagggygygtygggtatttagygygtaggttygtttayggaggtygatayggaagtttggatygtygaggygtgtggttygtttatyggtaggtgagygtgtatygygggygtgggatgttgtggggatagtgygggggaygtgtggggttttyggatgygaaygygagttygtgyg

SEQ ID NO: 5990 - DNA, 462 bp, Artificial Sequence
  Description of Artificial Sequence: Synthetic polynucleotide
tygttgggattttgtgygyggggtaygttagygattataaaygtgttttaattttgttgagttaaagttttggtgttaggygttgttttttttttgttygttygagtttygtattttttggtttttttttagttggtgttgtgtttagttttttttgggtaatttatttaggaattygttgyggttatttttygttttttttttaatttgggtygagtaataagtggagttagaattaattttatgggygagaggagtayggaggygagtggagygygttgtygttagaggttgttaaggaggyggggtggttagygyggggggtggaggatgggggtaggaygygggagggaagggtagggggtggggggygaggtttyggggattagygygygagagtgtttagttgggaaatgtagtttygaattaatatygtatgttttataattagtttaygagtyg

SEQ ID NO: 5991 - DNA, 300 bp, Artificial Sequence
  Description of Artificial Sequence: Synthetic polynucleotide
tygaattggtttgttygtggygggtttgtttaaagtataggggttttygttttyggtgygygttgtttttaggattagtgttgttgggagataaagagttttagatattygaggttgggagygtyggagagtttttaggtttygggtattttttyggagtaygtaagtatagttttaggtttttagggatagatgggttagagtygtttgtatttgttygtattttttgggaggttgygatgatygtagttagggtggtygagygttyggtttattgtattyggyggttgttttgtagyg

SEQ ID NO: 5992 - DNA, 554 bp, Artificial Sequence
  Description of Artificial Sequence: Synthetic polynucleotide
tygagatatttygggygygagyggtagtgttgtttgtttgtttttttttttttttagtttttttttttygtgatttatttattttttgtagttttygttygtattttttttaatatttyggtatttttgtattatttgttygggtagtttyggygggttttgggatttgttgtgygygtygagaggaaggtaagttttaaatttttgtttggaagaygggttgtygyggttgtattattagtaggaggaggaggagaagaaattatttygygatattttattttgygggtgttttgtygttgtygtttttgttgtygtygattygagttygygggttygaatatygtagyggtggggayggtgggttyggygggygtygggaggaggatattagyggagttttgtattttygtgtttygtttattagtatttatttgttttttygttttttttttagttttttagagaagggattatgatttggaaaygtagygtygtttttygtttttatagtgtttgygggtttttgttataaggtaattttygtttyggyg

SEQ ID NO: 5993 - DNA, 1153 bp, Artificial Sequence
  Description of Artificial Sequence: Synthetic polynucleotide
tygtttttttygtagagatygttagttgaggttgtaatatttgtttyggtaaagygttttygtagttttttyggtttgttygattyggtttttttygtttttgtttyggttgyggtattattttttggagttaygtttyggygagygggggtygyggagygagggggtygttgtgtygttatttattygagtygttygggttggtygygagtygggattygygagggttggygggttttggttttygaggaygtagatatgtggtttgaattttygtttttttagtygttgtttttgtgtatttttttgggygtttttagygaatgygagyggygaggygagggygagygygtygaggaagggygggagaggygyggagtttggtygygtygygttgygtygagygtygggtttttttygygagtttttygggttygygygygygttttttattgttttygtttttygygyggygygtgttttttatttttygtygygygttttygtattygttyggttttaygyggygygygtttgttttggyggtagyggyggyggyggyggygygttttttttygaaygtygtttttagggttgttggttgygttttttattgtttygyggttgttgttyggggtgggyggygaggygggggggaggtgtyggtttggtygtyggggagggtttatygttygggyggatttttattgygagagygatgygggtttaggygyggygygygggggttgtagggygtttagtattgggggttgtyggygygygggggtttttttttggtttttaggtattygttgttgttgggygtttttygtattttyggttattatggatatttygttttttygtygtttttttygygtatttygggaggtygtyggggyggtagtagyggygyggtttygygggtgtttaggtgatyggttyggtagyggtagagtagtggtagtagtygttattgtygttgttattgyggtygtygtygttggagagaggaggaygaggagggtaaggggtagaagtaggttttgttttgtttgttttagaggttatttygggtttttttttattaattaagygatttygtgtttatttygtaggagaygtttyggtagtttttaatttgtgtgygtyg

SEQ ID NO: 5994 - DNA, 1603 bp, Artificial Sequence
  Description of Artificial Sequence: Synthetic polynucleotide
gygatayggtttttttgaygygtttttaattaaggygttaagtttagtttgatagtattttttttttttttyggtttttggtttgatgagtygtttttatttgygagyggtgtaggtatttttgttgtygattaattttttttagygtygaattggyggtattygagtygyggttgttaggtygggagaaggttgggtttggtygggttttgtagygtttygggtttygtttttgttttgggygttygttttygtygyggggygaggtggtggagatygyggaygtygagggtttttttagttagtaygtygygttgtttyggttttggggygggggtygyggagttttattaagtggttygygtttyggttttygggagattygagygyggggagggagtgggtgtygygagggggyggttygygyggggagagtygttagtttayggygtttttgygttgttgtggatgtggttaygygttattyggtttttggattgttaggagagygyggttygaygttattaygtygtggaygttyggggatttttgaattttagygttaaggttgygaygatgttygtgatttttatygygaagttattttygtaaggygaygtaaggatttyggygatttygggygtygtatattygttattttttagttttatgtaattttttttttgttgttttttttyggygttttgtttttttataattggaagtygygaaggyggttattgygttgagtygttygttttgttggttaagtttgggygattygygyggaggagggtygggttgattgtygtygttgagttgttttyggaygggagygtttgtttayggtatttattttttttagyggtggaaatgtggagaagtaagtgggaggyggtgtygggaattgattttttttaaaayggtyggygtygttgttttgaaatgggyggttaagtgtttgtgggattaagggyggttttagagatgttyggaaaatygttgttayggttagagtgyggygtagaygyggtagagttggaggtgttygyggtgtaggttgttgtttaygtygtttaggttaggtgttgagggtttagttygygtttyggtygaattatttttagtttygttgagttatttygttygttyggtttttatygtatyggttagaggaaagttttygyggtttttaygtttttttatagttgtagygttttttttgtttttggtttygtaagtgtttatttgagtygggagaggttttygggtygttttaattgttygttttatttggtagttygttttygttttygttttygyggtgaggygtttttygttttttygttttttttttttaaattatagttygagttygtttttgygygygygygtttttttyggtttaagtgaatagttttygygtaagygggatattgtggtggatgtaatttttttygtttttagtygygaggagtttttyggygtygtaggtagygttttttttygaagtagttgtatttgtaattgggtagtttggattttygtgttttgttttygggatttygygtagggggygtttygggatattttttgygggtyg

SEQ ID NO: 5995 - DNA, 1411 bp, Artificial Sequence
  Description of Artificial Sequence: Synthetic polynucleotide
aygattagygttttyggtgygaggatggaaagaaattttagaaaaattttygttagataattyggtagtatttggtttyggaatagagaggagagaaagatttgatygtygtatttagggttattygtygtattaagtttgagggttttttttgtttttaggtttttgtygttygagtttaggtttttttaggtgttttagggtygggttgtattygagtttygaggaggttttgttagygttagygyggyggtgataatygagggaggtgggtgagaggtgyggttgtygaggtaaaygtagagtattygtttagttttttaagggtygagagtygggagtttygaaygtygtttaagtagttttttgtttttygtagttygtttatatttttgygggatttttggaygtttygttyggggatttagggaggagggagagaggagggagggagtgggtagtttgggygtaygttatyggttttygtaygttyggtatttttygtggygyggygagttaatgggatttgtatattygaggtgtaatagtattattgtattaattattatttttattttaygtttagattgtttatttatttgygggaaatatatgtygggagaagtttatatttyggattttgtttygttgtttaaggtgtaatttyggggaggyggygaggggggaggggagggttttagattttttattatattttttagttttatttgtygttgtaaattatgaggattttttattgagyggtatatggagattatatatttttttgaatatygttttttaaagtttgtagatttttattttgaaatgaaataatttttygttggttttttyggggataggygttttttgygttttttygygyggtttgggggatttttttygtagagtaggygygtattttaatgtygtggtyggygtttagtggagattttttttatagggtttagaataatttttygyggaatatttatttatatgtagtgtttgagaattaaggtagtttttttgttttgtttttttgygtttagttttyggatttttgtgtygtttgtagtttttttttatttygaatattygtatagaygygagtttatttttgttttttttttaygttgggyggttttaaattygtygygagggttgaggtgtttatatttgtttayggtagtttgtttygtttttaagygttttaaagttttttaagygtttatattggttttgggatagtygattttggtttttttgtttgtttgagggatygyggaagtggyggggaatgtgttttygtttgagatygtttattgtgagtttttaayggaaattttgtayggaaggtaatygttttttygttygyggtaagtaggatttattygagtagyggggatyg

SEQ ID NO: 5996 - DNA, 2629 bp, Artificial Sequence
  Description of Artificial Sequence: Synthetic polynucleotide
tygtyggggttyggaggtgttygaagygaygggattgatagyggaggaaaygtagttttttttygygttygttygyggtgtaaatygagtataggtygtggagttaggttgtttyggttttygttgggttttaattttygtttygtttagtgggtttygyggtaagyggtttttgaatagttttaagagggttygyggagtaaatataygtattggttygtttttttttygggtagygyggtttygttattagttttgttyggygygtttagttatggattgtayggtagtygggyggggaaygyggagagygagygtatygatttgtgagagaaggttaagaggtttgygttgtygaygttyggtygtattttygtttygggtttttttygyggtgaatttgggtaggagaygttggggtttyggaaagagaygagtttagtagaaagygygtagagaggtagttttaggttaggggagtgtaaggttatagaggttagggaggtgagtataggaggatataaattgaggggataaagaggagygataggagtttaggaaagygaaaaagtatagagggattttgggygttggttttagaggygggtttagagggtgtgaggttaggttggyggyggygtygtyggttgygatyggggtyggygtygygygtttttgtattttygtattygtttgtatyggtatgyggtgggtttttagagatygaggygygaatgtagygygtyggttttgttgtygtggttttagtaagagtaatgtattatggygagttygggttgtygggtataagygaattgtaggttyggygtattggtgggygygggygtygggggygyggyggtggttgggttggtagggttgagttggttyggyggyggygyggyggtttygtggtgyggtggggtaggyggyggtgyggyggtygygtgtagatggtgtgygtgyggatgygggtgggggtgyggyggaggygggggtgyggtyggygggttttttaggttattgtaygagtttattaygtyggggggtagygttatgttttgtaygygtgtgtayggttygtaygaggyggtygggttygttagttttttgattatagyggtygygttagggttatyggggttygyggttgtagtygtagttgttgtagtygttgyggttgtygttatttggtaggaggtatagggtatgggtgagggaggttgyggtagyggttaygagttgttgaggaagttagattgtaggtatttggggggygttaggtagtygtagtygtyggtttyggygttygttaygtygtattygtttgyggygttttyggtttygaagagttttttgtygggttggaagtgygygggyggyggtyggaagggtttttttatgyggyggyggygtyggtagttgtttttttygaatatgttttygtaggtygggtttagygtttagtagttgtttttgygttygtygtygttttygygyggtattttgatgaagtattygttgaggttgaggttgtggyggatgttattttgttagttttttttatttttttygtagaaygggaatttygygatgatgtattggtagatgtyggatagygtgagtttttttttygygttttygyggatygttatggygatgagygttaygtaygagtaygggggtttttgygtygggttyggttttttyggggttgtttygtygttatttttatygtttttgtttgggttyggyggyggtttttttggttttttgattgtgygatyggtttttggggttagtagggttttygtygygttttygggttyggggtagttggttattatgataaagtyggygygtygyggtygggtygtttttgtttttygttttaggygttggygyggtaaagagttggggygtaygagttygtttayggttaagttttaaatttttggagattgyggatgtygttygygtttgtttgttggaggtttgtygttgttttttttttttttttttttttttttagggagyggtyggygggagtggagtttagtttttggttatggggagttygtttaatagagaggggtttyggtttygtygttttttttygtttaggttagttttygttttggtgggtttttttttttgygtttttttttttttttygtttttyggtttttygaagtaygattygygtttttggyggagttgttttttggagtttttagtgygttaggagtttygttttgttttgattygtatgggttttatygagtttygtttgygttaggygttttygtttttatagyggggyggttagtygygtaygggygagtttatttttaagttattttttgtaaaygtttygtatagtttggatyggtttgttttygtttagygagttttaggggtttagtygatagttaggtttaygygtttttgaaatttgtyggtattygttttgygggttgggttgggagatgaygaggatttyggtggggtttgttygtattyggttaaagtttaggaagttygggttttagygaggaaaggygttttaagttttttygyggtttttaggtgaaagaaaaygatttttttgttttgtygtttgttgtyg

SEQ ID NO: 5997 - DNA, 1686 bp, Artificial Sequence
  Description of Artificial Sequence: Synthetic polynucleotide
tygyggttgtttttgtttttyggagatgaygyggagttttgttattgttatttaggtttaaggttatttattttgttygataatttttagtattattaggygttgttttagtgtgygtttggygttttttttagattagtygaygtagaaygtttagagatttagttaagggtaagatttttagygaygttygttagtttttttygtttagatattagtttaaagggtatggtaggttagggtttttygygttattttagatgatttttaggtttygggtggttattttttgggggagttttttattttttgyggtagttttttygagagtyggagtggaggygyggggttggagggtttttyggagtygtttattagggttttttgggggttyggtttygattgggtagggggatttggatagggtttyggagygtggagayggttgaggaaagttgggggtyggggttttggggyggggagygyggaattyggygtygatgttygygtttatgaatatgtaygagttattttttttttttygtgaygttaygggtygtttyggggtgagygtttgagtygtttygggttygygttagtgagygyggttgttgtyggygagttagyggygtagyggygggaattygaggtygagygtygyggyggtagygttagaagygtatttatygggtayggygaggyggtttayggtgyggtaggtatygggaggygagagtyggygyggatagtaggyggyggttgtagttygttggyggttgttgygaggatgttgtttgggyggttgtgttgggtgtygtttttgttggygttgggygtggggagyggtagyggyggtggyggggatagtyggtagygtygttttttygyggttaaaggtgggtgttggggaagtttgttttttttttaggagggaggtagggtaggtttgagggtgaaagyggtaaggatttaggtttaagttggatttgtttatttttttttgtygtagtttttttggtttttgtgygttttggattttygaagttagttttttgygtagyggattagagaggtttattygyggaygttaatttaatttttgggyggggttygggggttgagtagaaggygaggtttggggagtayggataattttgagggttgtttgtgtyggggtgggagygtagtgggtgagtttygagttttggtttagggayggttagagtagggygttggygygtygtggggataagtaggtgtttgtttttgtttgggggaaggattagyggyggtgtttttaaggagggagtygagttgtgatttgttttttagttyggggatggagtggaaatttgtaggttttagggaaggtttygttgatattttttaagtttttttagggygtttttgatttttyggggaaygtgtatttttygggtaggyggyggggttyggaagaagygygggatgtgaggtttttygttgttttttttatttygttttgattatygaggatygaggagtttaatttggtattatttttttgtttattttgtttttttgaagagtttgattttttygygtttttygttyggaaggaagttagatttaagygaaygtttggttttgttaggygagtttggaagtyggygaatttyggattttgatagttgtttgggagygtyg

SEQ ID NO: 5998 - DNA, 1686 bp, Artificial Sequence; identical to SEQ ID NO: 5997
  Description of Artificial Sequence: Synthetic polynucleotide

SEQ ID NO: 5999 - DNA, 2132 bp, Artificial Sequence
  Description of Artificial Sequence: Synthetic polynucleotide
tygagaaagtgggtgyggtaggyggygtttggaggaattggygtaggtttttttttaygtagtatatttggtygtagatgttgaggaaggtgaagatgtggaagagttggtggttgtggtygataatgtygaaaagattyggttggatgygttyggggattttgtttaygttgaagaaggyggttattattagttagaagtagyggyggtagaagtgtaygaagagtgtggggttttttttaygtaggtygaagagttagttttygagtataatggggtaggttatgttgagyggtatgaygaagaygaaggtgygtagygygaaygggtaggtatattagtyggtayggtttttgtagtaggttatagtgtaagttatygttagtaygaaggttataggtagtattagggygyggtaggyggygataaggygygtgtagtttaygtgttagtttaggygttgttgtaagtatggagttatgattttggtatttagtaagttgaggtttggtaataggtagtagtagtaggttatygtgttgtygaagtygtagtagttgatggaygygtagtttaggtagaagaaggyggygygtagaygtagygataggtagttgaataygtgygtygtgtagtttatggygaaggttagtagtattttygaygygtagtattataayggtagtagttaygggtggtggaagggtaygtygtygtygtttaggaagaatagayggtagaatttgtttaggaatagtagtagygggatgaagtgygtttagaagttgagygtttygttggtaggttttagtatygaggttaggtatttttgggtygtgtayggtagaygtyggtagttygataggatgaagtattttaygaagtygtygggtatttygttttagygtagtagyggtttggtagaygttggggggtttygggaggyggtagagtgggagtttygggyggttttygaagttgtyggggtyggggtyggagggttttttgtgttygygtttyggggttgtaggygtygyggtatggtgttyggggttyggttagggygygygtaggygatttttggygtyggttttygggygttgggtagttttygtyggtygtygtyggagtttttgtgtttaygtygggggygtygttgtaggtttaggagaagattygtgttttygagtagtygtttttaaaaattaaataaattaataagagaattaattaataggtagygttgygatygttaggagygyggagygygygaggtttagyggttttttygttaagtttttgttatyggygygyggtygttygygttgyggtagyggyggyggygyggttgattgyggyggtagygyggtagyggtgattgggtatygygyggtgygggtgttttygtygtygtygttttyggagygggaggtggggatgtgygagtygaggygyggagggagggaygggygtatygaggaagggygggggttttttaggttagggtttygyggtygtttygggggatagagttgttttttgtttygagtttygtattattttttttttygggtygtygtagttygggtygtttygttaatgattgatgygggggtygtaggttggtyggygaygyggyggygygygygtygagtattagagtyggttttggggttygaaattygatagttaygygggygttttggaggatattggggagtygygttygyggggggyggggagttgyggttgyggggggaggggagggygtyggagtygggtagggyggagagatgygttagyggtaattttyggaggtygtyggggaggggggtatttyggaagtyggggggttttaagttygygttyggatyggggtygtgttattgttagttatttggggatgygtttttygtttttttattgtttttgygtgtgtgttagtgtgtgtgtgtgtgtgtgtgtgtgtgtgtyggtttgtttaygtattataygaaggtttagttggttttttttygtttagtgggygtatttaggtgygttattattttgtygtttttttygtttttgttttgttygaaagaatygttygtaagttgttttgtggtygygtttattagtttttygagtyg

SEQ ID NO: 6000 - DNA, 2954 bp, Artificial Sequence
  Description of Artificial Sequence: Synthetic polynucleotide
aygttaattatagtggaygtagtatygygagyggaaatgyggagagtatyggggtttygtatgtggggtataatgaaataagagtagtttyggttagaggtttagtaaagyggaaagayggtttygttygtatattttttyggaaaattgaagygttttttttgatttttaaggttagaaagatttattatttttttygagagggygtagttatagatttattagagagggygggtagggtgtyggaagttagagaayggygtttygygtttttttatygttttagggygtagaggtgtttttagtgttyggagaggttggtagtgtyggtttygagggaagygtggagyggayggtygataggggatttttgtttaaattttattattaattttttttgagagtaaaaatatggggtygagttyggtagttgtaygtagaatttaattttttggtagttttyggtatygaygagttttagatttygygttygtatttyggygttttgygygtagagttaagttttyggattygtggattgtagttttygygygtygyggtaaagygggtygygtttttagttttygaggygtagygayggtgggagtyggttyggygttgggggygggggyggggtyggygaagggggagggttgygyggyggaggggaggagtygyggygatagayggyggygygtattaatygggygtyggttggtaggagtygygtagaggttggttygagygygttgygggygttyggygtaaggggagtygggtagtagtatttttttgggygtygttttygygyggyggyggyggttgyggyggggtttttttttgtttaaatatttygttggttagaagygttggtatygggggygggttgggtygggtygggtagtgttgtatatttgggtttttttgtttagagttgtgtgttyggggttttttggtttagtyggaggttgyggagyggygggggttgtttgygttgttygttygggtattttttyggtgatggaagtagtygtygtygtygttgyggggtygygttgtgttttatttatygttgttagagaggtgggaaaattygtygtayggaggtygaaagygagaggggttgygtygttatgtygggagttgagttttatataagtygtttttagttatygtttttagtyggtttygtttttttgagygagataggaagttgyggtttygagaaagyggaggagaygtygttggagtygggaggygtygggttyggyggagygyggagyggggttttgggtygygtgaaagttttttttttygagtygtagggygttygttgttyggaaattgtttagggataagtyggtygattttttagatttttygaaggtgyggggatttttagyggaagygagagggagygaaatygaggaaygagtgatagtyggatagttygtygggyggtgattyggggtygttttygggygygttttyggttttaggtgagyggaggaatygggtagaatygagggtgggygttatttaggaggaggaggttgggagggagattggggygtattygtttatttygttttttttygtaggttttattyggagtygttgttatgggagagttagttttgggygttggggattagtygtygygttygtttyggagtygyggttygagtttyggygttagtagttagttygttgygtttttttttygggttgtagggttgttttygtygygtygtyggttyggattgtgtttgtgatgagtygtagttygtagygagttttgttttygggygygttttttyggttgttttaggttgygtttgtagtygygtygygtgttttgttttygtagtggtttyggygtttaggaygtygttggttygygttttttttyggaatgaaggtgtttygtaggaaggygttggtgttgtgygygggttatgtattgttgttggtgtttattatgtttaattttttggattataagtggtataaggagtygttgtagtagtgtaatttygatgggtygttgggtgtygtagygggggtagtyggaggtagttgggggygtttagggtygttttyggtygggtygtttygtgtttatgttygtttggattttygtattttttatygttttttygttgtygtygtyggggyggtttttgtagtygyggtagggatggygggggttgyggtttttttaggtaatggtattyggggtatygggggygtyggggataagyggtagttggtgtaygtgtttattaygtggygttttggttygtygtttttyggygagttatttaattagaatttygaggtgttttttttttaygagttagtgtggtatgtatggtaaaaattgtattygggggaygtygtttttttgtagggggtagygygggatatgttgagygttttttatygttgygatttttttgttttttagttgtatagtttygygggtagyggggggygtaattttattaygttgggtattttyggygtagttattaataaggtggtgtgttygttattattttgtttygtttatygtaaggaggtygtggggttggtggaygatygygtgtgtaagaagtgttygttatagygtttggygygtttygaggaggagtgtygtaagtatygtatattagttataaagggtgtgygygttttygaygtggyggttttggygttattgttgygagattyggttttggattttaaggttatttatttggtgygtgattttygygyggtggygagtttayggattygttygygttayggttttattygtgagagtttataggtggtgygtagtygagattygygagtttatygtatgttttttttggaggtygygggttataagtttggygttaagaaggagggygtgggyggtttygtagattattaygttttgggyg

SEQ ID NO: 6001 - DNA, 2954 bp, Artificial Sequence; identical to SEQ ID NO: 6000
  Description of Artificial Sequence: Synthetic polynucleotide

SEQ ID NO: 6002 - DNA, 885 bp, Artificial Sequence
  Description of Artificial Sequence: Synthetic polynucleotide
gygtaygtttgygtgtttattttttagagtttttggtttygygatygtgtattgattttttttagaattttaggttygttttggaygtggaaggtagtygtgtygtttgggaaagtggagtygagttygggaygttgtyggtttaaatggaaygtyggtttyggggttygtttttyggygggttttygagttaaattttttaattgttttatgaygttatygggttttttttttttgtttyggttygygyggttttagygtggygttaaggagtgtggyggttttygygygtatygtgggttatttttaatttaggatttggttagtaggttgtttttygagtygaggttgygttgggyggaattagggatttatagttyggagtggggttgaaatagagtttttggttygagtagagagygtgtataygtatgaaatygtgtttttgggtgygtyggyggttaggtgttygatgtyggttttggaagtagygtyggagttygtttgaatttaggttygggaggttagaggttgtyggttaygtttaattgtgttttttttgggaagataatttttttagttttggtttttttttgagttaygggtggttggttggtttggtggaaggtaggtgtataggtaatagagataaggttaggaggtaaagtatatttatgtgtaaatgagaygygttagggaatttgtaattttttgtattttygtttttgatgtttygatttttataattatagaattttaggtagaggtygtygattttttygttttygttaagagggattyggagtatygaagttttttagtyggtgtyggygttttygygtttttttttttttttgygtygtgattttaaaagggyggygggyg

SEQ ID NO: 6003 - DNA, 2174 bp, Artificial Sequence
  Description of Artificial Sequence: Synthetic polynucleotide
tygttttatyggttttttgyggtygttgtagaagygtattttgttgaatatttygaggaygtgtttttygtatagggagygttygtttttgttggggttggagyggygtttggaggtygatattyggtygttgttggattttttygtttgtygtttttgtyggattaaggagttggttatygtygtagttatagttgtttagygagggttttaggttttagtttttattgygtttttyggtttgygtttygtyggggygagggtaggatttgggyggttagggaaagggtagtygyggggaggtagtgttaaaatttgaggaggttgtagtatygaaaattyggygtttataaggttagttaaagtttgggtagtggygataaaatgtgtgaaaatttagatgtaaatttttttaatttttggyggtyggggggyggggyggggyggttttaggtttttttgygaagtagaygtttgtattttaaatttgtattttaaggygatyggygtttaaggggtagtggggagtttagttatattgygttyggggtattaagtggaaggggaagaaygatgtttaaaataataagaygtgtttttgttggagaggygtaagygttgtaaggtgtttaaagtatatttatatatatatatatagaaaattygtttataaagtagagtttggatttaggygggtagygygttttyggtagaaaatattaaaaagtgaataaaaygtttttttagaaaataagttattaatygtaygagagaaggagaggaaggtagtaatttaattttttgyggttygyggttttgaagattaggaggttygttttagtagggtgaggtttatagaatgtatygygtyggttgyggttttttaggggtyggttattygagttttggaatttygagaggygygaagtgggagyggttattyggagtttgggtaggggygyggggygggggtagttgtttttagttgyggtgagagtaattttyggttagtagtattgtaaagagagtgggaggygagggaggggggagggygygagggagggagggagattttygagggttaagtatttttyggggagaaattagygagaggygatttgyggggttttaagagtgggygtttttttttttttygtttgtttttyggtaygagaygggtatagttggtgattatttagggaattttaaatttggaatgatttagtagtttaaataagtttttttaaaaggtagygatgtygaaggtgttttttttagttyggygtttataygtttttaattggagtttttygttatggtttattyggggtygtygtatygagttggttttygtataggtttagagggagygagggaagggagggaaggaaggggygttttggygggttygggattaggttatygtygygttgttgttygtgttttttaggttygygygtttyggtagttagtagtttataggtagtagattagatggggattattygtyggaygtaaggtygattatttagtttygygtygtttatttyggtygaggaaggaagtgattygygygttgygaatattygygygttygttygggtggggygggggttggttgtaggygatgttggttygyggyggttgaggtttttggtyggagttgtttattatggtttggygttaggggygtaggyggggtttttaggttttttggggttatttygygaggtagtygagggygtaattygggygtttggggtyggaggyggaattaggggtyggggttaggaggtaggtgtaggyggttgttaattygtttaatttgttgygygggtggtygtttagagtygygggtttgyggggygtttttygtygtygygtygtygtttttttaggttygggagggggygtttagggtggagttttatttatgggttgaggttttgggygygyggagtygtygtygttttttyggttggtttagttggagtgttagtttygtaggaaattyggggttygggygagagttatygagatggtaggtgggaygtagagttygyggtagttagagtttttttygtayggttygtygatttayggaagagygaaagagygtttaggtggggtygagttgggggtygggtttttggagygttgggaagtatagygyg

SEQ ID NO: 6004 - DNA, 873 bp, Artificial Sequence
  Description of Artificial Sequence: Synthetic polynucleotide
tyggagagttgttatygatttttttaaygttttaagttttagttttgtygttygygtttttttttttttttgggttataattttggttttttygggtyggttttaygtagttgygtaggagttygygggggaagatttttygtggggatttygagtaygaygtgygattttaaatttttatattttttttgtygtttygtaggttatatgtatygggagtygggyggggtaggygyggttygtaaggattttygygatggagaygtaatattgtygygattgtatttggggtagtttygtygygttttagtygtttttyggtaggaagygtaggtgtgtgagtygattyggagygagtygygttttygggttagygtgggtagggygtygtagtttgygtagtttygaggatttygygtygttttttygagttagggtttttaggagygggtygygtaggagaygttagagggggttgttagyggttgttgggagaaygggttayggaaatagttttttttaaagtyggggttatygtggggtgggygagttygtttttttaggtygggggygyggattagaggggaygtgtgtagayggtygyggttagttttatttygttygggyggagaygtatagttggagttggagggtygtygttygttgggtttttaggggtttgaaygtttaggggtygyggygagtttattyggagygagttaggtgagtaggtygttatggygatgyggtttyggagagygtaygtttgtygyggtyggtatggaaaygttttygttaggttygggggygtygttgattggtygatttaatagaygygggtgggtagtttagtygtatygttaagttyggtyg

SEQ ID NO: 6005 - DNA, 2174 bp, Artificial Sequence; identical to SEQ ID NO: 6003
  Description of Artificial Sequence: Synthetic polynucleotide

SEQ ID NO: 6006 - DNA, 510 bp, Artificial Sequence
  Description of Artificial Sequence: Synthetic polynucleotide
gygggtatttygtaygttaygtaggygttttttygatgagtttttttttattttatagtttagggaaggtgyggggttgygggygtagagttgtataagtagggttgtaggttgggttaaagtygttttgyggggatygatatgaattygggttttttatyggaagggattaaggattgagggttgagyggyggtagyggagatttygttygtagatttygtttygtygtygttatttttygtyggttyggatgaggtttttttagttttgggaygttttgtttttatatttattatttttttattttaggggtgtagyggagttttagttaygaattatttaatattygtaggttatagagygayggaggttgaggttgtgatygaattatygaygtttttttgaggggtgaaagtayggtygtggagattttaatygagtttaygttggygtaaaaggtaaaagtygygttagatttyggatgtygttttttttttttyggttgygyg

SEQ ID NO: 6007 - DNA, 511 bp, Artificial Sequence
  Description of Artificial Sequence: Synthetic polynucleotide
tyggagtttggggtygggttttttttatttgygtgttgttttygggtttygtttygtttygtttyggagggatttttaggtygggtttagatttaggagttatttggggatttyggggtggttgygygtygagggggygttagyggggaygtgagttggygtygagatagtttyggttttttagygttagggttattgttaggagattttyggttagtatttaygtggggygttttygggagttygaggggtttatygtttgtygggattygttattttaaagyggygggtgtygtygagtygttggagttttyggattttaggttygtttygtygtygagtatgtttagtgygagtygtygtygaaagttttttggaataaatattygtatttggggtttggygggttaggaggtgtyggaygggygtgggagggggagagygagttggygyggtttaggygttyggyggttaggtttgggtttgtttgygtttaaatygaattagagyg

SEQ ID NO: 6008 - DNA, 417 bp, Artificial Sequence
  Description of Artificial Sequence: Synthetic polynucleotide
tygygtygtygttttggyggggayggtgtagtaggyggygggatgyggyggggyggtagtttgagygtttyggatggttygyggyggggyggtttgtaagagygaygygyggttgttgttggggygggaygygttgyggtyggygttygttttgttggttttygtygtgttgttgggygtygygttyggtttyggtttyggtttttggtttggttgtygygygggtygttagygtaygygatattaggtgggtyggtygagtagatagyggyggggyggggagygyggggygygtggtttttgggttttgygggttyggagtttyggttttgygattttttgagtttggttgggaatttygtaygtaatygtttaggygtygggttttttttttgttttaggagggaggtggyggyg

SEQ ID NO: 6009 - DNA, 1748 bp, Artificial Sequence
  Description of Artificial Sequence: Synthetic polynucleotide
ayggaaatattygaatyggtgaaatgtaaatygtgtttattgtataagggaatygtgtagggagagtygttttttataaggagttaattagygtttgtttyggatattttygyggggtttttagyggggtttaaattggyggyggtttagtagggggygaggggtgttgggaaaygtyggggttgygaatttayggaagaaaatgtattyggtgtagttgttttagattttgtygtygyggtattggttgaygaaggyggyggtgttygaggagttataygttattatgtggaagtyggtttyggataggygattaaaggtttgttttaagtaggtgaatttgaggtagaagygggaygtgtattttttyggttgtyggtyggggtygyggttttygttgagygtgttttygaagatttttttggttagygygatgygttygtatattatgatgygygttataygtyggaatttggygtyggtttggttgtygygtayggtggtgtaggagtttyggtagtttagygtgaggaagttygagygtttgttttgygygtygtygtygtygttattatygtgygttttygggttygagggtayggyggtygtygtttygygtagtagtagygygtygttgttattttgygagaygttgttttttaggtygttttggtagttttygtygttgagagagttttgtttggtgattttgggygatagtagtttgattaagtyggtgagttggaaatattyggtttygygtagtagtygttttttttyggggaagtgtttyggtagygygagttgtttgtttygtagataatttagtaygtatttgaaaaggaagtygtttyggtygatgaagaagygygttyggttgtttttgggtagttygtttyggygtygggygtygttayggggattagagggygagaatatgttggttaaagtattgttygggaygttgagtagygtygagtgtttggttatataaatttggtygtttaygtttagttttattattttagggaagggygagggtgygtagggtttyggggyggyggyggtygaygygtygggygagttggaygaggaaattatttygttaatgggtaggatggtgttgtygtygttgttygtgttttttagagttatagttttttygtygtyggtttagtgattygagagagttgtattttttygttttyggagttygygttttagtttttygygtgtttttggygttttgygttttyggattgggyggygygttttttygatyggggyggtttygtttagggttyggggtagyggyggygtyggyggygttygagttttatyggaggagagaygygygagagaggagtttygtyggtgyggyggyggtaatggagaggtaagaaggagttgttgtttttttggggygagggyggggaagtgtgagagagatttgygagaggttttagggttgttgttyggtttttygtggggagggygggaggaggggtygaagtaaagaaaattygtygtttyggtagtttgtaagygtgtygygaggtyggagygtygayggtggygttaattatttttggtagtaygggaggaggtattgaygttaagtttyggattgggattygagttttagttgttatttaaagagataggttgtagtygyggttttygggtttygaygttagggggyggggtygagagtygagtttgtaagaggtgtagtttttygattygyg

SEQ ID NO: 6010 - DNA, 1748 bp, Artificial Sequence; identical to SEQ ID NO: 6009
  Description of Artificial Sequence: Synthetic polynucleotide

SEQ ID NO: 6011 - DNA, 648 bp, Artificial Sequence
  Description of Artificial Sequence: Synthetic polynucleotide
aygaaaygttgttatatygagygaatgtaaygygtatataygtttatattygaatagtataagtaagagatyggttgggtgtggaatagaggygtatatygygtaaygtatttatagtatgtataygygygtatttygatttygttttttttygygygtttttatatttyggygtttaagattttyggtttaygaattttattagatagtygggtaattttttaggtgygtagtttgttatttyggygyggtygtttttgygttttagygtttttttttaygtygttttttttagtygtttgyggygtyggagtttagygtaggttagtttagttagtttygtygtgtatayggtgygtagygtgggttyggggttgtyggtttagtygtttyggttaygtgtgagtygggggygygggttagygygatgygggtaggagttgyggyggygtyggtgttgtygtttggtttygyggygggggtyggtgtagaggagataygtagggagggagggaagagaggagggaaggaggagggagggggttagtyggggttattgtttggatagttgggygtyggtttttttaaaggtggggttattygygttygtaygtatattagttygaatttttattttygatatagtyg

SEQ ID NO: 6012 - DNA, 863 bp, Artificial Sequence
  Description of Artificial Sequence: Synthetic polynucleotide
gygtataggaagggyggaggyggtattygggggggattgtttttagaggaggtygttgtgagtyggygaygygaggttgggggagtgggaggtaaattygttaatttgtygtygaatggttatttttagtttttygtttaygagggtggaaaggtagaaggtttgaaggtaaggygtgagggagygtttaggaygttttyggaggggtygggtyggggtttgygttgtagttygtaygtattttattttygygtygyggygttyggtygttygtttttttttttgggttttttttggtygtygtygtttttttttttttagtttttttttttttttttttttttggtttttygtttttatygttgatttgttagygtttttgttygtttttttttyggygttygttgttttttttgtagygtgtttttygtttttatttyggatggggatggggtagggggygyggggtgagttattaattttagtygtttgtttggtygygtaaggygggaaagtgggggygtttttgygttttaygttaagtttagggttaygagtatttttgtggagatygggagyggttgggttagggatgatgttttttttttttttttttttttttttttttttgttttygttttttttttgggttttttyggggattattttttatttttygttagagtygttttgggagagtygagggtttgagggtygattattaagggtagagtttattttttggggagttgttggaggagataggtagygtygggaggtggtttatatygtatygtygagagygttttgttttygtatygttgaaatttaattayggttataggttataaygttaggggtyg

SEQ ID NO: 6013 - DNA, 1288 bp, Artificial Sequence
  Description of Artificial Sequence: Synthetic polynucleotide
gyggattygagagyggygattttygtttggaggtygttggtttttatatttaggtataggtaagatattayggttattattgataggagggtygttaggayggtataygggggtatggttygggtataatgttgttyggtaggggtygggttttyggatttgggttttyggtttttttttttttttgygtgtttttttagtagtatygtggyggggtyggtygtttyggtttygttttttattttttatattttaaataattttaaaaggaaagaaaaaggtygatttttttaaagtttagtttttgtggttgtataattagttggtggagttaagtttaygagyggatayggatttttgttttgtttagygtttagattygtaggygtgtattattttygtttttttttttttttttagttggaagtgaaaagtatttttygttyggggattgggtggyggtggggtaaaaagtaagaygaaatttatttagatagttttttygatttttagaggatygatatttttttygagggttttaatagtggtygtttagggttygagggtaayggtygaggygttaygyggggtygyggttygttttggttayggaggatyggatttgttgygtttttgtgagtttgttttatttttatttattyggtgtttttyggtaygtygatttgttttttatttgtatttagtttaaggtaaaaaggttgtgagagtaygttatagygtagygygaaaggggygattaaggtggagaagagagaggaaaaygaaataaatttaaggaattaatgttattygygaagtygaagtygyggttgttygaaggattttygtagtttygygtgygygatttttaaatatttttygygatgttygygtgagtgtgtgtgtgagtgtgtgagtgygygygygtttygagtaygaygtttttttttygattttttttyggygttyggygttyggtttgtygttttygttgttgygygtttttttttygaaggtaaagtaggagttygttttattattataatgtatttattttggtttagttygygggtyggttyggggaatttttaagggaggygggaagtttgggtgggagyggggtaggaggtttgttattagtataatgtatgtaaatagttggagyggttatygtgattggagaggagtttggygatttttttttttgygyggagtaattttagtattttygagggttatttttttggtttgggtyggggtygaagyggggtyggttgygtaagaggyg

SEQ ID NO: 6014 - DNA, 1275 bp, Artificial Sequence
  Description of Artificial Sequence: Synthetic polynucleotide
aygyggagtaaaatttaatyggtttagggaatttagataygtttttygygtygtayggattttttagaaggagtttggaggtaggygttggatttttttaggtattttygttttygtyggtttttttttttygygttygttgggttatttattygygtggggtatggtgatggtttygttggtgttggagtttaygttgaagatgattayggttgaggygttttgtaggaaygygtttyggattttatttttgtaygtgtagttgtttttggggatgagggttatttagtttttgtygygggtyggggyggygaatttggtgttggggtygtaggttaggyggtygtgggtygagttggttatgattattttttygygggygttttgtttgggygagtgtttttygtagygttygtatttygtttttttygtgtgtagtttygygtygtygtygttygtygtttyggtttyggggttyggygygggttyggygtaggtgatgtttaygaaggyggtgtattatttttttttttyggttayggtaaagtttaggtagagtagatgtaygaaataaaaggaaagtagttatgttgagagagttagattgtagtaygtttggatgagagatattgttatttttattygtyggggtttttttttygttttygygtttttttttygtttygttttttttttttagtttyggttaatttygggtygttgtttttttttttgttgttgtttattttygggtyggaggggtygyggtygggaygygtagtygtygyggggatyggatttygggygagyggatggygttggttttttttttttttagttgtagygyggtggttgtattttgttttttgggygttyggggggygygggaatagagggttygyggggtttgyggaggagttttgttgtygagygttttgttttttygttyggtttygtttttttttataagggtggtygggggtttaygaatttgtagggtggyggttttgygttttttagtttyggyggggaygggtaygattgttygtagtttggggtgttgyggtgyggggtgttgtttagggtgtttyggtygtygttattgagygttggggygygygaatttagttgtagtygttgttgttttgygtyggtttttttaggttgygggygttgygtttttgatttygtyggtggttgygtttgggtaygtatttgtygygggyggggygggtttggggatagtgggagygagtaggtagagyggagtaagyg

SEQ ID NO: 6015 - DNA, 1071 bp, Artificial Sequence
  Description of Artificial Sequence: Synthetic polynucleotide
gygagyggtggttygatttygggtgtggtaggaaggggtgtttygygttttagagttagtgttagtttttattttttygggaagtygagatttagggggaataggttttttagagtttagtttgtagggaygyggagggtaggagtygtyggygaggagtagttaatttgttatttttggyggttgtatttttyggyggttataggttgttygatagyggattttagggttttygygayggtatttagagtgtttagaagggaggtyggggtyggggtgggtygggaaaatygagggagggaaggagtttggagaagtttygtttaggyggggagggggygattyggggygtatttttygattatgatttttatagattttggygtygtaatttgygttttttgaggtygaagatgygtattttggagaagatatttattaggttgtygttgtagagttygyggtttttgttggggttgtttygttttttgttggtagayggtyggttttagtgttgttttygygtttgtygtttttggyggattaagtygttagygatggtygyggttatggtggtttygggaaygggttyggggagggagggygygggaggayggygagtygggggtatyggaggggaaggyggyggygtagatygtggttygttttyggggtagaggagggggtgttaggygggattggggagaggggaaggggggtttagttttgatygggatttatygtttttttygyggggygyggggttaggygygtagatgygtttagggygtagtyggaygatttygggaagtyggaygtygtggtygtygtygtttggttaygttygagtggagagygggatygyggttgygggygttgttggttatygttygtygtaggaatttyggygggggtygttatygttattygygttgttttttygttttgttyggttttygggygggaggtagagtyggtyggyggtttttygggygtyggttggagggygggtttyggtagggtttttgygygttygtyggttygggtygygttgggtaggatttagygtyg

SEQ ID NO: 6016 - DNA, 694 bp, Artificial Sequence
  Description of Artificial Sequence: Synthetic polynucleotide
aygttttygaatttyggattttagttgttattttatttgygtygtttyggaygttatttggttgttgaygtggtttygagttagtaaataaygttagtagtttttttagatttaygtyggttygttttttygtyggtttttttttygtagtggttttttttgtagtttttttgggtttygyggttagtagtgtagttygtggagtygyggttttgttygttttttttgggtggttttagtgygygggttgatatttatttagtyggggaaggtgaggygagtagaggttggtgyggaatttgtygtttttagtagygtyggygggttaagtttagggtygggtagataaaagaggtygttygygtaggaaggtayggtyggyggyggyggagygtagygatggtygggygagggggtagygygttgttggttttgtgyggggtattggttgtttgygggtggtttttgggygtygaagtttaggagttyggggygttygyggygggtatgaggyggygtyggyggttgtagtaagaggayggtatttttttygagtattatygttatttygagttgygygaggygttygtgttygtgtggttgtagtgtatygttattagtaggatttatayggtggggygtagtttygagggtygggagtttttggttatygagttgttygataattttggyg

SEQ ID NO: 6017 - DNA, 694 bp, Artificial Sequence; identical to SEQ ID NO: 6016
  Description of Artificial Sequence: Synthetic polynucleotide

SEQ ID NO: 6018 - DNA, 1424 bp, Artificial Sequence
  Description of Artificial Sequence: Synthetic polynucleotide
tyggygggtaygttggggatgtattygygtagttyggygaaggygttgttgatgttttgagttttgygtygttttttgyggttggyggtgtttyggygttttatygggygyggtttttttaggttygggggttyggygttyggyggtattttttygtaatgggagtggtttaggtyggyggygtygttggtatattyggggttgtaggatagggttatgttgtagtyggggggygatatttyggggtggtygatgagttagttatggaagtaggggttttttttatggttgtagyggttggyggyggyggyggtagttgyggyggyggyggyggtaaaygggtagttttygtggtgtattatygggtggtggggaaaattatttattagatttatttygtttttygygtttttttaygygttttagygtgygygtagtttygtygygttttyggttygggtttttgttttagygttyggygtttttttttattttttattttttagttttygggygttygggttygttyggtagtygtagagggggttgttgtagttygggtttygttttttygtttggttagtygggttygttttagtagygttgyggtygtyggttttttatggggygyggygagttggttttggtatygtgygtttttggtygtygtygtygtygttttyggttttygttttgttttayggttygygtttyggtttttgtttttygggttgttgygyggaggtagaattttttygtgtttatataaaggtgtyggggttttygygaggttggtaygyggagtttygggaatttaagttygggtygyggttttggtatygaagttaattyggaatttaggggygagtttgagtygyggttggaggagtyggtttagttgtgtyggggggyggyggggtygattgtttattgtaaagttattttygtgygattttttttttttygtttttttttttttttttattagttygatttgggtttttgggygtttattgttttaatgaaatttttggttgttgttgttttggtttttaaatgtgattttagttgygagtaaygtgttttygtttttttygygttttttyggagggtttttagagaggttttagtgtatttatttttttagatttttttttttyggggtaaggatttggggttttgaatgagttttggagttygaagatygyggttygggttttyggagggttttgygyggtggtygaggaagtttyggggtgayggyggtggtttttttgggttggaygaygtgaggggagtaagyggatttttttagtaagatttttatgtatagttatatttttagggtygttygggttaatatatgtygttagaggttttttaygttaatttyggggyggtaggggyggygtttygagttttyg

SEQ ID NO: 6019 - DNA, 1215 bp, Artificial Sequence
  Description of Artificial Sequence: Synthetic polynucleotide
tygygtaggttttygggttygtygtagattttaaygtaaattttygggtttttygtaaattttaaygtagatttatygtggtttygttygygtygggtttygygttygagaggtygagttyggattygaaggyggyggyggyggygggygtttygygaggattygggagtagygtagyggygagtagagaataygttatagagaagaagtttagtaagtgtatggtggaaggatygggggtgggggatyggttygttggygggggtaggggtgggggygygggygtttttgygaggtygygggttttttttggtttttttttttygggtttttttyggygattttttttgggygagtyggaggyggygggagygggttyggggtttygygtttttaattttgtagggygtttttttagttagtgtyggggaaaggyggygggtgttaggtaaaagttttataggaaatyggatattygagtttttygtattyggagttygygaggtgaagygagggygagggaggaygtygtygyggttygygtyggtgtagttttttggagaggyggggygggggatattagaatatttygygatgtttagtttttttaaattygttagagttttygtttttttttttttttttttttttygaagtgagaggagtygggtygygggygttgyggygggggygttggyggyggtgtygggggygggaggagggyggyggggyggttggyggyggyggggttygggagygtygyggygtaggattttttagagygygtygggttgagyggyggyggyggyggyggygggygtaggggtagggtatgattgaygygttttttgtttgygtttatgtgagagaaagyggtygagggagggagygtgtygagttygggttgttttttttttttattttttttyggaagtygtttttttggagtttttygtttttttygtttttttttyggyggttttatttttttyggtttttttttggattttttttttttygtttttgttttttgyggggagygggyggtyggaggggtaagtttagtttyggggttggyggttggygggatyggttttagaggtgatgygattattttggattaygtgtagyggggagaaattgggtatygtggggtggagggagttttygttttattttyggttattttygagtttttgttttttttttygtayg

SEQ ID NO: 6020 - DNA, 1184 bp, Artificial Sequence
  Description of Artificial Sequence: Synthetic polynucleotide
tygtttttttttttygggtygygatattgattygttaaygttaatgggggttygygattgttgyggggaygagggygtagagtagttttygttaygggtyggtttaygtaggggtygagaaagtggyggagaggyggtggtygaggtttaggggygagygygggttgagttggtttttgttgygtttaygagygatatttattttttygttgyggaygtttygygggygttaggttgggggttttgygatygatttttttygttttygaggtatygtygggttygtttggtaggtagygygtttygygagttggagggtygagtttygyggggtygtggggygtgtgggtgaaggygatatttyggatgygggaygtatgaatggtggtagagtaggggtygggattygtttatgggttgggagagagatgtttttgtgagtaygggaaagtagygttgtyggagaatagttttgaggygggattaaaagtygtyggygaagtttygtygaggaatayggtygttgttyggggyggttygygagygtgygtgtgtggaggggaggatgtygtttygyggggttttyggagggtgtygggagygggtttttagtgtagttttttygttttygttgggggtayggttgtttataggtttyggttygygtgtgtggagyggggygagggggtgaggygagggggtgaggyggyggtygagtyggggygttgggygyggggttggygggaggyggyggtggyggttyggygygaaggggttaagyggygtatygttttttyggyggtygggtgtaaatagaggagttttagtttattatgtttggtygtygygygtagttygagttyggagttaggygttgtaataygataygttttagatttaggtaatttggtagygttgggttyggttttttayggttatagygagggygygtygyggtaaggtgggtgagyggyggyggyggyggyggtttggggygggttggyggagygyggttttyggtgaggtttttygygyggtagggtygttygttygtttyggggattgyggyggtggyggtggyggtggtggyggyggyggyggyggyggtttygttttttttttttgtggtgtyggaatgggaggaggttyggygygggtttgaatyggtgyggaggtaatattyg

SEQ ID NO: 6021 - DNA, 5820 bp, Artificial Sequence
  Description of Artificial Sequence: Synthetic polynucleotide
gygagtagaaggyggaygttttygagtygtaggttaygtagttgttatagttttgygattygttatagggatttttatagaygtttagygtygyggtygagttgagttygtggygygyggtggttagtagtyggttttygtagatygggtagtagatyggygtttgggtygaggyggygggttyggagttygttagygtgyggttttyggattygtagtaygtgtttagggagttggtggttattaagaattgtagagagaggtygygaggattggygggaagtygggttggaggttggggttttgggttttgttaatttygygygtygtttaygagggygtgtttygagtattttygggtttttygtygtttatattaggatgttygtttttttttattagtttgtgygygtttggtttttttygttaygtggggtttagtygagtatttatattttttttyggagggtttttaaggtttttgaygttatttgygygttaagtttttttttttaggggttttttggggttttaggatttttttggggtatagtttgagttttgtggtttaaatattagggaattygggttyggttygtyggatttttttagygtttyggttttttttygggggtttggggagtaggggttgggygtgaggggygygygatttaggttttgttagttyggaagtygtaggtagtygtaggtyggatattttttatttttygttttygttttattygttttatyggtatttgyggtggtttgggyggggyggggtttygtttatttggggagtygaggagtaggggtatttaaattgygggtaggatatggygggygyggttyggggyggaygggyggggtttgtagggttttgygygttggggtyggygtggygyggttattgtttyggagttgtaggtttttaggygttgggagggygaagtaggagagtyggttagtttattttygygtttygtaaatttttttaatygggtaataaagtgagtagyggtggtygtygygatttttttaatttygtatttyggaggttygagggggttttgggatygagyggtttygtagyggygatagaaatatatattttaygaaaaagaaaaaaaaaaaaaygagtygygygaattygttaagttagatgtgygyggtttgaagyggaggaggttttgaygttagttttatttygygtagttyggtttggtygtagattygtyggttattygtyggyggtttaggtygggaggggttaggatagtttyggtygygyggtggayggaggggttattttttygggygttagtaaataaattttattygagttaatatygtttagygaayggtgtttttttttagttattygagaaygagaggtatttttaattagaaattaattaatgagtagttgttttttttygttttattgtaattattygttttaattataaatgagatttatgaaaggataygttgaagatgtaattaatagttaaaattagttyggygttgygtaggyggtyggttyggtttygygttggygygttttgtttygagtggtaggaaggggttygtaggygtttygtaygygtttygttattattgtttaatygagaattagtaaygtttttygtyggtttttattttaygtyggaatggatttttagaatttattgyggtygtaagatagttygtaagagttggttaaaatgtttttaggtgygtgggggtttyggggttttagttggagttygatattttgagattggyggttygagggttgtagggtygtttygggygtgygtttatyggttttgtatttttgggtagtygagtgtygyggagaaygttttattttttttatygyggttttttaagttttygtttagtttatygtttttatttygttttttygattttttttttygatttttttttygtyggtygtgtttygtyggtttttttttgtttttygyggttaagtyggggattgtygggyggttttgygygttyggaagagtaggttttttaatttaggtttyggtttttttygttaagttygtttttttyggygtttygtagggttggttgygagggagggggygttgggtgtttggyggaggygtttttttttgtttattttgtttagttttttgtttggggygtayggagtaatyggaagaggggatygagygtttattttaggattttttyggttagtattttttttgggattttgtttaagtttaaagyggaggttagtgagtaggyggtaagggggyggtaagggggygttygggttatttygaattygtttttygttttttgygttatygtttttygggatygggattygtttyggttgttttygttttttgggtyggtttttygtggtaagttgggaaggaagtygtgtaaggtagygttgtgtagatttgtttagaaagatttttgggtttagatttgtgaatygttttagggttattttttaattaatgatgaygttttygttttttttttagttgtaagtttgttttttagaaaygaaatttgtttgtttttttgatagttyggttgaaggtgattgatgattatttggagattatagtatatattatataatatttgttgygtaattgttttaatttatagatgaaaataygagtttttygatygygttggatyggagygggttaygttygagttgtttgtagagggaaattatyggaaataatgaatagtygttttatgtaaattatttagatagtttagygtyggtagtygygagaaatatataaagaataygagttaaatgatattaataattgtttttgaattttgtattgatttygyggtaggtygygttttttttttttttatttgaatygttaatattatttttttgtaaataataagaaattagttatyggggtttttygttagaaatgaattttttaatttttttttttttttttttgtttttttttttttttatttttttttttttttttttttatttttttttttttttattttttgtagttttttggtttttttygagtatttttttattttttattatttattgtttataaattattygttttttttaggtaatgaggttyggttgaaggaggggtgtgagtttagtygggttaagggttgggatggggagtagagatttttagaggggaggtatttagttgtggtttgttttttttttatttatattyggggatttggtttyggygattgtgagtatttygtyggttgagggggagagttagggtttaggggtttagttatttatgttttgtatttttgggttttagtgtaatagtttagtttatttagatttgaggttggtgtatttttttttttttagattyggyggggtttaattggagtygaagttttagaataggyggttatttattttttgagtagagtttgggagaagtagtttttattttttagggtagttagtaygtgggggttttttygggggttttttttgattattatygttatttttttttgtttttttttgtttttttagtttgtgtgtataaatygaygttttagtttttattagygggygatttttttttygtgatttagaaatttggtttttgaatyggtttttttaggtygtygtatatataygttttattttttgttygttagtaggttttagygtttggggttygggtttagttatagttattttgtttygggaagttygtaattgtttaggaggttttttgattygttyggttttatttaggttttattatttattttaggatatagggttaatttagtttgtggattggygattatygggatattttattgaaattttgtagtttggtttaggttygtttgtttaaatyggggatttttattgggttattttttttttatagataatattggaatattttttaagtgtttttattaaaaggttaagtttggagyggaggtatttagtgttttttttattaaygataggaygtttagtattttaggtattagttgaaygygtttgtatagattyggagtgttgagtttttttttttttagggattttyggtattaaatatattygtgagtaggtgggttagaagttagtyggttttyggagtatatagtatyggtttagtttyggggagatgaggtgttttygttggtttggagygtttygaagagyggaggattagggtyggagtaggtygtaggggaggtaggggatggttagtttttaaygygaagygtaggygggtygtttattttgayggggttatygttggtygtyggaattatggaaggttttyggggagataggtygggttttgattttttttyggttagtttagttttggtgttttaggagttattttgggggttattagtttttygtattaagagttygttyggagggagttttttttagtttagagaagttaattttagttaaaggygaagtygggagttyggggtattaggtaagggtttttttttttgagatttggggttagagattttgggggygtttgtgttygtttatygttygggatattyggttggggtgtgggtttgagaggttttayggtygttgaygtygtattggygaatttygaggttggtaggttatttttttatagtttygaggttttttyggagttagtggtaggagaaggagttatagggataagyggtgaatttttggatttttaatygttttttatgggggttygyggtttttttttttttttttttygttgygttttygtygtttgttttttgggtayggtttgaggttggayggagygtygttygggygtttaggatttaggtttggttatttygagttttttatttttygtttygygtyggttygygtattttgtttttygtaatttgtagtaaaygtagyggtttttggagagtttagygaygggtagtaaattttgtttttttaagygtaagagtaattttygtaaagtttgtgyggyggagtttattttttatttgagttggggaagttttygttygygtygtgtggttgtyggggtygyggggagtagttygtagttygggaygtatyggggagtygtygtagtygtygtygttygtttttttyggyggtygygyggagttttygttttttyggaaggggggaggggtttyggaatttyggggygggggygggagygggggattttatttatttgyggtggygttgggtygttttyggtagttygygagggtttygygyggaagttyggygygygygttttagyggggagtyggygataattaatggagatatttttaggyggagtatttggygagyggagygygtyggygtttttaggygtygyggtygttagtygagttygtatyggygtgaygtgggygagygagygygttgtttttattyggtygtttattaaygttttttttygygggygtygygtttttgttaattttttttttygttyggtttgygygyggygygtygggtgtaggagttggggtgagggygtttygggtgttagtaggggygttgggagttgtttgggyggggaygtagggtttygggaggttatatagttttaataggatagtgggaaggygygygagttagatttggttaaaygttaagttygttgyggtttygggttttyggtttayggggttttttttttygtttgggttgttttatttagggaygtttgggtygggygygaagagttyggaaatagttatttttgtygtyggttyggttttttttyg

SEQ ID NO: 6022 - DNA, 1233 bp, Artificial Sequence
  Description of Artificial Sequence: Synthetic polynucleotide
tygygttgggttgygtttttgtaggagttaggtttttttatgttttgyggygatagtygttggggtggggttayggggaagtygygttgtttttygtttgagygtgggttagggtttaggtggtgattaaggttyggygtagtggtttyggagygtggaggggtagttgttgggyggtttttygggggagggtgayggttttattygttaaygttgttttttttttgggattaggtyggaggaattttggatygttygaggttggtgtttagttttttttttttattttatttttattattyggygattttygtagatttgattggtaggttttgtttygatttttatttttttaggttttygtttyggtgtttyggtgttyggtttygggttatttttgtaggttttgtttagggtagtyggyggtgtttggaggygggttygtttyggttgttttaygtttaggtyggtttttggtattttagttagtgggagggygttttygtygttttygtgttttttygtaggggttgygtygygttttygggttttttttttygtygtggtttggtttgtttgttttagggygtagttgygttygttttagygtttttygggtttgygtggtttgttyggtttagaggtttttattayggttygttttttgtyggaygtygygttgttgtggtygyggtggttttgtggttgtgagggtygtttttgttygtttatatygttttttttttgtaggtgaggaatggggtttgtttygtttggaatgtgtttttgtygggttttgtttgatttttattttttagtygggaygygygagttttttygtttggttgagttaaaaagggatygygygtatttygtygttttttattaygaagygtagatataggaggttgtagggttagtgttgyggagaattttagayggttttatagtygtygttattygyggggtattygttygggttttgtygaggatgtgggggttttggttttygtagagttgggattttygaaggttttattagaaatttaggagtagttttagttttgtagagttygygagggtggagaygggagattygttgtggggtttgaggttgagatgtyggtttgyggtgaagtyggygggaygttttaattygtttagattygtttatttygtagggttygggtttatttttyggtttgtggtttgtgttgggttgygtagtyggyg

SEQ ID NO: 6023 - DNA, 2865 bp, Artificial Sequence
  Description of Artificial Sequence: Synthetic polynucleotide
gygagttttagttygttgttygtttagagtygtttaggtgygagggygtttttattagaaatyggtgttttygygygttttatttttyggggttttgtagatgtygggtygggggtygttagtaggttttttggtttttgttggagatattggaagattaggygattaggatagygggtygggttagtgyggtgtgataygagggttygagyggtttygtagtttaaaygtgtttttattttatattttttayggttgtttyggattyggtgttttygtgttttttagtttgtttagyggtaygtgggttttaagtttggtttttagyggttgygttagtttagttgtgtttattttggggtygygagggttttttatyggttggtagttggtggataygttgttaagatygggggaaaaaaaggaaggaaggaggttagggggatatagggttggtggttttygtagtttttgatttgygaygggygygagygtattttygygtttttgygtagagatttttttttaagattggtttaygaygttttttatttygaagttaagggttttttgtggtaaatttttataygtttttttttttttygtttattttyggygttaggattgayggggagagggtaaggtygggttagaggggttgtgggtttggattgyggttgtygttygyggttttgtttttttgggtagttagaygtggggttagygtttagtygtagttttygggggtgagttygtagattttygtaygtgatataggttaggtatggggayggggagtttttygtygttygtttttatttagatgttttttgaggtttyggaatatttygttttttattttaggatttgattaatttttaagttayggtyggtttyggtttygygagaygggggattttgaggattgttttttttttygggttgggatttttttatagtagtygatygtttttagtttagagtggttyggttygtagygtttttygggtataggttttaggtggayggtttygttttygygttyggtttttttgttygttaagygtttyggggatttttyggtttttaagyggtygyggtygggtggagttagtttygaagttygggatttttygaagggagaaaattygttttgtttttttgaagyggygggagaaatyggttttatttaggttygggggttygaygttttyggyggaggtyggttttaggggttygaggttttygaagttggaggtyggtttygtttyggygttttttygtygttattttygtttttatttygygggtyggyggagggaggggyggggtygtttgtygttygygattygggttyggtttttttagtgattgtttttgtttttttygygttagttgtttttagttttggggtaaygttgttaggtgtttagttttygygttygagagagygtttgtttggttttgaattttggttaggaaggggygygaggggaaggtttygggggaaggygtgttttygygtttygtttygtttygtttyggaaagttttygyggtttygtttattttaggggttygtttagttttyggagatttttttttttgagygtagtygtttggtgtyggttttygtygagttggagygygygggttayggtttttttggggaygtagaagygagaagyggggatttyggygygygtttygygtttygttttttttgttygygtttyggttttyggttygygtttyggtygtyggtatggtgttgttggtygggatygggtyggagggyggyggggygygttgtatgattttattatygtygtttttatttyggggygygtaggtygaggaggatttygttgattaygaagagtttgaggatttttygagtttgttagatattygtagtatygtttyggaygattttttttattttttygaggaygaggaggagtayggygtygagagygyggagagygtttyggagggygtttyggaaagygtttyggagayggygatttttttgygygtygtttgygttaataaygtggggttgttgyggaygttggtgyggygyggggtgagygtygaggaggygtaggagattgatygtaayggtagggtaagygggygttttygtaggatttgagtttttttattgtttttattttttttttttttattatattttygygttttttagtttttggtttyggatyggtttttyggttatttagtygtygtttagagygtttttttttygttgtttgggagygyggtgttttgggtggttttttygttttaggttgggggaygyggtgyggggagggagtagtygaggtgttagygyggtagaaaygttagttyggygtttttatygtatttttttttygtttatyggttttygtggattttttgattgaattygygttggttgttygtgttgtaatttaggatgggttttttgyggttyggtttttttttgattattatttttttttaggtttttggtaggggattatttttttttttttgtaggagatagttttttttgtttagygttttatttggtttttgggtttttygygtygtttttgttttaataygttggggygtagatyggtttttttagtygtaatgatttggaagtaatagttttttttttygtygggatagtttggttttttattttattttygttgagttttgtggttygygtygygattagttaaygtgatttttgattggtttgttygtaggttattttygygagttaatgttagtyggggttttttagagttagggtatagggagagttttagagtygygggtatttattygggtagggtaggaggyg

SEQ ID NO: 6024 - DNA, 1154 bp, Artificial Sequence
  Description of Artificial Sequence: Synthetic polynucleotide
tygttttttttygtatattagggaygttatgaatgtatygagtatgtttttagggtggyggggagtagtattgtyggtgttgttttaaataygttttttttyggggagatgggtggtagggagggggagtaygtagggtagttatttggtaatygttttaagaaaggtattaatttyggatttttttttaggtatagyggttttygagggggatttggygygatygyggtttttttygaggtaggtagaaatttygtagtagtygtygtygtygtttgtyggtygggagtttaggattatttttattagyggtaagaggaggaggayggygtygggaggaggttgygttyggtttyggtygtttagtttygtaatttatttaaaggygyggygttyggyggttttttygtaaatatgtatttttygtyggygatagttttttagttygggaagaggygtgygyggygtygttyggttttagggtaaggttttgattttgtttaattgtagtatttttygtttttgttgtttgagygyggtygygggataagggatgttggygggyggtaggggygagygtygygggygagaggyggttttygaygygagtgygtagygttyggttyggyggttttttygagttyggygagygtagygttttttgtttggtttygygggttttaygggtttttgygggtttttyggggtttygggygtygtygttagtyggtygggttgagagagtagtygtygygttygtagtttygtttagtyggttgtygtygygggygygagtttggggtygtygyggygttyggygtygagygttttygagttgygtttygygygyggttygygttatttgtgtygtygtygttttagtygtygagggygaggtttttttygyggygygyggtagttttagtttttatttaaatttyggyggtyggttygggygttyggttagtgagggagygttygtttygtygtygaaatyggtttygggtgyggagtatgtttagtgtygtygygagagyggygtttygtygygygygttttattttttttggttttygyggtagtagyggtagtygygggagagaggggaggaggtygygggttgggagagggtygagtatttttgggaaygtayg

SEQ ID NO: 6025 - DNA, 1154 bp, Artificial Sequence; identical to SEQ ID NO: 6024
  Description of Artificial Sequence: Synthetic polynucleotide

SEQ ID NO: 6026 - DNA, 396 bp, Artificial Sequence
  Description of Artificial Sequence: Synthetic polynucleotide
tygttgggaagggaaaaayggtttatatygaattggatgtyggatggaaatttttttgygttattagattgygtttagtatagtagatggtaygagtaygtgyggygtttagtttaggttttyggaggtagttgagttggaaatttygayggaaagtatttataagtttttattttgygttggtttattygygtgtaygtttattttttaygygygtttttggtttagaagygtatagatgtttattgtttagagtyggtatygttggggagatygagygatttgygyggygtatagtgyggygttggtagggttttgggttttyggtygggggttygagyggttaagggatgggggtgggggyggggagagtggggggagggygaaagatygtyg

SEQ ID NO: 6027 - DNA, 438 bp, Artificial Sequence
  Description of Artificial Sequence: Synthetic polynucleotide
tygygtggagagaaatgagttggagagttatatygagttaaygygggatayggttttyggttygggtygggttaggggtgggaggyggttttttatygtaggyggygggatttttatgygtygagggatttaagtttttattttatttataygtttattyggygtyggggygttgyggtttygttttaygagtttagagtaggtygtagtttgggttggggattyggtatttgggtagggtgagtttggtyggatatttttttttaggattattygtattttatagtygygttaaaagygttttatttttttgtttttygtygygtaggttttttatygaygttygttyggaaggygagagtttttaygtggttyggygyggygyggttttyggggatygygagtaataaaagttyggttygtagtttttgtttttyg

SEQ ID NO: 6028 - DNA, 438 bp, Artificial Sequence; identical to SEQ ID NO: 6027
  Description of Artificial Sequence: Synthetic polynucleotide

SEQ ID NO: 6029 - DNA, 411 bp, Artificial Sequence
  Description of Artificial Sequence: Synthetic polynucleotide
gyggtggtgtygatttatttgagtagttgtttygygtttagttygtygygygtagtggygtgygtyggttggatggtttggtttatgattatttygtygggygtyggtygttttatggttagggygagagygttaygtttgyggttttygatattttattatgttygtttygttygtttygtttttttygtttagttttagagggtattggygtygttygttygggtygygaatttttggtygttaggtggtgggagttgygagtgagggggttygtattgttattttaggattatygygagtgggggaaaattagygttttygggttttaggagaagtttgggaagtgygyggggagggggttttygggtagataggtttggaaggyggtttttygagagtyggagygyg

SEQ ID NO: 6030 - DNA, 1137 bp, Artificial Sequence
  Description of Artificial Sequence: Synthetic polynucleotide
tygyggttaaaaygtttagygtygggtttgggtttgygaayggtttagtttaggttttgygttagagtatygtattygggggyggayggttttgtagttttttagttttttttygtattaattagttgaygttygggygtattggtttttttygttttygttygtaygaaagttttgttygaygtttgtagttagtatygttygtattgtttagggagggtttgygtygagatttagtggtygagtgagttatagagtygttggttttggggaygttgttttttatygttttttatygttttttttttttttgtattttatttyggtatttygtattttttttttygttyggtttygygtattttgtttagattttataagtattttttyggggtatttaggattygaygtttttttygygtygttagyggygttygttatttttggtaygtyggagggatygttttyggttttttgygyggygttttttaggggatttttagtttattttttatttagttgttygggtttygaygttttatttttgtygaattgggggatatygaggttgagttygattaagagttagayggttatygagygttttatgatttygtttttyggaygtgatttyggttggttaggggtygtygyggagggtagtgtagtygaggtggtagygtagggtagtagtagatttygtttttattaaagaatttaagaagaygttttttttttttagygttttgttaaataaatttttggagagggygagagtggtgattaaagagaggagttttttttttttttttgtttgygtttyggygygyggaggtgggtgagtttyggggagtygtyggygggtttagtttttygttgygggtgggtttyggtagaggygyggygggyggggygygggttttygyggtygtttygggtttgttgygygggtaggtagatttatyggtagataggyggatygggygttyggttgtygttgtttttygygyggyggttgyggggtttttgatttggagaataatgaagygtgagttggaggggagygagygggtygtygggagygtattgtgtataaatagaggyggygtgygtgtgagtttgagtttggtaggygyg

SEQ ID NO: 6031 - DNA, 2383 bp, Artificial Sequence
  Description of Artificial Sequence: Synthetic polynucleotide
tygaygtgttaaggaaagygygtygtaaggtggagygttygggttgaygatgagaaggtgagttgtgaattttgtataygtttttaaataaaaggtttaygagyggyggtttygaygtggggagtaagtaggtttttttggtttttgtagtaggyggatttaggttygtttgtygtyggatatttagaatttgttttygtagygygagttttgtataygttttgygatyggtatttttggattttttaattattygtygtttaattttyggagagagggtttttygttygttgagttgyggggttgggaaggaaaagggggaygygtttttgggggtttttggatattttggtaaagggggttgtagttttaggttttagttaaagggtttgggayggagtgggttagaaagtygttaaattgaggattttttttttttttaagtyggagttttaggtgyggagtygtttgtttatttattttyggagtaygttttgttgttttygtyggyggaygyggttggttattgyggtatttttttygygatattygggygttagaaattygtttttagagtttgttgtagyggatygaatttgttgyggyggyggttggggtyggggyggtttgggyggaggaggttgaggttggtyggtygtgttttgygtttagagtattatatagtttagttataggaagtagagttggagatatagttttygttttttttttatygtyggygtygaaagygygyggtygtagattygyggagagggagtgattaaagataaaatttgygygttttagaaaagagttagggtttaataagtttttygtyggtttyggggattttttygggttygggttttttgttttagttggagatttygatagagygtyggttttttgattgtttgygaagygagaygyggggygtygggtttagygtagtgagyggygaggygyggyggaggtgtagtyggtagtttygagyggtataygttgtataatyggtttaaagtttygagygattttaggatygttagygggygggggaggaaattataaaagttttggygtaaaattttaaaaaatgtgaattttaaaagaaaaaagggtttgtaygtagagttyggyggattttygtgygtttygaagayggatattggaaagttgtaaaagttattagaaagaaataggtaagtaaataaaagtygtttttagaagaagaggagggtttttttygggttygttyggagttttatagggtaaygaagygygggtagyggttgyggagtygggyggaggtgygyggggtyggggygtgyggttagtaagagagagggygggaggttgggygttggagaagatgyggyggtggagggygyggygygggggttttagaggttyggyggggygyggggygggtyggygggyggyggttgttagtgggggygyggtygtttataygtggggtttaattyggattgagaggtyggygtagagtgggyggggatagagtaagggagagatygggattgaggaaygaggggaattagggttgggtgaggggaagaggaaggaagggggggagggygaagggagggaagaggayggagattggggagaaggggggygaattygagaggaaggtygggttggaagagggatttggaaagagggattggygagttygggtgygagaggaaatgagygggggatgggggygaagttagggtaaagagagaagtgggaaaggagagggagggttaaggttygggygtygagaggaggggttyggggggtyggttggagggggygaggygttaggyggttttgtttttygttttygttaattggtygttagttttgttttgattgtttgtataaagygagtagayggygggggatggggygattagggatyggatttgggaaaggaggtagtagttttttttttttttttttygttttygttyggtygyggattagggattagggtgtttaagygygttaggtttggtyggattygtagttgaattgattygtagttgaattttttygtyggatagaggtygtaaggttgaggatgagaaygggtttttttgtagggtttyggtttttgatttgggatggggggattygtagttagttaggaatagaggtttayggggttgttggttgtagttttaatttaagaaggaggagattttttttttgtttttttatttttatygttttatygggagyggygttagtttgygggattaaattaggggttgggagtttttagattgaaatgygttttttattattaagagggagtttaygyggtygyggggggtygaggtagttagtyggygtygyggttttggggagttyg

SEQ ID NO: 6032 - DNA, 2367 bp, Artificial Sequence
  Description of Artificial Sequence: Synthetic polynucleotide
gygatttyggttttggggttttgtttttgtygygggagaataggttttaatttaygaagttggttaattttagaaattygagattyggtttttgagaagygattgygtgtttygggattttgygttaataattaaatttgggagaagtygygggaatgtttttattggaygttaygaagggaattggggttttttttttgggaagaaaaagttygatttgtgtyggygagagtaggttgttttgggttgggggtattttygagygttgyggygggaygtyggggttyggggygaagagagttagggygyggatygaygtttgttgtttttttgyggtattgttgttygaaygaaygaaygaaygaaygaaygaagyggtttygtttaggaaaaatatttttttgaygygaagttayggttgaagtttygggttaygtagaggggttagtaattttatgggtggtggggttttttatttttggaygtagyggggagtagygggyggtttttttttttgtttattttttttgggggtgggggagttttgtgttattygaygttgygaggggttgttaygggttttttaggttgtgtttttygyggggtygtggttygtgttttygaggttgttatttttttgaggtgttyggagttaaagtagagggttgatttygtyggttgggtgaggtagtattyggtgayggyggttatgattgtgttttgggygtaggaaygagtttttygygttgtttygaaggtttttgatttttygygttttgygttgtttygygtygtygggtggatttatataygttaggagtaaattgygtaggattyggtygttatttttttgygtttttttatygyggagattttgygtttttagtttagygttttttattttatttgggtagygttgygtttgyggttygtgggtttygggttygttygtygyggattttggtttaggtttyggtttyggttggggtttyggatttagttttggttttggtattgtayggtttttyggtttttgttggttygttatattttagygygygaggtyggggttttttyggttyggttygtttttttygtygtygtygttygtygttygyggggaaggyggggatattggtygggaggygggaagggtggggggaggggaagttaggtgttygtygggatttgyggggagaggggyggygygtagtttygtyggttaggggttttggtttttttyggggygtaggttggggttygygyggttggyggtygggtttygaggtyggggagygygttttgggattttygtggaggggttttgtygtatgyggaygaagttagagygggttttagtttggttttggggtattttttttttttgggtttagttttttatttgattygtgaggggttggttttattttygtttagaygggggttggtggtygagtttggggttttgagattggattttttttttttttgtttagtttgygggagggagttggttttgygtgttggtagggagagttygttgtttagagygtggtagttagggaggtttgaggatagattttaggttttttgtgtttgggggtagggggtgttagggtggggtaatygttygatttgttttggttgggggaattgtttttttttttttttttaggggttgggttggtgaggaaagggtatattaattttttaggatagatatttttggggttttttgtttaatttttatgtttgtatattttttagygattattttgttgygggtttgygaayggtgaygtttttatttttgtggtttygtaggtygtttttggttggttgtygttgggagaygggttggaygtaagggaattgggagtttgttttttgtttatttttaggttatagggttttttagygttgtttygtggttagataattttgtgygygaagttttatggtggaaattagttggtygaatttatttttggtatttygaagtgtttagtttgagtttgtttgttgttgggattatgggatgggattatagggtaggtygggttgtggtttgttttttttagggattggagyggttaagtttgttygtygayggttaygggttttagagygatygttttyggygtaaggtgtygggagatggtagygyggtagtygggtttgaattttttatgagatgtagttagtagyggygtttttttgtttggttttygtygatagttgttgygggagaggtygygattygygttatttyggygttttgttagttygtgtttttagggtygtttggtttgggaaygtagagatttaygattttttttttaattttygaagygggaagtyggttyg

SEQ ID NO: 6033 - DNA, 1235 bp, Artificial Sequence
  Description of Artificial Sequence: Synthetic polynucleotide
gygttagygygtgttttgtttagagagttyggygttagtttatttttygtgtagttattggttgggattttgtgtgtygttgtyggttaatgaagaygttggagatygggtttttgttygttttttttttgygtttygggatgaggtagagattgaatagtyggygagtaaattaayggtatttagaaagttatgtyggattyggygtttagygtttaagygttaattygttgaaagttttttagygaaattttagggaygatttggatttygttgagaggaattgtttttgagtgagatggttttagaggtttggaggagyggattggtaagtatygggagggtagtgggagttttgtttttgtttggtgttttgaataaggtttttayggttatttattatgagatttyggaggaaagagagaagggtttygttgtgggtaaygtggtygygaattttggtttggatttyggtagttttttagttygtaggtttygggtggtgtttggagttagtygaagattttttgaggtgaatygggagatyggagagatgtttgtgaaygatygtttggatygagaggagttgtgtgggatattgtttttttgtattgtaattttggagttggtagtggagaattygttggagttgtttagygtggaagtggtgatttaggatattaaygataataattttgttttttttatttaggaaatgaaattggagattagygaggtygtggtttyggggaygygtttttygttygagagygygtaygatttygatgtgggaagtaattttttataaatttatgagttgagtygaaatgaatattttgygtttygygtgtagaygygggaggatagtattaagtaygyggagttggtgttggagygygttttggatygagaaygggagtttagtttttagttagtgttgayggygttggayggagggattttagtttttttygttagtttgtttatttatattaaggtgttggaygygaatgataatgygtttgtttttaattagtttttgtatygggygygygttttggaggatgtatttttyggtaygygygtggtataagtttttgtaayggatttggatgaaggttttaayggtgaaattatttattttttyggtagttataatygygtyggygtgyggtaattattygttttagattttgtaatygggatgttgataattaagggtyggttggatttyg

SEQ ID NO: 6034 - DNA, 3043 bp, Artificial Sequence
  Description of Artificial Sequence: Synthetic polynucleotide
gygagggtttyggggtggtgggggtgtyggttttagtatgtggaggygataggattygtaagattttaygygtygtyggggtaggatygtatagggtygttatttatttatttggggygtttttaatgggtattygtgtattttagttygtgyggtgagygtaygtaygtygtygttgtygygtttatayggttttttaaagtygggggaggggtygtggagygaaggagttgtaggtagatttttttttttttttygagttgggaaaagggttagtttygtgttttgtaygtttggttttgttttgtagtttgtyggtgagttaagagtyggtagagtagaggaggygtayggttygggtygtgttattattttttggtttgttgatttggttaggagttggggatggyggtagtatygyggaggtaygttttgygttgtttttaygttttttttygaaagtagtgtttttagggggaaagttygtaatgttatttgtttygtyggtaaagttttgggatgtygggtattttttgaggagggggaagaygyggtatttttattgaggtyggtaggttaggaagagaagtttttygggygtagggygtagtttagtttyggggattttttgggtttttygygtgtyggtygggatgaagygygttttgtatyggattygggattygggggygggggttggygttggtagygttagaygttgttttattttttttygattttggggaggatagtaataagttttgttttagttattttattattttgttagtaygtgtagatttygggttttyggagttyggygyggatttygttttgtttygygtttttttttgtaygtttygtgttattttaagagtttgygtggttttgggtgggygtttggttttyggygaaaygtttggggygygtygygtgggtgtayggtgtttttttttagtagttttyggttgygggggtatatgtatttatttgtattttgtagggataggyggtttttttgttgggagtttttgttttggggattttygggtgggttggtggygtyggtttttygygtygggttaaaggtggttaatattaaagttagggttatgaattggtttagtygttyggtatatatggtttttggtattaatttttygtygggagatttggattttttgtgttttttttttttttttttttttttttttttttygtygtttttttttttttttttattttttttttttgttygttttttttttttttttygyggtygyggttyggatagaggttatttagygttttttygtagtttttyggagagtatgtgattaggtygttagtagygtygygagtgttyggtaatggtagggatggtgttttaaatatttttggaagttttggtgttatttgaatgaaggagtygagtaggtgttgtttyggyggttggattaattygagatttyggtttttttgataatayggtygggaggyggggtttgygtttaattattataggaggaagtygagygtygttgggagygtyggataaagttgtygatttggyggyggttaygygtttgygtgygtgtgtatgagtgtgtgtgagygyggtyggagatgygtgygygtgtgygggtgttttagggtaatggtygaaaggattgtataatataagagygaatttaagttttagttgttgttaaagggggayggtgtgttttgggatagtgtttttggggtttttggttygygttatatttatatygggttgggaaagtttttttttttygtygtttggaatttagtgagatttttagtttagaggatttgataaattgaagtagttttttaggtataatgatgttgtgggttaattgagtatatatgggaatttttggttttgtgatattttgtattaaaaagaattttaygattgaagataggagtagaagtattagatatagtatttggtttgagtaattgttttattttttygttttggtgggtygtgtaatatttggagtgtygtttttygttttttttttaatttagaygtattttaggttgggttgtagggatttaggtgatagttaggatttgtattatttttaggagggtggtagggaggtttaaggtagttttgagttagttygtygyggagtatygygtgttyggaggttagagtttgaaaggtaattttaygygtttttaaatatatttttgtatttttttaaagygttgttygttatttygtttygggtttttttttattttttagttattygatggaagtggtgagaataaaaataaagataaaaaagttaaattyggggaagttatttttattttttttttttttttgttyggttttttttttaagaatygtygggtygggatagttttyggttatttttttattyggttygtggagggaaggagaaagttgggygtygtttggagygtttttttttttgttgtgtgtgtaygtgtgtaygtttaygtttttttygygtyggggtyggggataggaattgttttyggtttygttattttayggygtagttyggggggttygtagggttgggggagggyggggataygagygtygygtttaagygttttagggtaygtattyggygttggygygtattygttttttttttygtttttattttttttttggagaataggtgagtttyggtattagttttygattttttattttygtttygygtttygttygygttttttgyggtaatgygtttgggaagttttattatttattgtttaggygaygyggttttgggttttygyggyggggygtattgttygtttggttggggtygttatgtgatayggttgggggagggggygaggagataygygggtaggttattttttggtyggygtttgatttttaaagtttttttttttygtgtttyggttgtaygygggagtggggaaggyggaggyggggggttaggatggttayggttggtygtagttattyggygtgtygagtttttttgagtyg

SEQ ID NO: 6035 - DNA, 864 bp, Artificial Sequence
  Description of Artificial Sequence: Synthetic polynucleotide
tygtaggygyggagttgyggttgtagttattagtttagaygtggygygttygtagtaagtggttggatatygtagattaggttygygtttttagtagygyggatttyggggttagtygtttaggtagtaaagttaggyggtyggtttygttagtagtygatgagttttattttgtggattgtttagygttagggattaggattyggagaggtgtttaggaggagtagatttttagattaggtaggttgtgtattyggtgattttgaygttatttaagggaagtttygttatttygygttagtgtttgagttgtaattgtaaattgygygttttggtaygagtagyggtgggggygggtgggggaaggagygagtgattttttaggygtttttygttatttgatattagttaggtagtttttagggttagagygttagygtygaagttaggtttattygggaagttatttyggtggtygyggggtgtttatgttagtattagattttttttyggaaggaggagyggggygggttatayggttaggygggttttttttttaaggyggggtgggtygygygtttgygatttttygttygtggttttggggtagttygggttagttaggagaattygygagtttagyggygtttgtatttgyggttttygggagtygggyggttttgygaggtttattaggtttgagaggtyggaggtygttagtgtygttgttgaagggtggattaggygggatygyggattttgggttagatygtagatttggtatygyggattgggatttggatyggggattttgagttggattayggattgggggttggatygyggattgggggttggatygyg

SEQ ID NO: 6036 - DNA, 2071 bp, Artificial Sequence
  Description of Artificial Sequence: Synthetic polynucleotide
gygagagtagyggagagaaaggagttagagaagtgygtatttattagtttatygtagttgttgagygttatagaggaggtttyggttaggtyggttaygttttygaygtagagatagttttygagtaggggttttaygygggtggtgtttttttygttttgttattttatagtggtttygggygttaygaggygggygttgggtygtagtygtaggtgtaggtttyggttaaagatygtgatattgtagaagaggtgattgttaggttttttttygttgttttyggggaagttyggggttyggatyggggyggttttgygggttygtatttttgttttggaygtagttgtygatattaygtgggatattaagyggttttgggygttagtgygtaygggtatygttaggatgygtttygtttygtgttttaggggttygtttgtaaygggaaggggygttagatyggyggagattayggagttttagtgttttagagattygtyggtaagttaygtttttttagatttygttttattgygaagggaaggggtatttygttaggygattttagaagttagtttgtattttttyggtttttttgtaatygggaaggggygttaatagggttattatttyggggtttygttattttttagtygttttttttttyggagattttgtttgttaagagttttgttttttgtttygtttagggttggggttyggtgggaattttttygtgttygaagggaygatttygttagagagtttttygatttttgtatttatygtttttggtaggaygtggagttgttyggaagttatttygggttggtttttttattygtgtgttaygatttttyggygggtttttgtygttygagtgtttttatygttagttttyggagyggyggagtttyggttttttygagtaygagyggtttgttttgtttgtttagttttygtttagttygttgtyggtttygttttttygagygttygaggattgggaggggtggaatagggttttttygattttyggggattttttgyggggygttttaattaatttttagggtttaaggttaygygttyggtagtyggttttttyggagygttttyggaygygagtttyggygtygtttygttttggtttttttttyggattygttggggttgattttgygtttttggtygyggggtttttttyggtttttygtttttatttttygygatttaggagtygttagtgtttygaggttttttyggtttaaggygttygggggyggtgyggggygttttttgygygattaattyggtttygaagttggttaatttggtttygggyggggygygyggagtttgtttaagttaggttggaygaygtttggggagggggyggyggggtaygygggatagggttaggtyggygggggtttyggggagtaggggtygggtygtatttatttggggggtyggyggyggyggygagtttggygttygygggyggyggyggyggyggtaggagyggyggyggtagtagtagtagtagtagtagtagtgyggggtagagtaggyggygagyggttttygtyggyggatttatggtagtyggattgtagtyggggtttygtattygtagtyggygygaaagtttttygygagtygtttagtttatatttgggggtagttggagtygttygtagttgtagtatygtagggygyggggyggaggaggygaggygyggaggggygggygggggagygtggagggaaggyggggagagggaaggagygagygagygagggaggtaggygggagggagggaggygagygagggggagggyggggayggygggygttttagtttgyggtgattyggygtattttggygyggtygtygtygtygttygttttttttttygygtygtygtygtygyggtgtygggttygtagygaagtagagatatttygaggyggyggtagagaagygtygygggtygggtygggggagtttygtygttagttattttaggggtataattttygaggagyggygtyggtygaayg

SEQ ID NO: 6037 - DNA, 1170 bp, Artificial Sequence
  Description of Artificial Sequence: Synthetic polynucleotide
tygggttggygggtattgagttggggttattaygtttttttagagygtttgyggaggtggygaaggtttggagagtataygaggyggaattyggatygagtgagttttttgagtygtttgygtgggaygtagggagagggygaataaygtttttaggygttgaatgtaggggtaaggagttagygagggtggttggagtaggttttgttagttgttattaagtttttttataggtttgggggtttggggttttttggaaagattttttygtygygttgattagtayggggttygttttygtattttgaaggttgtygyggtttttygttatttataattaagtttaagattaaggttgtaagttgaggtyggggtattgataaygggaatgaagttataggggaagaggataattgggaygggttggatttatatttgatattygggaaatttttagagygtgtggtgtttttgttagyggtagttattggtggagttgaggttatygttattgtygtygttggygttttgtttttggaattttttagtaagatggtatttattgtttgttttttttygattagtatttttagtygygttttttttttttygggataygtattagttatatattgtggggagaagatgggttatgtaaatgtaagttaaygygtttttttagttatttttgtataatgtaataggaatagygattygygygtaygaatygggtagtgtgygygtgtgtgtgttygygtgtgtgagygygtgtgttagygtgygttttygygygggygtgygtttgggtggatttttgygtggtttgggaggtaaatygggygtttttttaagtygttttaatatgatttaggtttttaaataygtgaaagyggtagatataatagggatgygaaggaaataaaaaataattggggaagtggtgttaagttatttaggttttgaattgaggaygagtagtgyggtygygtttggggygygttyggaaattatttttagtttgtggyggttattgttttatttaaatttttttgyggggagagttgagyggatttttggggggttggttttgggttagttttaaatttttyggttgtatttygygtggttttatygayggygygtttyggygtagtttttggygygggttyg

SEQ ID NO: 6038 - DNA, 2168 bp, Artificial Sequence
  Description of Artificial Sequence: Synthetic polynucleotide
tygygttgtagttaggtagagtttyggggtagttygtttatygyggaggagttattttggagttttaygttttttttatattttatttatggattggaaaggatgtttagttattygygagtttgtttgatattgggatggaaagttatagttygtaggttggagtgaggygygggaagatgtttggtttttgtttygyggatttggtagtygygttttgygggtttgtttattgaattgttgaggattygttygtgtgyggggattygagtgttatttttyggagygttattttgygttttagtttttaggttagataatatttggaaggtagggtagggttgttttygtttttattttttgyggaaggatggtaggattyggygtagygaygtagtagygggagggtatagygatttgtatttttagtttttttttaggatataaggttgattttatttttyggatagttgtaaagtttttgttagaattaaatygaattygygtttyggagaggggtttttggggtygtttygttgtagggygtggggagtggagagagggaaggggaagtttggggttgggtgtgygygygtgggagygygtttyggagygtttygtatttttttattttattttygggggtagtttgggaaggagggagtggtagtygygggaatgagggagtaagagaaatttttttaaagtgaygttttaaataggttyggatttagaattygaagttaaaggttgttagaaattgggatttttyggttttttttgtagttttttttttttygtttygaagttygggyggtttgttggttgtttgttttttygttttyggtttagaggtttttggttggygggygtttygtyggtygtyggttttttttttgaaattygtyggygtatatgaggtygttgttttygtygtaggygttggyggttttttygyggtgttygtggtgatgttatgtttygttattaygygggaggagaggagggyggygtygtygggttttgggtgaagagyggygtagyggyggyggyggygggyggggggygtttgggtagyggtatgaaggatgtggagttyggtyggggtagggtgttgttgaattyggtagtygttaggggygayggtttgttattgttgggtattygygyggttaygttyggtggyggyggyggtggtttgagggagagtygtyggggtaagtagggggttyggatgagtttgttggggaagtygtttttttataygagtagttagagttgtyggygtaaygttaagtatyggygggtgtagaattatttgtataaygtgttggagagatttygyggttgggygtttatttattaygttttygtgtgagtattygygttttttgttatgttygttgtaggggattattgtttttggttttttggggygtgtttygygttygygtttttgggttttygygygygtgtataygtggtggtttttattttttygtaygtgttygtggttttttttttggagtttttttttttttttagttttattttttttatttttatagtttgaatttttttttygaggatatttaatgaattgttyggtagttttaggttttyggggygagagttaggtagaygygggatttaggttgygyggataattgggagtaattaggttttaagataygtaaattttaatygaayggggygttygggagttagggaatgtaaagggaggataggygttygtgtgaggtttgagagtatattggagaggttaggaggtgatggyggggtaggayggggagaagtgagggggtatygagggttaggtttttagttttaggggyggagtaggggaagttgttatttggagagagttgttaggttttaagygygttyggaaataygtttygttattatttagttattattaayggaaaatttgttagtgtatgtagttttttttgttayggagaaggtggttaaggtttagaggaggttagtaggttaggygaagtaaygttttygygttgtagggggyggggaggtagyggggaatttggggygtaggaaygygggyggaggtgygatagtagaagygtaaatgggtygtttttgatagagatygggtagtgggttaagttttygtttgtggygyg

SEQ ID NO: 6039 - DNA, 2053 bp, Artificial Sequence
  Description of Artificial Sequence: Synthetic polynucleotide
tygaygtaygattygtttatayggaataagaattttaygaaggatatttggggattatattggtygtattygagggggygggaggyggaaaaagtatttttaaaygtaattttgttaggttttatttttygtattttttggttttygggatagaagtttttttggtatttttygtttagtttaggggttggttgttygttagaaygaaatattttttattgattayggagagttttgtagggagtygaggttttygttygggttaagggaaggygttggygtygygggagataagaagaggyggaggyggaaaagaagtggagaaggaaggggtggtagagggagtagygtgygggaggyggygtyggygtygggttgttggygaggyggggtggggtggagtggggtgtgttttyggygggyggttagtaagttagttygttygagygtyggygtttyggtttttagygttygttygygatagygatygggattggygtttygttgtttygatygtyggygagtttygtttttttttaggttttttattgggttttttygygagtttygtttggttyggygtggggtygttygttttygttagttygggygttygtygtttygtttygttygygtagtttttgtygtttttttygttygygttgtttttggttttttttygttttagttttatttatgaagygyggttttattaygtgttaatgagtttttgttttgttttggtagyggyggyggtatagatttygtygagggaattgygyggggagggatttgagygtagygttygtagttttaaattttgtttggggygggggattygtygyggygttagttttggggttagaggggataagttttttyggttygygttatttatttttttttttttttttttttttttgtygtygygttttyggaggttttygttgttatgatttygttgtgttttyggatatttttatattttgattaggttaagaaggggttggtgtatgygtygtttaygatttyggggttattaattataygttttygggtagygygtatygttaatatttttygygggggttaygtttggggtagygggttgagtyggaaggggaaggggagygggagtttagaggtygaggygygtygggttygggggtgyggtttygygtttttttttttygygtaaggtygttttygtggtaggyggtagygagttgggttyggggtygggttgagttttgggatygygttgygtagttttygagtygttygttatttggttgyggtygygyggttatttgtttttygttttyggggygtygtttagtttygygttaggygttttttttagygttygtygttttttttyggygagattattygggygygtttygttygtyggttttygatgtaaatagttgggtttygtaggyggttggtttygygtttttyggttyggygygtttttttttyggttattyggggtttygtttttygtattttttygttggaggaggaygttttattttagggtyggattgggggttttgggattygggggyggtagyggygggygtttggggagtygyggtgtgtttagtagtygyggtaggaattaggggatatgttygttaattgtttttattattagtygtygtttgttttttgtgtgtayggattaaattttaattggtttttatatttattatggtgaattgygaatttttaaataagtttgggtygtygtttttgtygaggaggygtttttttttttttygttttyggggttttgtagggtgtgyggyggyggtygtggttatttagatatttttatttttygtgagttggatygggagaggatygtayggtttttatttgayggagttaygttaygtyggttataagggtttygtgttgggygttgggttyggttttyggtygtttttttgtggtygttttggygtttattttatgatattttgtyggtgtttttagatattatttygtatygtttygttttatygatttttaggttttttyg

SEQ ID NO: 6040 - DNA, 1679 bp, Artificial Sequence
  Description of Artificial Sequence: Synthetic polynucleotide
gygtttttattgygtgtttagyggyggtggaggyggygtttttttgtattaygaataygyggttygttaaggygtygttttagyggttgatggtttyggtttttttttaaaattttyggygttygatttygtygygtttttttaggtaggaattttgygattttattttttgggttygttattagtttaggtttgyggtgygygggagggtattaagygygaggtttttttygygttttyggttatttygtygattttaggtaagtgggggtagtttaagaagggtaaggagtagttggatygtgttttggatatgagyggagtygttygaggataagggtattttttyggtatygtgggyggtttttyggygggggtyggtagtttggttttttatttyggygtgygtttagtttttaagttygtyggtttagygagggyggyggyggtygtttayggygatttttatygggaggagagtagtagtaagtaaggagtyggtttygttttgggtaggttgttgggygggggtygggygtgygggygtttygggagyggggagaattyggyggygggyggygygggttattattattattattaygygtattattattattattttaagtgtttgttygttggggattygtygtygtygtygtygtttggtttgttttgttttggggttttgygyggtttttttttgtttttygttttttyggaagaggygttygtttttaagtaygtggagygygtttygttygtagtygtygygttgttaggagygygttatgygtagttgttttttgygtyggggttgtttttygagygttgygygttgtygtttttygattygggyggttttaaagtttattygggtggtgagtgtagttatttgttygtygttatgtyggtttttatagtttataayggggagttgttttayggtttatyggttattatygtttattattygtttaaattgtatttyggygggttgttgaagtattyggagtttattttttattttagygggtttgtagyggtygttttaagtttygtygagttggggtygttggttagtatygatygagagatygttatgtataattagtagttgttygagatggttgtygggaagggtygyggaygtttggattyggggaygttgttatyggtygtygyggyggygggaggtatygggggyggyggtagyggaggtagyggygtaggtaagtttaagatyggttatttgtgtttttattgtggtaagttgtattygygtaagtatgggtttaagatttatatgyggaygtataygggttataagttatttaagtgtaaagtttgtttgyggtttttyggygattttagtaattttaataagtatattyggttgtaygtygagggtaataygttttatygttgygagttttgyggtaaggtatttgtgygtygtygggatttggagygatatgttaagtttygttattttggttagagtttgttygttaaagygggygayggttygggtgtygagttyggttatttttyggagtttggggattttaagagygaygatagtgaygtggaygtttgttttatagaygattagagygatttygaggttgggggyggyggggagygygatttgtaaygagttttttygggaaggggyg

SEQ ID NO: 6041 - DNA, 1474 bp, Artificial Sequence
  Description of Artificial Sequence: Synthetic polynucleotide
tygtttttaaaggttyggggaaggaggttgygggtgggtggygyggatttygggtttttagttatyggygttttttyggggttttttgatttygttttttaaaggaggagggttygtggtaayggtttttttyggttaggygttttygggaygygggggtgaggagtgagygtygtggtttattttatttttygagyggggayggagtgggygatatygygygttyggttgtaygtaggttttgygyggttygaggyggttttatagggggygaggaggaatttyggagattyggyggagagagtagagayggagtttattaaggggtttgtygtygtagagygygggagtyggtattyggtggggtygagggttyggggaygttggggttgtttgatttgagyggyggtygttgatygttgagggtttttgtggtygtagygtttagattyggggagaagggyggtttttaagggtygggagtttttygagggygyggttagygaggagggatagagggyggygttttyggttgttygggygygtagaataagtagttgtygttagggtygataaagttgtttttygaggggttgagatttaattttygtttttygatttagttaggggagygygaggtygtatataattyggygyggggggaaagtyggttgtagttgygttttttatttttattyggttggtttttggyggggagtttgggtagygtygattaaagttyggagyggtagtttyggggygygggaygyggggtataygggtttagttgttygaygggagttygaygygygtttttyggygggtyggygggttyggaagtttygttgttygggtygggtttttaagttygtagtygttttgattaaaataggtatygygayggyggyggtaggyggyggtagttagggttggggtygtatygygtaygygtatgygttygtygtttygygtttttyggygggyggagttyggygtygyggttaggattttttatttygttttygygatttygttgygggtttgtatattygaggattyggtttgaaaygttygtttatttatttttttgtygtttygttataagattttatttttgtttgggtatgagtggggggyggtagtttygtgggatyggyggtattygtygtttttttttayggggataattygagaagtgyggttygggtagggagagaaattaggagagaaaatgagaaagagaattttygtttttttttaaagttggaygatttattygtatattttttttttgggagattygtttataatttagtataaatagggaatagttyggaaagygygygagttttygttygattgtggygggggaggttgaaygtttggtttataygggtgtaggaygygggggttaggttttttgttgyggaggaagagggggaagaggtygygygggagggatttttgataygyg

SEQ ID NO: 6042 - DNA, 675 bp, Artificial Sequence
  Description of Artificial Sequence: Synthetic polynucleotide
tygyggtgygaagtttyggattygttgggaatygtatagttttyggtatttttggtygtatgtttgttagaggtgggtttygggaaatatattygttgtttttttaataagygtttttygttttttattggtttttyggttttygttttttatygttttttttygtttygtagttttygagtggygttagtaygttygtygggtatgggttttaaatgtttattagygggagtttaggygtttttgttttggagygyggtygggagtaaaatygtaggagtgggagggtagygagttagttggatttygagtygyggagygygttggttttgtttygtttgatgattttagagygygggtttaagygtygtttatgtagtatttttgagtttyggggaaggagagttaatgaaaaaatatttaatygttttygttgyggagagttatgagttgtttggatgttatgtattaagtttatggtttttygtagttttatttygtagtygtttatattttttattattaggtaygtgttttttttggggattttgggaaggagtgygygtttttygtttgyggyggtatggtttgtaygttaaggtttgttgtgttttygygygtttygggygttygattaygatyggygtagtygggatgyggggattgtyggagtyg

SEQ ID NO: 6043 - DNA, 1133 bp, Artificial Sequence
  Description of Artificial Sequence: Synthetic polynucleotide
tyggtttygtagtttttygygtttygattttttagattttygggagtttaggggagttaggtgttgggyggtgygttyggtgtygtygygttttttttygttatttttggttttttygttattygggtttttyggtygttttggatgtttyggttgtatttttgttttatgattttagtttttttttttaattttttttttggttttttttttttygagygygygygtatatatatattyggttygttttygyggagtggttttgggagtaygatygattttagtttagtaaatygyggttatgtygtttagatttttygtttygaggtttyggttttygtygtygtygttttygygtygttttttttygtttagatatygtygtttgyggtygtttgggyggtagtttttgyggtttttaaagttggttttttgggagggggyggtagggagtaggatgaaggatttgttgtaggaggaggatttatatatttgggygaagggaggggtagygtygttgttgggaygyggygyggattygtattattgygygtagtagtygttgtagtagtygtyggggatygyggagtygggaygttttygttyggttygygtttygtttttygttttattttygttygtygggtttagtaaygtagggtgtttaggagtygygggttgygtagggaggygggtagyggttttygygygtttttgtygttttyggagtyggygygyggygagygtagggygagygygygtygggyggyggtygygttggggggygtgaggygagyggygyggagagyggtaggggygaaatttygygggttagatgttygagggygyggyggygttgttaggttgtygttgttgtttttgygggtttygagygygttttygtaggyggtattgttygyggygyggygtgtgtatygagygagtgaaggtatgtgtggygggygyggttggagttgtygtygtygtygtygtygtgttagtaggttttaatgtttgttattttttaggaygttggtagtagtagtagttyggagttttygagttttyggtaggtttgygtgttttttttygygatttgattggataaagtgggggttygayggtggtygayg

SEQ ID NO: 6044 - DNA, 1808 bp, Artificial Sequence
  Description of Artificial Sequence: Synthetic polynucleotide
gygygtyggygttggggatggggtgggggygttggggtataagggygtaggggygtayggttatygatagtygggtgygtttagtttgaggtygyggagaggagtygaattgggatgggtggggggttttyggttttaatattgtttgttagttttagtgygtttaagttttttygttagagttgtttttttggaggggtttttygtaygtattgttttttttatttttttggttggaatttttyggtygttattgtagtgtttagagatgttgygttgtagattygggattttttaggygttttttttygtttttttgttaaagygtaaygtttgtatttttttagtttttttttttttttttgaaattgaaagttattgaggtygtttagggttgttgttttagtagttttttttttygttttygagttttttttygttttttatagttatttttttttttttttttttttttgttttttttttttttttttttttttgtttttttttttttttttttttatgtggtgttttygggagtttagtttaatattggagygttttttgttygygtaygttagaagtagttyggggttttttygtygttttttggttatggtygttgtgtygayggygttygtttttttgygttttaggggttttygtygttgtagtygtagtygtygtagtttttgagtttaaggggtygtygttgtagtygtygtygtygtygttygttygttyggatttygtttgyggtagttgtygtataatatgttatttgyggtygtttyggyggtttttggaatttyggttygyggygatgttagttattttagygaagtygtygtagtttagtgtttggataatttgaaagtataatagttggtttttttgtttattygttttatttygtttgttattatagtaygtttatyggatgtgagaggagaagtttygttgttygggtattgtttatataygtttaatatttatatatattttaaaaatattaaatataattaataattaaaagaaagaggagaaaggaagggaagtattattgggttattatgtatttgygattgattttttggttttttattattttgaattttatggaatatatyggtagttaaaaygtttttyggggaaggygttagygaagaagtaagtgtagggttttttaygygtttgttttttttygtygygtttatttgtygggtygttttgtttgttyggagtyggtttttaattgtagyggttttttygttttgygtttygtagaggagatgtaggttygggttttgggggtatggayggygttttttatttttgtttttyggygtttttgtttttygtagtattttagtyggtgygaggggygggyggaygyggygttaaggtggttttygttttatggtaattttaggttygygggaaagttyggttttgggttagattygtattygggatttgtgttttttttttgaggatyggataggggtatttagtygaaggtatttgggatttttagaygtaggatgtttttgatygttgagtaaatgataagggaggygyggtygyggtattygtttatttagygtaatygtttygygyggggagatttyggttgggtttttaggttggatttyggtagtygaaygttygttattyggttaggaagttagggagygagygtttgygyggtygtattttygataygtattagyggagttaaagggygygygaggygatggggttygygtgtttgygygtttgtagagttgtyggaygtttttygttyg

SEQ ID NO: 6045 - DNA, 1323 bp, Artificial Sequence
  Description of Artificial Sequence: Synthetic polynucleotide
tygaatattygtattgtttatygaagattttygtgttttagttttttttgttttttatttttttygtttatggttttygtttttttaagtygtttttyggaattttttgtygggtyggygggaagygtggatygagygggttttggtygygtttttttyggttaggtttggtttagttygygtagygttygygtagttygttagggggatttyggttygtygggyggtatttgaggagaaagygttygaggggygtggagttagggttttgyggtgtttgtttygggaatattgygagtyggttggagttttttagtygtttyggagaattgggggagtygggtttttggttyggtaatyggtggtttygyggtagttagaggygggttttaygggtgggtgtgttygttttygtaygttagttttttagttygggaagagygtttgtaagygggtattttgtttttaaagatgggttttgtttgygggtgatttgggttttygaagtgtaattttgtggtygggaygyggatyggtyggtttgggtttttgtagagtagattttgtttgygttttttaggaggagtgggtggtaggattggggttttttataggttttggggyggyggygagattggtayggttyggggtygtaggygygtagttaygtttttggaagttygtttyggttttygtttttaattygttttttyggggttttatggygtgaggtttggggttgggatttatttggagtygagtagaaaattttttttttttygttttyggttttttttgttttttttggaygyggtggyggygtygtttgagyggygatttttttttttttgttyggtttgttgygttyggtgtttttygagggtaggygygtttggattttgygttyggatggyggyggttttttgtgagtatyggtagyggygtattttttgtttygaggttttyggtgttttttyggygygggtataggggygtttttatttttygttygtttgtattttttgttattygttttttygtttgatttattygttygyggtggtygttygagttttgggatggggagggagatygyggttgttygyggyggtygagattttygttgaygttttygattttgtygtttttttygttygtttttagaggygttygaygtttygatagtttttggagtgagattaggattgagaatagggagaggygattygatttttagggttyggtgtttaggataggtgaggggaaggaaagggtgttgaygggagtggggaggtgggtgggyggttatygtagtygaaatyg

SEQ ID NO: 6046 - DNA, 1501 bp, Artificial Sequence
  Description of Artificial Sequence: Synthetic polynucleotide
tygatagtggtttttyggtttagggaggagagygyggtygygggtttttttttttagtttggaggttgtagtygttygagtyggttygggtgggggyggggtgggggyggygyggagggtayggagattayggyggygttattygggatatttagggtttygaggttttgggyggtttttaygygagatygtaaattatgataataggtagttattygaggttaaataaaaayggagtgggtttttygygygtygtygtttttygygtttttggyggtttttttygaggttttyggyggttttaygagttygtagtagtyggtggygaygtygttttygttttatttttttgygtaagtgygaggttgtyggtagygyggygtaygtttyggtygttttyggttttygygtaaaatttttattttgtttaygtgaagttgtygttgttttagagagggggaaagagttgygggaaaagtyggggagtgaygattgyggyggttgggygygtttttttattttttttttttttttttttttttttgtygtagttyggagttttggttttttttttttttttttttttttyggagtyggttttttttttygtttygtttttttttygtttgtgtaygttatttgttgtggggtggtygaaggggatgttttgtttttattagaggtatagygygaaggggaaatttygatattggaaggaaygagaataaatatttaattayggaygtattgaatygyggttgggatagatatttygggaattygaggyggatygggygaygaggtgagtgatttttttttttaattttygttttagggttttygggggagtttgagttgagagaatttttaaatttttygggaaagtgygygaggtttygtyggggaygtygagygttgggtattgaggaygygtagttggayggtgygtgggygtttgygttttyggggggygtttggaggtygggtgttttaygtttgagggttygggtygttyggatygtagyggtgttttttgttttagaagaygtttttaagttttaagggtttttttygagtttgtttgtttttttyggggtyggygyggagtttgygygtaayggagtttatttagtagtttagygygyggtttttatttgtatttygtttttatttggtagaggygygagtatyggggttttttttatattttttttatgaygtgtattattttttgatgattttttagatggtttaggygygaggatgttgatttagagtttttyggagggttataggygtttgggttttttyggtgtygggtgygtgtgtattttaaaggttygygttttaatttttaggtattgatygggttttttaattgyggygattttattttaatagtttttatgtggygtggattgaatgttttttgtagtttgttagggtyggtgaaattagaggygttttgttagagtagtygygtttattggttygagtagyg

SEQ ID NO: 6047 - DNA, 1744 bp, Artificial Sequence
  Description of Artificial Sequence: Synthetic polynucleotide
tyggtgggtygggggygtggygagattttgttttagtggagggagggtttatgtattgtygagaygtygattattagattttgattttgtygtttttagaaaaattattggtagaagattyggattatggttaatttgtyggttataagtttttttaagaagygttaygtttgggtgtagttggtagggtatattggtgagtagtggggygggtgggygggtgttygygaygggaaggggttgggyggygttgayggatgtyggtttttagggagttttaaggyggygggtattagygggttgattttgaagygttgttyggagtyggagygttattgtttggygyggttgatggttgaygygttgygyggttgygtgtttgttttttayggygtggtggagygygayggygaaagttatttgtagttgtaggatttgttygatggtttygayggattttgtgtgttygattgtaaaatgggygttaggtatgygtgttttgttaggtyggttggggggattaagtaggggttyggggtygggatagttgtttgagggggattyggggygagtgttygaaggggttttygtgtgygtttttttatgttttggtygttgtttgygtttttataggatttatttagaggaggagttgattaaggttygtgagyggtttaagttgyggaaggatatgtataagaaaatgttggyggtggattttgaagtttttayggaggaggagtaygygtagygygtygttattaagtygygttatatgtagtggygggaaggtattagttttagtattattttyggttttygtatygagggtattaaggtgaggtaggygygtttygttggtatygtygtagttttattgygygttgtttttttygatttttygttttygtttygtttgttttttygtttttttttatygtttygtygttttttgtaattgggaggtatygttgttttaygttgtttttttttttattggygggttyggggtttttgatatttttgttttatatttagaaagyggayggtttttgtagtatygattttaagattaygygaagtygagagtaggtgtttygygtttttgaagagtttgtgtaaggagatgaggaagtgttggtgagagygggattttaaattttgaggtgttggggagtttgaagtygaggattgtttttgttatttggtttagtgttttyggttgtgtttttattatggtttttatygygttggttygtaattgttttaygtttttttttttttgggttaygttgggyggggttttgggttttttttttggyggtatttgttaagtatagygtgggtttyggttttttatygttagtaggggtttatttggygtttagttaatttgttttttttttttattttattttttgtagaggyggtatttgaatygtttgtagtagattygggatattttggaggtattygagttttttaggaggtaygaggtaagyggyggttgttygggtgttygggtygygagggttagggygggaattyggtaagggygtttttgggtagggtygyggtttgayggtgyggggttygtaggtgatyggtagttygtttttttttgtgtaygattattgttatygygtyggygtgtggtttatygatttyggtaagattaygttttttttygatggttagattttggattatyggyggttttgggaggagggtaatygygaggayg

SEQ ID NO: 6048 - DNA, 1801 bp, Artificial Sequence
  Description of Artificial Sequence: Synthetic polynucleotide
tygttttygggygataggggtttttttaygtgaatygaygtttygggtttygggygaggygtagggtttagggygtagggygggtttygtaygtagggygggygygygggtatttttgtggttaggygatttyggttygttttttyggagtttagggattttygaggttggygygggttgttygygataaggtgttagtagtttygggttygygaggagtagtttttattygyggttttygagtttagttttgttttttygttattttttagtttttyggtatttatttagggagatagggaggtagagagaagaggagaaagyggtygtgtttgtatttagtttttgtygtagtattygatgagggatagtagggaggttggyggggaggtagagattaaattatgattttatygattayggaaagattattattatttatagtaaaggaggtttygatgygtttattygggtagygattygyggttggtgggygtttttygttttygttttttyggtggttgtggaatttatttygygtygtataygttaggatttttttttttttgattaaggggaggggaaggaataaaagagattttttattttttatatatatatatatatatatatatatatatatatatatatattttttyggtattttattgttggttaaaggatttattttygtaatttttttttygaatattttttttatttgagtagtgtatttttttaaaggtaaagagagataagggaggaaatatagtatttaaggtgattagtygattggatattgttgatggtatatttttttygtttttaattaatygtataaaattygtaatatttygygttttygyggggtttttygygtttttggttyggttttttyggtygtttttagtaggygtttygtttttygygggaattttgggatttggtygagygtttttyggygggtaggatattygttyggttttttgtagtagttgagggyggygagyggatygygtttaggtagygaygygggatttaatttttyggattygyggygyggttttygttttygtttagggygtygyggttatagttgagattttagygtygygtagtygttttygtyggggtatgggyggtygygtttttygtttttttttttttttattttttttttattttgaaaaaaatttatttattggtgtaaagtagatattttgatgttatttatttagtatygtttgttttggaggtagygttttattyggtygtttggaggtgtgggtagygygtygatgggttygggggagyggggttgggyggttyggttttttagyggagtyggtttgttgttattygtttaattttagtatttagtgggygaggagagagggagagyggygaggatgtagaggagggggagggggaggagggagyggtgggyggggagggagygagagtygttyggtagygygtatgygtttygygggtyggygtagtttttygttyggygyggtyggaggggtagttttttagtttttgygygyggtygygagagtttyggtttygtttttttttygggyggttttyggtttygttygatttygygygttygtttgggygyggygtttatygtgyggaggggttyggtygggattttyggtttyggtgaygttygttyggagtttygygggaggttyggagtttygagagtttttttgggtgatagyggtttttygttygggtttttgtaattttattygttygtagttygygygttgttgttttgggttgygyg

SEQ ID NO: 6049 - DNA, 1801 bp, Artificial Sequence; identical to SEQ ID NO: 6048
  Description of Artificial Sequence: Synthetic polynucleotide

SEQ ID NO: 6050 - DNA, 1684 bp, Artificial Sequence
  Description of Artificial Sequence: Synthetic polynucleotide
gygttgggyggtgagtttagttaggttatttttgygaggatatyggtyggyggyggatagtagtaygyggygtttaggattyggtttttttagagtttaggttattgtagtttttaggggygtttygagtttatttggagggtygygaggtttttaggttggaaggaggaatagggagaaggaggaatagggagatttggggtagtgttataattatagaaaagggagaggygaggttygttgagtttttggtttgggtaataaggtatattgaaaattgggttttttttygattygtatygtgygygttttagaaatgatagttagayggagtagggtttaaggaygttgaaaatttttgaygtgggygygtygggtgygggtagggaygtggaaggattgggttagttataggaattatagygttgyggatygggtgaggggtttyggttygagtttttatttggggygtagaggtgtttttgtaaggggataaagggtatttttyggygygatgggygatttttttagttagaaaatgagagggttagaygaggggaggaatttttttagttatttggttyggtatagygatygttttaagtttagaatygttaagttagttyggggygtttyggttttttygtttygygtttygttygtttttagttygggtttygtygttttygtygtttttgtygttygggtygttttygtyggttttggtttyggtttygtatatyggtagggggygttygagygtagttaaaaggttyggygggaggtyggyggttttagtggyggagygyggttgtyggtgtgyggtygggagygatygtygyggggtaggggygyggygggtatygygtagagygygtagaatagayggayggyggyggggattygayggyggygtttyggtattttttagatttyggttagygtttttttgttagtygtaagtatttagtttyggtttatttygggttttygatggttttygaggtyggggygattttgygygygtygygtyggttgttttgggyggygttgttgtttttggtygygttgtttttygtygttttttyggyggyggttttaggtaygygtygygttygggttttyggygttttttagtttttygygtatttttttgygttygggtttygtygtttygtttagtgttggttaygggtygtgttattagtttgtgygttttygttattygygggtyggggtatttggygttttgtgtgggtggygggagyggggaygtttyggtgttyggggatygtagygygttggygtttaattttgtygtygttygttttggagtygggaggttttagtygtttaagtgtttygggagatttaggtatagyggggaaaaaaggaaaagaaaggygatttttagygtgyggattggggtaatgtttttttttgtttagaatttttygggagygtaggtggttattttatttttttygygtttatttttygygaggtaggatgaygggygtattygggagatyggagggaggtagagtagggttgttttagaaggtygtgggggaaaggttgygagttgtygtagggygtygggtgtttttgygttttagaggagaagygttttagtgttagttyggttttaggyggtaggaggttygygygttyggggggaayg

SEQ ID NO: 6051 - DNA, 6657 bp, Artificial Sequence
  Description of Artificial Sequence: Synthetic polynucleotide
tygggttyggttygttttgtttttttgttttttggaggtttgggygttttygygtagggattaagggttggatagtygtaggtaggggtttygtttttggtttttatttttygtgtttagtaatttygggagtaggyggyggtattttttttatgtttyggttttaattayggttttagtttttttaatttygttttgtaggaataagtgtggtagaggttyggggtyggagggygggyggtygtttygygggttggayggagtttttgggttgyggagaggtygttggatttaygttyggataggagtttygygygtttattttyggttyggttattttyggggygygttgtttgyggtttttygygttatttttatttttgtttygggatttttttygggaaagatattyggggagtagtttttttttttttagtagttttttttttttttttttttttgtttttttgayggtgtggggtttttyggtyggaggggygyggygttggtagyggggtttagagtgtygygtttagygygygttgggggtttygggtttygtagtttygtaygyggtyggtttgtgaagyggygygygggggtttagtygggygagggygtttttgagtttggtttggaatttttagtttataygaaagtygtaggttggggaaggggygggtgggagygggagaygttttgggaagtygtgagatygttyggygagggttygggattattagggagygaygggggatttttyggtttagagttygagggygygatttyggattygttgggatttyggaggtatatgaagggagagggaaattygttaaatygaatttttygggaatyggaaggygtygggtygtttttaygttttttttttttttyggtygaaaggyggggggygaygygtaayggggagggaagggagggaggggtyggygattttaggggagggygagtttttggggaygyggggtygttaggggttygaygattttttygttttattttttygtttttaagtgtttygtttttttttygtttygtaaaygygygttttgygggttgtgttttggttttygyggaygygygygtttatagagggtttgatttggggttaatttttaygaggttgtygggygtttgtgagtatagtygtgtttttatttaggggtttattttttagygttattagggtttygatttttagattttyggaygttttttttttaaatygaagtttgggagtttttgggtggtttggggygggggtagggggygagyggggygggttaggaggagggggygaggtygttattyggttttttaygtygttttygyggttggttttaatttttttttyggagttttttttyggttattttttagtttatygaygtgygggtagygatttygtttttygttttttyggtygttttygtygyggttttygttttttttttattttttttygygygtttttttatatgaaattttttattaygtttagaaagaatgtgttataatttyggygttgtygyggtygttattattgygttygygttygagttygagtyggagtyggagtygtygttttttygtttgttyggttagtttygggtttygagygygyggttttygtygtygtygtttygygttygtttygygtttgaygtagtgagygtygtagtttggttttygtyggtttygttgggtttygggtygtaggtygagtttagtygggygggtttygggaggggtyggtagggygggagggggaggagggttgtttggagttagygagttyggaggaggaagaggaggaggaaggaggggaagtygtygtygtygtygtygtgttyggggaatyggggtgygygygttttgttygttygygatagtgtttttagttyggggttygtatttyggtttaggtaagaaggggtttgaggggtagggggttgttyggggtygggggatttttttgtygtygttgygggatyggagggttttygtttttaggggaggtagggaagaggatgttttttggggggggyggyggggggtagygtagggtttttagyggttttygtagttygggttattttatttttggtgttttgatttyggygttygygttagggtygagttttttygttygyggggttttggatgyggygttyggggttygyggttttygggygtttttatttatttatttaggttyggaggygggygtattygaagttagyggtygtygagtttgggtyggataaattttttttttygaygtygyggttggaagggttaggatttyggatttttagggttagggaggygtygyggggatttygaaatttttyggagygygttgagagtaaaaagtyggttgggtagaaagagggggagggggttgggygygttttygagtgygttggggtagtygyggygttttaagttgaattatagaygaatttttttttatttgaaatttggtttyggagtyggaggtggggagggagtgggttgtgggtgtttygatttygtaaagtyggygtgggggggygtagygtttygtttygygtygtttgaattttyggagggggtgttaygggattttygtttttattttagtyggtggttgggttttgtygatygttgyggagttttygggaaggattygttygyggttattaataggygtyggtgattttagtttttttyggttygggaagttggygtggyggggttgggttgggttgggttgtygagtggggygggatttyggggtttagagyggatttttagtttttttggtttttttttygtygtttttttttttttgtygtttgttttttttttatttttttttttygatttyggggtgtyggttttttttygaattttttttttttttaaattgtayggtggttattyggttayggttttgggtygtattygygtaattttagtattattttygatygagtttttygtygygggttgagygygagttttyggggttaggttgtttagggaggagtagggattttttataattygygtttttttttttaatttayggygagygtaatatattygttygtttttgyggttttatttgagggyggggagaggtygttgggggtagtttygggggttgtggagggtaggggggattygygaagtttttggagygtttagggatgtagttygggyggygtgtgtagggaggaagtagygtttyggygttttttttttagygtygttttygygygtttygagggtttaggagggttyggttttttttattttatttggatatttaggtttgagtttgagtggatttgaggatttgggggayggggaatayggagtttttttttttgtttyggtgtttgtagagtttagtttttaggtagygtggggatttttgtttttagggttagygtyggtttygtttttygtttygttaatttygggatttygtygttttttaggttttaattttttagttttatygtygygtttttttttyggttttgggtttgggggaggggtagggggygtggagygyggygttgggtttyggatagatgttttygyggyggyggygtyggygttygggtaatagtaggtygttaatyggygyggttaygggggaggggygattyggtygggatttyggggattyggtygtagtyggayggygtagttttygttyggggtggggggggggggyggtygygaggattygatttttgtygtgtagttyggtttttagttttttgtygtttttttttttagttttaggtttygttttttgttggggttttggttttttaggttgygggatttygttttttayggtttygygygygtatttttattygttttttaagttgatttttgaggtttttygtggattttagatttygagtgatygtagaattgatttttggggttaggtagtatyggttaagggygttttgaagaggttttyggttttagtttgtatttygaggaaatggatttattatgtttgtttttgggaagtagtaggaygttttggygyggttttttygggtaggygtttagtatagygtagggtataygggggatatttgygaaggtaaaggaggtttattttagagtttyggttgtatttggttagtataggtttgggggaatttgttggaaatggggatttagtattttttttggggtttatgtttggtaggyggagtggataggttggggttyggagttyggtggttattttttgtataaggttggttaggttagaagttggagggtagtttattgggattttttaagygtgattaaggaagttttgggggtygattagtttttttttagtggagttgtagttggggagattttatagataggtagggaggagagggtgtttygtttatygtyggtttygttttataggtttaggtttggtatattttaggtttgtagtatttatttggtgggtaaataaggatttgtttttggtttgyggtttggttttgatygtggtttaggtyggggtagagggagaaaggttatagtttaggtgttttaaattatyggtgttttttttgtyggtttttggggttgtgttgggtttttagggtttttgttttttagtatttgtatgaaatygtgggggygtattggttttygttttagtatttttttttaaggttttgtatttttattaygggagttttatttagttagtygaaggaggttataagttttaaattattaaattygggttagtgttgggggtttgggagttaaggtagtttagagtttatttttygattttggtttttggagaattttaggattygggygtgttaggttttgtagtygggttaggtyggtttatataggattgaayggygtygtgggygtttatttatatttttttttyggtttttatatattataggatttattttgatttgttgtttttgaattgagttaatttttttgtatgttygttgaattgtttagttgttggyggygagyggagagygtgtygggggtattgaggtygggaattagaggygggygggggataggaagyggggagggggygtyggyggggaygygygggttgygyggggattggagagggtttttaggygtyggtygttttgygaaygygggtttgtttaggtatygtyggggtttgttyggtttgagygtggagtttygaggtttttgtygggggtttaggttgtttttggggttttgttttygaygygttgtgtagggttagattttgggttttttttgatttagtttttttttttgtaatatgyggaygggggttttygtataggtaggttgttagggtgaaattgagtygaagagtgttttagaattttttgaagtttttatagaggttggggtgaatgaaggaaggaagyggggttagggttgggtagaggaggttyggtttgygttttgygtttttygtttttaggtttttgttttttyggataaggggyggatygaygggaggatttgagaaygttttggttttgtttgaggtggtgggagtygygggtagtttgtttagttaatagttgtygtttttattttttttatttatttatttattttttttattttttagatgtgggyggggagggtyggggayggatygygaggaygttttttgygttttttaggattttttttttttttttagtttttgygygtygtygggagagggaaggagygggttgtygyggggagtygaggagagtagggggttygggaggttagggagagaaggggagggttagaggtttygagtyggattygyggyggaggaagagggggtggaagggagygygtaggygggtgagggagygagggagggagagaaggagggagggagggagggaaggggggygggagggggtagggygagtttgaattttttttyggtygygyggygaggggyggggtygygygygtagatygatgggygaagttggggaggaattttaatttygggagygaagttagagtttgaaggayggyggyggttgygggygtagtttyggaatygaggtygggygggtaggtaagyggygagygyggtygggygttgaatttgggggatttgggattyggattattttyggggagyggygyggttaagtttttygttatttygaatttygggygttttygagtgygtagygtgygtttttagtttttgttgygtttttaggtttggygygygattygagygtagygggtaaagttggaggaatttggyggyggyggagygggygtaggtttagttygataaagttygggggttygggtyggggtygttgtygtagttygtaygttgtttygtgttttygagaggttttttttttagygtttttttttttttygttttttttygtygttygtattttgttyggygttttttagaygyggttttttgttttttttttttyggaaattagggggttgtttttattttttggtygagtygttgatttttttttaggttygtatygttttttttgttgggtygtttttttttygaygttgygagttttttygtttygygyggggatygtttagttaygtayg

SEQ ID NO: 6052 - DNA, 546 bp, Artificial Sequence
  Description of Artificial Sequence: Synthetic polynucleotide
gygggygtttyggttattttattttagygagaagaygaggttgtttgggttttggttttttygggygggggttaggggttygtygattttttttagygtttygggyggyggggttygagaattaaggtggttttygyggttttygtygtygygygttttttttttttttttygyggattttygyggtygtygtttatttygygtatttygttttttggaaatttagtagtyggggggygaatatygyggygtttttatgggaatttggtttygggtttagagygygggtagttggtagagtttggggggygyggyggyggtagtagtaggttggagggygygyggygggggttaaggggatttggtyggygttyggagtyggagtyggagttygagtyggagttggaggygttyggagtygtygaygttaaatttygagtagatggtggygggggyggggygggygggggtaygggggggttttygggttygygttgttaatygtttaagttyggttttttttttttygygatttygtygttttyg

SEQ ID NO: 6053 - DNA, 288 bp, Artificial Sequence
  Description of Artificial Sequence: Synthetic polynucleotide
tygygagaggaagagagttgagtygttgtaattttgggtttgggattgyggggaygggaygggtgggaagyggttaaaggygtagyggtttttggttagagtygtagaggtttgagaygtgggtygygtttyggtttaggagatttygyggtygygttttaatttttagtttttygattgygattgygattygggaaaaygtttaygtttttggaaaggaagttttattatagggagttgattyggtgttagygygtagtaygttttyggttygtagtgygtygygyg

SEQ ID NO: 6054 - DNA, 947 bp, Artificial Sequence
  Description of Artificial Sequence: Synthetic polynucleotide
tygtatttgtttygyggttygtttttttgtatataygttttygagtygggagagttttygtagtatttagagaagagatyggaatataaaggatgaaygaatggggagggggggtttggggggttgggagaaygaaaatattagttgygtttttaatatttaaggaaggaagtggtagyggggayggggagaggatgggaaggggatgttgattgygagttggggygggaygyggtgatgggaggggatygggtygggaatgygggaggygaggggagygaygggatttgtygtttyggyggtygggtagttaatygattygttttttttaggaaggagygaggggagggtggtttagagagaaagygtygygyggtttyggttgttttyggttygggatatttaaatagattaaagaggattyggagtggagttyggagyggatttygtagttygygttygtygygtatttattygygygttygttgttgggttttyggtagtygygttttttgygttggyggagtyggaggagtttgygttgggtyggyggggggygggygtttggggagggyggagagagggttygttygtygggatttttgttyggttygggygttttagagtygygggattggtygtyggaggttgygggaggggttygggttagattttttagaagttttagagagagtygttttttttttttygtgtgattttttgggagtygggttgttgayggtttagygtttagtyggagttttygygygtttttygggatttattygggagatgtyggggtttttygggaagagtgggttgygtttgtttttygyggtygtttygttttttygttgygygggatygtggggtttgagagyggygttttttygyggggtygaattygttatttatagtggagtgtggattgatatygyggttttayg

SEQ ID NO: 6055 - DNA, 1313 bp, Artificial Sequence
  Description of Artificial Sequence: Synthetic polynucleotide
tygtgttatayggygttgggttttgtaagttgttgtttgygtagtygttttygtygttgtygttttygggygggtgtattagggttygygtgggyggggyggggtyggggygggatyggggyggggtttgttttttygaygygtyggtttygtttttygtttygtttttttttagyggatygtaatgatttagaagtttaggaattttaygtgaygttatygggggggtgatgtaatgtattttaaatagaatgtattgtaatttttgtttagtttaaygtggtttttttattygggtttygtttttgttttttttatatttgtttggtaagtttttaaaaatayggttyggttatttttggggtttttgtatttagttatttttgttgtatttgtygtaggagttatttygggagtgtatttgtttgtaggggttggttttyggtagtagtygygaggttatttggtttagtgggtaggttatagggtaaggagtagggaagatgygatgtatttttttttggagggtgatttgtgtttgtaaatattttggyggattagagggaagttyggtttygagtgttggtagattgtggaattyggttgtgttttgaggttattttagagatttygygtygygtgagtgtyggagygttyggtggtygtygygtygygygtttggagggatgttaaygtggagtyggygtygagttygttyggygtgygtgygtgtgtgggagygygygagttttttgaygyggggattagttatgaatygggggtgtgtgtttgtttttagagatttggtaaggtgyggagttttttagaagtgyggttaagyggtagyggagayggygagttaggaattttttttygygtttttagttttttagygtggyggyggaattttyggagaaagtttgtaaatttttagygggygyggygaggaygtygggttatttagggggygggtgggygygygygtagggggttygtttttttyggtgyggagttgtagttgttatttttttygtygggttgtyggttgtagygggtgggygygygttyggggaggggaggtygttttyggagggygtttggttttygttttaggygtttygggttggagagyggygaggtttygttygttttagtttattttttyggtygttttttgttttygttgtttttttgttggtatygttattttttttyggtygttgttttaaatgatagtttyggttygagttttggyggygtttaggtaatttttaagatttggyggyggagtttttttttgyggtagattttyg

SEQ ID NO: 6056 - DNA, 848 bp, Artificial Sequence
  Description of Artificial Sequence: Synthetic polynucleotide
tygttttttygtttagttygygatgtttagttaggygyggygygygtttgttyggtattttttyggygygtttttttttttgygtttttagatttygatttagagyggatttygatygyggtaaattatggttttaggtgygtttyggaggtagttgygggaattagttatggtttygggttaatgtttagggataagtatagggatagggatagagatagggattgggattggattttagttttaagagaaagtatttygggtttattygtattttttttttatttttaaataaagttatagaagygattagygygtagttaaagggtttggaggtgaaaaggagggttgggtggggaggagagaaagtgagaagggagagaaaagyggyggttgagtaaagygggagtyggygygggyggtggggtttgattyggaygtygygtattyggtttygtttygygtttagygtttygtttattttttggtygygtttgttttygygtttttttgtttttttttatttattagtagttttgttgataagygagaaaattgataagtgagaaaagtygtttgttagygttygggttggtgtttgggttgttatygygggygyggagggaggggygygygggtatygtygtttgtygggtataygttgggtttygatttyggtygggtatatttattttygtagggtagtygyggttattatygatttgyggagttgygtgggttttyggaatttttattttaataagagttyggtttygygygtaagtaggagggaagggaaatttttattttttyggggttagggtaygtagaagtygygaggtttygyg

SEQ ID NO: 6057 - DNA, 2406 bp, Artificial Sequence
  Description of Artificial Sequence: Synthetic polynucleotide
gygtagygttatagtygygattgyggyggyggyggyggygtagggggygggggaggagagaagygtttatttygtttygttgttttygtagtagttttggttttagtttyggygtattagagyggtttttgggaatttttgggtttgttgtttyggyggtygttagttgggagtttattatygttygatggtatygaatygattygtgtagttttataattttagtttaatttygaggagttagygtagatygtttttygtttttagttgyggygaggtaagggttggtagygttyggaygttttygttttgttttttttatgtttaagygyggggaattataygttttyggtgtagaatagaygatyggggttattagggttgggyggtgggagtgggggttgggagtattatttttggttggaygtgtgtttagatttatygtttttggtttttaggattttatttttttttgtatttttaggtgtyggtttttttgtattygttttttayggggttygttyggygaagggtagtygtagtttatatttatttttygtttttaatttttgttttttttgttygtygtagttattygtttggttgggagtaagttttttttttygttgagggtgtagagagygtttagggygttaagagtagaggggttaaagtttaagygttattagttagtygaaggttttgagtttttagggtygyggtygggaygtagggaggttaggaygygaygttygttttatttgtttttttagyggttttttggtygatagygtyggtttgggggagggygygyggtygtagaygtagttttttagtaggtaaagtttygagggtygygagttygagtygttttygaagtagaagagtaggttttgtagtagygygaattatttggtttgttattttgtgttgttygaatttygtttgtttaggtagtttttgygygtgtygtttttgygygttagtagttttagggaygygaygtggttattatttagtyggatttttttttgtatggtgtttagaggttagygagattttaygygtttatatttttttygygtagtagtttttygttygtgygygttgygygttgtttttttttggygttygttygttygttttttttagtttttttttttttttaaatatttatattttaggatttggygtygagtygyggttttttgaatttagatatattatttttygttggaatttttttttygtttygtagagttttagtattyggaagatgtygttygattttttttyggtgtygggtaaattgagggattggygatttgygygttggygaggggtaggyggagttatgtgaygtygatttttygaagagttygttttagtagygyggatagggatataygtaygtagtttygtygaggygtagagtygygygtaggttgtaatttggtgttttttttttttttttagatatatatataygtataygtataygtatatatttaaattttgttttttttttttttatttttttttttttttttyggatgttaaaaagtaaattagattaattttygtttaatttaatgaaatttygaaggttygttatttygggagtttgygtttttgygttttatygyggygtattgtagatttggggttaagtgttagttgttatttttttttttaaaggttygttttttttttttattttatttttaataygaggtggaaggaggaaggtgggtggygaaatagagttgtaaaagygtttagttttagtttttgtatagttagtygggttatattgaattttagtattyggttgtattttyggyggtttttttagttatttgaggatagtatagggggtgagatggggtggtggttggtgaaygttggttattttattttatattattttattttgagagttgttataattatyggygttatttttygtgtattttgaggtttggttggygagtygttgttgggagttttttgtaaatattttttaaagtttgaaggygggttttaaaygtaggygtyggggattatgggagtttttaaatagttgygttggygtaatgatattttaatgatagatttttygtttttatttttagtttttattygtttatatagttatayggtatttattygagaaygttatagygttygtatgttgtatygggagggygygygggtygtygggygagtygggagttggggyggggagygygtatygttgtttgtygtagagggtagygagttygtttygattyggagtaagtygygtttggttygggygttttgtagyggggatgggtgttygygtagttttgtgaaggaaagatattattttttygtayggaaattgygtatatttttttttyg

SEQ ID NO: 6058 - DNA, 1218 bp, Artificial Sequence
  Description of Artificial Sequence: Synthetic polynucleotide
tygygtttgtagttygtgtattttttttyggagttgygttagggaattayggaygaattggaaggggtygagaagggttttggttattatttttagttttaagttttttygtttttttagatttgggatttttttyggggaggattttttggygttttttggtagtttttygtygtttagggtygatttttttatttttagttttygggygggggaggtttygtayggtygtttagaygggttggggygggaagattgtagyggttttgggtttattttttgtttttttataatttttagtggagttgggttaattttaggtatagtttattygagttaggygaggtttagaaaggtttgattygtttggtagttttaayggatttgttttygtagtygttgattagtygttgaygagyggatttttyggtygttatggygattgtgaaatgtagggtggagygtatgygttygaagttattygygygggtagtttttgygtgtttttttgygtgtttttttaygtgttttttagygygygtagtatttygtttttgygttttttygagygtgtagttttyggtgagggtagttttaygtatagtttttaatattttttttagygtttgtagttttyggtgygygtagtttttaagtttatatgygtagtttttattttgygygtagttttaygtatagtttttaataygtttttagttttattggygtagaatttattatygtttgttttttaygygttttattgggagtgtagtttttatttygagygygtagttttaygtagtttttttatattttttttagygtttgtagtattttttagtgygtatagttttgttagtagtttttyggygygtygtttttgtatygtttygggttataattttgttggygattaagtttgaagaattttttgtggttttatttttttttttaggtttagttttagttttgatattttaattaaaaggttataygttaattaaygaggtattaaaggggaagattttagttgaaagaaatgattgtaggaagtgtgttagggaagttaayggaatygttggttygtyggtggtgygttyggtattaggaaagtttttaygatygttgaggtatygggtagttagtgttygttgttaaygyggagggaaygggyggagattgygggtaataygtggtagagtyggygtgagttyg

SEQ ID NO: 6059 - DNA, 1848 bp, Artificial Sequence
  Description of Artificial Sequence: Synthetic polynucleotide
aygaygaaggygygtttttttttattygtttatattatattttygtttttygaagtatagttygggttggagaagttttagyggyggyggttttygyggyggaggttttygygygtatttattatgtttttygttttttttygtttatttygagygtygtgygygttygaagttygagtygtagagygttatygygtaaaggaaggagttaggygygtgyggggttygyggagtttttttgaattttttggatgggggyggaggygaggggygtygttattattgyggtaaatttygtttttttttygggaggtgaaattttttaattygttttyggtyggttygygggtyggatttttyggaaaggattttttaggaggagggagygaatgtaagttttgttyggaygttttatyggyggttttttaaatttgggygttttttgatagttatttttattttatttygtttttaygttggggattatttttggtttyggaggygygggygyggtygtaggagygggttgyggggttygygaaataaagaatttygagygggaygtatttgyggyggtagyggttgttaagttttygaattttttatagattygyggayggggygtaggttggyggtttttygtttygygyggtygygggyggttayggttattgygagyggtygggttgggygyggggtgygttygtygygggtatggtgyggygygggyggtygyggggygygyggggaaggygggagagyggygygggtgagtgggagyggygggtgtgygygagtgygagtgtgygagygygtyggtggygttgtttttgttygttttttttygttygtgtagtttyggtattagtttyggggatygtgtaattygattttttttgatttataagttttgagtgatagttttgatttggtttaatygygggagggaggggaaagagaaagaaagaaatttttagtygtaygttttttttggtatttaatygattttttggaaaaaggttttatttyggtttggtgtttygtgttgggtggagaagtttttygtttygatttggtatygtttgtattatttayggggtggaaaagttgtttttyggtttygygtttttttttygygygttttttttttttttttttttttttttttttttttttttttygygtttttttttttttaagttttaatagatgttgtyggatttttttygttttttygtatttttttttttttygtttyggttttygtttagtttttttttttttagttattttygggttyggaggggaygygttgagtagtaggaygtttgtygtygtagggggygaagttgggaaaatttggagtgttgttygttttatttttgttttttygttttttttaggtygygtygggagttttygtttttttygttygtygggtttttaagttyggagtgggttttagttgygaggygggyggyggyggttgggaggyggygygtygygggtyggggtygggggttgggggggagttygggygtygygagttaygygygygtttttttttygtttttygtygtygtygtygtygtygtygtygttttttttttttttttttttttttttttttttttttttttttttgttttttttyggtttttatatagatatatttatgtttgtttttttttttttttttatttgatttygygttttttyggygygtygaagttttatttattyggygaggggaagggggttygggygtgatgttattygygtttttttttttttttttttatatygttaggatattttttaaatgygygttttggtattygtgttgyg

SEQ ID NO: 6060 - DNA, 2119 bp, Artificial Sequence
  Description of Artificial Sequence: Synthetic polynucleotide
tygtygtttttttagtatagttttygtagttygtattygtttatagggttttygygattttagagtttagggaagaattgtygaggggyggggggttttttatgygtatggaagggaygtaygttttaggtttttattttttttttgatttyggggatttttggaygtygatttttygtttygtaggggygagggttttgggttygtagttagaygygggttttttttaaatttagtggtttggttttattgagtgggggaaggtatatattttttaagattaattgtttygtaatagggaatttygtaggattttagtattttygattttttaggtgaygttaagagggtgggttttattgtgtayggtggggaaattgaggttyggaggggataaggaaggtattygaggttaygyggttttttyggygggygggaaygtaggaygyggagttggggygygggttgtgygygtttaggttygyggttttyggggttyggttgtygtagygyggtygtygtygaggattayggtyggggygygggygggttttagtgygtaggygyggygggygggaggggaygygtttygggygygygygyggggtagtyggygttttaatttygttygtttygygtttygygtttyggygtttygtygttygtygttygttygtttyggygtygtygttygygtttyggygtttygggtyggygaggggygygttygyggtygyggtygttgtatggygttgagatggygggggygtygygyggyggaggyggyggyggaggyggygygggygagttygggggygtygagygggyggtygggataagtygtyggygygggtttygggygtgygaygaggagttygtttgtttagagttggaggygttgtttygyggttataygttgyggttggagtaggyggttaygttgaaggygttggtygtttttagtttgttggygggygygttggygttggtygagttgttgggygygtyggggttygygttyggtttggttaagggtttatattyggtgtattgygttttttttttggygttgttygtggtaattaaygttyggtttttgtaggtgttttagttgtagtaggtyggttagttggygttgttttttagttttattttygygttgttttgttgttttttygygttgggyggtttygttyggggtttygtyggggtygttggggggttagygatygtygaataaggggtttggtagttttttttggttattttygtgttttatgttttgttgttygtgygtagtttgttggttataggttttgggttygtggtggttgygtygtatttgttggttatagttattttggttttygttaagygtttaygtttttggaggayggtaagtgtagtygygtattttttatttggtttyggatatatttgttgggaygatgttgggaatgttyggagtygggygygtttttttttatgyggygggtggggatattgaggtttygagtgggggtgtgtttaaggttatttttaygagttggggaygtagtyggggttggtatttttyggttagggttttttttagagttataatttaygaagygtttttggygtgaagtgtggagaggggagataggtgtggagagagaaaggtttggttaaggttagggagttgatgagyggttagayggyggttagaggggttygtyggttttttgtygtatttatttttatagagggattgaaagtgggygaggagagtagatttttagggtaagttttaaggtyggttttgygygtagygttgggttttttttttgygtatttagagygygtgttgggttygttttttaattttgyggattygagggtggtatatgggtggtgggaaaggatttyggtttttttagttttgttggttatttttttgtggatatgttttyggtttagaaagagtggggtttgttaaggttaaatatagtttagtttttgtygttgttattyggyggttgttttgattttgttttttttgygttygaattttgttattgtttttttagtygggygggygagatggttgtaaggayggggaygttgtttgtttttygyg

SEQ ID NO: 6061 - DNA, 562 bp, Artificial Sequence
  Description of Artificial Sequence: Synthetic polynucleotide
tygtagggygaaggggtgygttgttagatgtggtattttygttttayggagatatayggtgttttataygttagggagaggtttgagaygtaaagagtygtygagygggttgygggattgtttygttgttattttygtttgtagttattttttygtaygtatttgtgtgtgtatttaggttaatatggaaggygttattttaatttttgtygtgagtaggtgggagggaagagagaygagaggtattttattggttgtttgggaaaatgaattgtattttttttttttttgyggaggattaattttttttattttttygggtgggtattygtattttggggtyggagtttgaattygggagttaaggggttttagttttagggaygtgaagttgagygtatagygggygtttttagatattggggaaagtgttttaygatgtttygagtttttttagtttygttagyggggygagygtgagggtgtttygatygattagyggtttygggtgtagggtggygggttyggyggygygygttttttttttttttttggyggttyg

SEQ ID NO: 6062 - DNA, 1404 bp, Artificial Sequence
  Description of Artificial Sequence: Synthetic polynucleotide
tygtttygttygaggygaaatygttgaaagttyggttatttaatttttgtttttataattyggaatttyggatattagyggttttagttgttggygygyggtttttttttagttttttggattttaaagttttttgttatagygyggygttttttttttttgttaatttttttttttgtattgtgayggaggtaaagtaatttagtttaggaggttgaattygagttattagagaaggagaaatagtgtygaaaayggttygtgygttattagggtagtttattaaygtattaattttaggttygttgggtagaagtygggaggaaatattttggggatygtatttttggttaaatgtttagtaygagttaaattyggtttttttaaagygagttaagtttattattataaagagatttttygagtgttttgttttaattatattttagatagttagttttgtggttgttgtttgattttaattttttttttaaatttaaaaggatgtatatttttattagayggaaygtygygatttttyggygaagaaaaaggygtygtttattttttttttaaaaygttataataaaaattattaygtttttttttttttttttttgtttttttttttttttttagattaataaggaaaggagygagygagggygtagatgttttttggttaagtatttttyggatgttttygattaaagygtttttaaatgaatttgtagtttgyggaagtyggggatatatttatagaygttttttgttgtttagattaggaggggtggtgggggaattaggaagttagggagagagtaaagtttttggaygygttttaggaggaaaattttgtgtagtgttgttaggyggaggttygttagaaggtttygtagttgttgaggyggggtgggattgygttttaggggtygygttgaagttggygtygygattattgygtatygatttygtttattttttgttygttttygggagttttttttgttttaggayggttttttattttttaaattatgttygttttttatttyggatttatagttatttttaaatttyggttattttygtttagtatygyggtttttagtatatttttttattggagtagtaggtgatttaaattagatttatttgttgtgaatttttttttttttttttttttttttggtgtttttttagggagaggggaaygggatgtaggttgaggtttagyggygyggtaattyggggtatyggygygygtttttttgagtygtagttttggttgagtaagyggagtygtyggtagttttggtagagtygggaagttgyggtygtaggggttaggtygggaggtagggggygttgttgtttttttygagagtygygttaggataggyg

SEQ ID NO: 6063 - DNA, 819 bp, Artificial Sequence
  Description of Artificial Sequence: Synthetic polynucleotide
gygagaygtgggaaattggygaagttgttattagtygtyggygtaaggagygygagagttttgggtgygygtagggtatttattttttattttttagtaagtatygtygtaagttttttaggtgtagaaattgttggygttgttttygtagttttygtataggaattggyggtagttttgygtgtatttgtygtagtagtaayggagaagtagggttyggtagggttygtagtttaggggtaggagatagattttygygttattttttgaagaaggggtagaaggagagtaaaagagagggaaagtggttaggygtagtttttaggaggaaagaatatttyggggagttttgttttttttygagyggaggggtttttgtagagaaagtgtaaatttgggagygagttttttttgttagyggagygygyggtagggatttggagaaagygaggtttggagggygtttatayggggttttatggttygttgygtttttttygtyggttggggagagaagtttttggagyggttagatatttgttggtttttgagtagtatygtttagtgtagttttygttaggaaaagtagtagaatygatagttttagggggygagyggggtttatggtgtagggggtygggyggttygttgggtaaggygttygagaaagygtttggygggaggaggtgygyggttttttgttttaggyggttygggtgttygttttatgyggggygagygttyggtygattttygtyggggyggagtttgaggggtggttgatttatgtayggggattgttatttygtygttttygyg

SEQ ID NO: 6064 - DNA, 1128 bp, Artificial Sequence
  Description of Artificial Sequence: Synthetic polynucleotide
gygttggygggygtattyggyggyggygagygyggaggtgttgyggtatttattatggtatttttgtttyggaaygtagtaggtggggttgttygtaatatgtagggaaatgagtatttygttttgttttttatttttttttagtttttygtggtgggtgtataggaaaaagaagggygaaaagygggggtaatagttagtygtygygygygtttttagygtygtttttagtaatagygttaggaggaaagtttgtygggtttagttattgygttttatgtygtygtygtygtygtygtygtygygygttttaygygtygttygtttatttagttttggagaygtygggayggaggagttaygyggagagaaggygagaagaaggyggaygggagyggaaygggttygggagygggtttgggagygggttttygtygagaagtttygygggagayggyggtttttaaagttattttgggtygygggagygygggatyggggttgygggygtygagagygygtygtttgtygttttygtgygtygtygtygtttttgygygaygtttttyggttaggtttgggaaagygttygtttygttttatatttttttaaagtttygggygtygygtttttttygtygtygttataygtgtttyggtygttttttygttttygygygtygtttygttygtttttygttttttygggttggttyggyggtatttygygyggygaggggygtaygygttttyggagttttyggttagygttyggttygtattygggaggatagggaggggygttygtyggggagygggayggggaygttgtygaggatygttgagttygygatttttttgygagggaygttaaagtttygtagagggtatttttygtttagttgtttgaaggggaaggttagtttttttggtygttagtgtgttttgttttttttgggaggatgygtgagggaaggagaggggyggtagggayggtygttggygtyggtttttttgtttgagtyggttgygtttygygtttttyggggttygtagtttgttagttygggyggttygtattygttttgggaattygttygaggtygygaatygttaggggttttygyg

SEQ ID NO: 6065 - DNA, 1128 bp, Artificial Sequence; identical to SEQ ID NO: 6064
  Description of Artificial Sequence: Synthetic polynucleotide

SEQ ID NO: 6066 - DNA, 1128 bp, Artificial Sequence; identical to SEQ ID NO: 6064
  Description of Artificial Sequence: Synthetic polynucleotide

SEQ ID NO: 6067 - DNA, 1921 bp, Artificial Sequence
  Description of Artificial Sequence: Synthetic polynucleotide
tygyggatttgggtttggygtttattttatygttaggattggatagaaaggttttggtygaggttattaayggagaggttagagyggagtttttggtttagaatggaggtagtagygagttttyggyggtttttaggagtattaaggtggaggyggtggaggagtyggaggyggtttttattttgggtttyggagagtttgggttttaggtttygtygyggaygtygtygtygygtagtttygtttyggttagggttaaggtygagttgtttagttttaygtygggttttagttyggtgttyggygagttgggtttggtyggggttttgtttttttygtagtaygtgttygggttygaygyggygtttttygtttyggagattttggttaagatgttygagttggtgtatagtyggttgtagtagggygygggygygggygtyggyggygygtagatygggttttttttyggggtttttaagggygttaygtgtttygagtgygagattatttttagtaaygttaataattattaygtgtataagygtttttattgtttaggtygtygtgygttygaggaygygtttgtygygygtaggtttaaggygtttttyggttyggttygygygtttttyggttagttygtygaattygaygygtygygttygttttygggtttyggagygygygaggagggggttgggggygyggttaygttygaggayggygygggyggtyggggtagygagggtagttagagttygggtagtttygtggaygaygyggaggaygattttagtygtaygttgtgygaggtttgtaatattygttttagtygttaygagatttatatygtgtataagyggtattattgygtttygygttaygattygtygtygygtygatyggtygygttttygggattttttgggtyggtygygttttyggttttttttttygtygygtttgtgygtaygygtagaygtygtaagttttaygagttgtaygyggtyggygtttygtttttttygtygttyggttaygttttygygttygagtygtygyggttyggaagyggaagyggaagyggtttyggtttygtttttgygygttygttyggtttygyggtygayggttttatygatttgagtaagaagtygyggygttygtttttyggagtttyggtatyggygttggtygattattaygagtgtayggtttgtygygtgagtttttatagtttygaggtttatttggygtataagaagtattygtgtttygttgygttatygttyggygygttyggtttgttygtygtygtttgtttttattgtttttygaayggttyggtgygyggggatttgttggagtattttygtttggygtayggtttgttgttyggygygtttttggtyggttygggggtygaggttyggaygtyggtygatygyggtttttygttygttttygttttygtygttttttygtagttygggtttygtggttttygggayggtttyggttyggagttttaggagtygtygttyggttygttttygttttyggtygtygygttygaggtygtgtygttttygtyggygttttttttttattyggataagggygtttagatttttagtaagggtaygtyggygtygttgtttaayggtaattatyggtattgtygtttttgtaatattaagtttagtagtttgtttatttttatygtttataagaagtattattgtttttygtaygtygtygagtaygtgaagtgagygtttatattatagtygtagaygttttgtaygtttygttgygatgyggggagggggtygtttttaggtygtayggattgtygtttttgggaatttygttaygtataggtttyggyggagggggtygtagggggtagygttyg

SEQ ID NO: 6068 - DNA, 2872 bp, Artificial Sequence
  Description of Artificial Sequence: Synthetic polynucleotide
gygtttttyggaaygttaygttttgygattgatttgygagtaaagtagygggtttagtttgyggygygyggaaaaggyggtyggygaagagtygttyggttygygggtaggggagggatyggagggagayggyggggagggagygttggtttttttttgggttggggtttyggaggaagtttttygttaagatttyggtygtgygtttttttyggggttygtttttttttttttyggttttttttttgttatygttttgggttttaagtaggtygtttagtygggttatattyggtggatagaagtygggatttagggttggyggttgggttygtgtattttttaygygggygtttyggttttgaagtgygygyggagtaggttttgatygttttttttttttttttttttyggttatttttgttttttttagttattgataggatttttttygaaaattttagattttttaagttttagtttggyggttttttttttttaagtygygtttyggtgatttgggttgygygattaygaggaagttygagaattttttggtttaagtgagataggaattagggtaataatgaagagaaagatattyggtttttttttattttaggtygtagaggygtatatygtgaaaagaaaggttaattagygttttaaygtaygttygggttttttttttygattattatgtatttttaattttttgttatygagggttttggattttttygaggttttttgtattttaagtggaattttttgttttatttgttagtagtttygtttgttgagaggaygtattttggggattgttaagaagtagtagatataattyggttttgttaatatagtatayggttttgttttygtttttttttttatttttttttttgattygtygtttggggygagttggagaaggyggagtaggaggtggggagaagggtgggggtgggggaaggtttggygtagtataaataagttttttagygggttgtttatatagtaggtggatttgaygttagttaggaggtttygttgtaaattygaataatattttttttygygtttttttttttttaaagaagttagggaayggggggagataggtggaygggggagaaaggtattttaattagttggttttaaatttattaataataataaygataataataatgtaaagtaaaataaaataaataagtggttyggyggtattttagaattttttgyggygttttgttttttatttygttttttygaggagaggtagtttygygagtagtgtgtgtatagttygtattgttaataataygygygygyggtygggtgygygygtttgttagygtatatttatatatatagatatatagatatatatatatatatatatatatatatagattygggtggggggagyggttgygygagatagygygagttttygagaaagygygagataygtyggygygtgtagtttygyggtygtygtttygttttagttttagtttygygttattygtagttygttygygaaygttygtttyggttatttatgyggyggtygygttygttggttgyggttttttyggtttttttttttttygggygygttttttattygyggtagtagttgttyggattygygygtgggtgtgttgtttgggggtttttgtttygtygtygygggtgttatttttygggaygttgtttayggygttttyggtygyggtaagttttttggtttttattttggygygttatattttygtattttattttgttttagttatttttaygttgggtygagttgygattttattttgtttygygtttttttygyggtggygataaagtttygttttaaaggtagygttttgtttgtyggggygagtgtgatatgtgttaaatttgggttyggygttggggtygtatttyggatttagtattattatttgttgtttttttttattttgttttgtgatgggggaaaaaggggtggagaggggagatttgttgttggtttayggatgatttttagtttggataatgtaaaatgttgtttygttyggagagatttyggttggaggagaatgtgtgtygaaatattagatgtgtgtttgtttatttttttttttttaattgtttgttgttttttttttttttttttygtatttttatttttaatttygggaggagaaataatagtaaaaatatttggyggttagaagtatatattttattgatttaattgttgatttttatttatttagttgggtaagtgtaygtttttygygtttaagttgggtattttagygtttattttagaagtatttttttaggaaggagagagatggaaaggggatatttttgtttttggagttaagaaatttttgggttttattgaygtttygggataatygtgtatagggatgattgttgttttgatygygtttttttttttgtttaygygttagtaygatyggtttttttyggtgtttggtttggttttatttttatttygttttagagaggtygtttggttgtttgtgggtgggtttggggtgaaatygtatttygyggtatttggtgaggggaygtgggaggagygtagatatttttyggtgatagggagggttttttatttggttgttatttggaagtttatagtggtttyggygggtaggygggygggtagagygygggttygaaygtttttygygtttgyggyggygtaygtgyggyggyggyggyggygtyggyggygygggygggatttattgggtggtygygygygttattygygygttttttgygygtttttgtttattygygaggtygtaaygygttttgatattyg

SEQ ID NO: 6069 - DNA, 2906 bp, Artificial Sequence
  Description of Artificial Sequence: Synthetic polynucleotide
tygygggggtgyggttttgygtaattgggtgattygygtgttttttygtattttatttgtattaagggagygygtgttagaygaagggaattttttttttttttttggtgattttgttatttttttattaattgtaygaagtttaagggatattygagttttttggttgggyggatgggtttygygtttggtatggttgagyggtttatttttattttttygtttttatttttattataatagygattatttagttygttaggagtttttgttttttagygtaggtttttttttttttttagttttttgggttgttgaagtygggttttgggtagatagagattggggtygtggggagagygttaggttgtttttgtttttttygygtttyggggtatttyggygygttggggatgtagttttygttttygtygtatttggtygttygagygttygygtttaygtttygygyggggtygttygaaattggggtygygttagtygygggagttatygaggagttgttggggtgygtttgtttttgttttttaaataagattttygagattttttttttatttttttaatttttagtaggatayggaatttyggygtttttygaaagttataaaagaggggtayggaaattttaagttygtygtgttaattyggagaaygtaaattygaggtagagygtgygtygtgyggggatgtgggtgtygaggatttygaagygttyggtttttttygygatttttattttttttagattttggttagatatttatttagtttaygtttagagggygggggttatttygatttatttyggaagtygttaattttagaaattttttttgttaggttygygaaaygaaggtatttygttatttyggyggggtaagttyggattttattagggtaggttygggaggttatttagggtagaygattygaggtagagygttttaaaattttgtygtygtaygtttagttagagygtygagygygtttgtttttttttygttattttttagttttttattygtygattaaatttttgggggattatatttttaagttttgggagtttygggtaaagttttttttttttttgaatttttttattgtaatgtaattatgggtagataagaggggtggttgttttgttttttgtaaygtaaaattaatagatatttaattaagttttaatgttyggttagtttttygttttttggtgtttattttttttttttttttattttygttattttygttygttattttttttatagattayggatatgtagggttatttatttgtgtttaggaaaaataaattattagagtgatatgagaaggaatggtgtatttggttgttygttgaaaggttttagagaagaaaayggaaaggggaataaaayggggggattttttttttttaataagtagggygttttggggaagtttgggggttaggggttttttgtttygtggttyggtatttgtttttttyggagtygttttttgttgtygggyggygagttttattttgtttttygtagagggygyggtgaggaagttygtygggggttygtagttttatgttagygtygtygtygtygtygtygtygtygtgtgaggygagtatagyggtygtatttgtggttgatttttgggttgagggggttgagttggtttagtaggygttaagttttttttatgtgaataataaatatttttatyggyggtygygattggtttgygttyggygtttttygatttttygttygyggttatttattyggygyggygyggggagtygyggttaggatygygttygggatygttaatygtttygygttaattagttatttygggaagygggaggaggaattttygaggggygggagtttttggatttyggtgttatttagyggttttggygygggtagggagggggattttyggttygyggattttttttygttttttagtttgaagygaygaggagattagaaatgttaatagttttgatttttaaaaattattttttttttttygtttttaagaaaaaggggaggatttaattatagagtgagagggtgggaagaagygggagyggtagaagaaggaatatggttgtggaggagtttagyggtttyggttgtttggygagttygggatyggygyggggaggygygaygttygttygagtatagygggtagtattygygagttygggttttyggtgaatatagttttagaaagygttatygagaataatatatggtagatgataagtgtttygttatatgtttttttttygggaatgtttaaagtagagtyggtaagtygygyggtttttttgtaaagtttgtttggygtygygyggyggtttygttatttgtttygtttygyggttttggygattgtttttttatttttygttttygagggtttgagggaygygtgtaatagagtttttagggttygaggtattatatagygyggttygttgygggtattgygtaggaaggggtatgggtggttatygggayggttattttattgagatgatttaaggagtygtagaygyggggtaggaaatttygggggagtygtgttygggttttgtagggaaatttygggatttttttygtatgtygtatgyggaaatttgtygggttygaygtgtatagtttagygtttttttttattagttattgtttaggtttttygattttgtattygtyggaatgagagaaagtagtttttygtygtttagttttygggtagttgtttyggtygggttttgygttggtgagaaagttttatttagaggyggtygygygtaattgtaggyggygttttaggttygggygagttagggagagyggggygyg

SEQ ID NO: 6070 - DNA, 2906 bp, Artificial Sequence; identical to SEQ ID NO: 6069
  Description of Artificial Sequence: Synthetic polynucleotide

SEQ ID NO: 6071 - DNA, 1696 bp, Artificial Sequence
  Description of Artificial Sequence: Synthetic polynucleotide
tyggagtyggagtyggygaagtygyggagttgaggygygtttgggagagttaaggttyggygggttatgtaggtgtatgttttttttttygtttaaggagyggygttattagygtttttyggttttgtttttggattttggtatyggttygttttagtygygggggaaggygttttatygttaaagtgygtttyggyggtttyggttygttttgygggtygtygtyggagggagtgygggggygtttygaagtygtttaggtygtattygttggatgttgygttttttttttyggygtyggtygtttygggtyggyggtagttgattgyggtygtgagttygyggagyggygagagttaagaggaggtgttygyggygttttygttttttttagatatatatttttttttttttygttttttttyggagggtggaagagataaaaayggggggttagttttttagttygtyggttgtyggtaygyggggyggygtttygttyggttttygaggattagyggygtggyggttgygttyggattyggttygtyggtyggaggagygygyggygttygyggtygygttygtatygtaggtttttttagagagttygggggygggygygggttyggyggyggyggyggtygtagttttyggyggygygtaatygttygtygtygttygtygttgttyggttttyggygygtygtyggtttyggttttgtgyggagggagygagttygyggtttyggttttyggygtttttagtggtygygtygttagyggattgttgtagyggygtgagtagygggggtygyggttgygggaaaygtttyggagtttaggaatatagttttygttggttagyggyggtagtagtagtagyggggtttttgygygyggygtttatygtttttttttygygtygggttygyggtgttgtaggyggtagttaygtagattgtttttttatttttttgttttttagttagaaygtgaatgtattgttgaygtatattgttttgggagaagattagygtgatgtagtgtttttatgtattagygtygtttttttttygtygtttgtttygyggggttaaygtyggygttttttagygtygygtyggtyggygtygygtagtttygygttttyggtygttygtttttttttttttttttttttttttttttttttttttttttttttttttttttttttttttttygggtygtttttttttygttttttttagaygagyggagyggggttagggygagygggygagygagtyggagtgagygttaagtgaggggtygygygtaagtygtaggygttygtagttattttgggtyggtyggagggagtagttgggtggtygttgataggttggagyggygyggggttgyggygggagagttygygtyggttttygtttttyggttygtattyggggttttttggttttgaagagyggggtttaggggttyggyggttygyggyggggttgttgtatttggtttgtttttygttyggttygygttatttttattttygttgattgttgayggggygyggattygygttyggagttyggaattgygtggtggggattygggggayggyggtyggggttaygaggtttttaggatygagagttygggtttygttgttgtattgtygttagtttttttttyg

SEQ ID NO: 6072 - DNA, 2054 bp, Artificial Sequence
  Description of Artificial Sequence: Synthetic polynucleotide
aygyggygatgttttaagtygttttttgtttgaaatttyggygtattttyggggaagtagtgttaygttttagaaaggygtttgtgttgttttttattggggaaaygtagtgtttgttttatatgygtygttttatagaattgtagttttaatygtttatttggtttttttttygggygttgggttattattttttttaaatatgygttygaatatttgtgggtttgtttttygttgaaattttagggtgtttaaaggttayggggtygygatgatattgggtaggttttyggaaattttttaggattttttttattttaaagtttagttagggaygaaaggggttgggagttgaaaaattgtttttttaattttttygggtgggaggtagagtygggaatatatagaattttatttygaaagtttygggaaagagaagtttgagtttaggagygtgagaggagaatatattygggaaatttttgtttyggtygttgtattttygygggygtttaggtgggaygtgggtaggtgygygagygtygtgtgtgtyggtgtggatttgtgtgtgtgtttgygtgtgtgygtgtgygtgtgtygygggttggtttygggatattgaggattttygggtyggtttaggtttgttygattttgttgttttygtygttygttyggttttatttttyggygggtyggttttttatttggaygygtygygttttttttttttagygggagygtygtattgatattgtagatggagtttatgtygttgtttttygtttttttttgaaygtgtgygtgtgygygygtgtggttgttttttttagttttagtttygaaygtaaatattttatygaggtatagggaagtygggagtagtygaggaaygyggagggygtygaattagagtttgyggggtttgatagttttttttgyggygtttaaggtgggygtaatgtttaataaaaaggtyggaaaatggggatygatttygaatattttttttttttatttagtttyggagttygagtagyggyggyggttttygggggttgyggtggygaygtygggttgttttttttygtttttattttygygggttgaatgtttttgatgttaagygggtatagyggygttatttygygtygtttatgttygttyggtygggtygttgttygggygyggygagtgygygggggattygtyggggagygttttyggygtttttgygygtttttttgggtagyggyggtygtttttyggtagttygyggtyggtygygtygyggtagtttttatttttgtygagatattygtygggtagtgttttggggtyggggttggggggtygygggagtygtyggttgtttttyggggaggtgyggggttgyggyggtggtggttgyggyggttggygttgyggyggyggagagttyggtygygggtygagtygggtttttygggygygttttyggtttttygggygggttgttygtaaagtttgtagggggtagggagyggggtygtygttggttyggtygtygtyggagttttygggttgtttgttgtygtygyggttygttgttgttgtgtattgaagttyggttaagygttgtaaaaattttagttgtttggygttttttgggttttttttttttttttttygttttttttgtttttttttttttttttttygtttygtttttttttttttttgtygttygtygttygtygtygttttttttttggttygttttygttggttyggagttygyggttgatatttagagygagggagagyggtyggtagagggggtagggggygtttttttatatgtttttattygtygtygttyggtttgtyggttttttttygtattaaygtttgtygatatttttttgggttttttyggttygtayggagttattttggyggtggygatgtggggyggagagaggggtatatatgggtgatyggagygtayggygygygtttagagggaggygtttagtygtttyggaatttgtagttttgggygttggtygtyg

SEQ ID NO: 6073 - DNA, 1258 bp, Artificial Sequence
  Description of Artificial Sequence: Synthetic polynucleotide
tygyggaagygttttttgttgggtagaagagtgggtttttygtygyggygtatttgtttyggttgtyggtttttygtatttatttgtaygagatttgttttyggaaagttaagttttttagttttttttttagygtttygtttttttttttttggtyggyggtygygggttygtttagggtagyggttttygtygtygyggttgattttgygtttygygggttygygtygttttyggygtttaggtagtagttttyggygtygttttygttgttgttgttgtygttygtygttttttttttttttttygtygaggagttggggtttatggygttygtttyggyggtygyggagggagygtaggyggygtygttgtaggggtygggygggttggyggyggyggyggyggyggttgtaggagygygggtaggttygygygtygttggtaggggtagtaaatggtagttttttttygtagtatttattygyggttgtatygtatyggggtattgtgggaaatttygtttattttttygtttyggttaattagaggtygtygtttttygtttttygygttttttygygtyggttygtattttttagtttygttggtttttttttaaatttygagygaaagtttaagttgaatatgaattttgttyggaggygaygggttgyggyggagggggagagagaggaggataggttgygatttygggttggggaygttagggtagggatagygagtattaggaaggagagygttyggggaattygagtggtygygttttgggttttgtatygtgaggttggggggattaggatyggygggygtttattttggttttgagtttagttgtygaygttgggttagtattttttttatygtygttttttagtgagtagagttgggtttaggtagtagtttttgggygygggaaggtagygggagttgtatttaggggaggggggaggtagtaggagtttygttagtgggaattttggagtgaattygtyggygggtgttaagtygaagygtygattttttgtttttggattggggttyggatttttgygtttttaaattgygttttygttttgttygtygttyggtgttttttttaggygtagtagattttyggtaaatagyggttaattygatggaatyggattatagggttttyggtgaagtagaaaggyggaggaaatttaggaggtagaagtgaggattttggygtttggygtygttgygttgttyg

SEQ ID NO: 6074 - DNA, 628 bp, Artificial Sequence
  Description of Artificial Sequence: Synthetic polynucleotide
gygtggaggttgyggttyggyggggtaggygttgagygtatygyggyggtattyggygtagaggttttagygyggggagtygggtttagtttyggtttgttagygtygyggttttagtttattygaggtyggtttggggggttygtagggygygyggagygtygagtgygygtygggttgggtttygtatttyggtgtaggagygygggygyggygyggyggagygtttygtatggagtyggttygggagtttttttygygggttyggtygtygtygtttttygtygygygtttygygttygttttygtygtttttaggtygygttygttygtagaggttgaggttygyggtttygaggggttgttgyggygattygggtygggttaygagggtagtattagttggaaggyggttttggagggtaagygyggagyggttttttttttttggtttagggatttttgtttaggttygattygygattyggaggyggttagagttattttggtygttgtttyggaggggagygttgggagygyggygtygggaygyggyggagttatttattttagggyggttagaygtyggttygtggggtggggtgggagggaatygggggttatygyg

SEQ ID NO: 6075 - DNA, 1075 bp, Artificial Sequence
  Description of Artificial Sequence: Synthetic polynucleotide
gyggtttttagggygagtattttygtttttagygttttttggttattaaagaaaaattagaygtttgygaygggtttttttttygttygggttttttygtttttygtttttygtyggttatygggygttattatygygggtagtagggyggggygttttgggagtygttgggtgtttgggttggygtttgtaggggtttygygggattaggtyggttgtaggggygyggyggygtagtttattttgttgttgaagagtygygagaggttgygtatgggyggagggggtygyggggtatttyggagttygygtaygttttagaggygtagggygtygtygtgygaggyggtgtagagtatttggtygtgtatttgygggygtaggggygggygttatyggtgaygyggtaggygggggggatatygttgttygygtggatggatyggggyggggtatttttttttttaygggyggyggtttygagaagggtagagggatttatttggatgtagttgatgatgaatgtgtggtttyggaatatttttygtagttttttagattgygygtygaaggttygggygtaagygttttygttgttygtgaatattgyggatatatagygygygttgggtttttttttttgttyggtttttygtaagtagggatggggyggygagagygtgatttggggygttttygagatttygttttaygggggtattttgaggtttatatgggaagtggatagtgtttttttagagaaaygggtttttayggttattttgttttattttgtagatgtttgygygttagttggttttgtttttgttttgttgaatatygttygggtttagtttttatttygyggtttggtgaagttggttttygtgtttgtttgggaagtttttgtttggggataatygttaggttttygagtygttttttttttatttttygttgygtyggtaattttattttttygtttttattaayggatyggtatttaaattaaagtttagttttttggggtttatgattaygtattttygggatttttagygggggygagttttyg

SEQ ID NO: 6076 - DNA, 5566 bp, Artificial Sequence
  Description of Artificial Sequence: Synthetic polynucleotide
gygtttttttagygatyggggtagaattaggaygtgtaatgygattgttttttttttttygtttttyggtagagtttttgttygygttaatttatttattaggttttgttygygttaygygygtttttggtaggtttggggyggggaaaggygaagygttgggtaygygagggtttgtgtattttagtttttaygaygtttttggttttttttaggttygtygttgtygtatttaatttttttttttygggggttattttgaagaagttttagattttagatttagttttttagatttygttttygagttygttyggtgggtttgtaggtyggttttttttygtttagaggagagygtagataygtaatgttygttygttggtttygttygttttatttttgtttttygygttttttygtttyggtttttgtttataggtygggtyggaaygttagttttaggagtygayggtggttttttgttygtttyggggaaggtgttgtttttttatyggttttaatttttygttyggygtttggggtttggttgyggggttyggtttttagtygagggygtagggttggttaggtttgttttggttgaggtggagatttygtttttagggattgttgggygtttttgtttygygagtaaygagatygtygygagygaayggtttttattgagtttatttttttaagtgttattaygttaagttagagaagygaggygagtggaggggaygtagaggggtyggaaaagttatttttttttggtttygtttttagataaaaaygggagtttggttyggtattygggygttyggtgttttyggggygttttattgaggttttgtttgtaaaattagygttygtgttttgaagygtayggygtttggaagttgtttttttgttygtttttttygaggtttttttttgtgtagygagtttgagaaatatggaggatygtttttygtaagygggtggtygygggygtttttygatttttgggtgaagttagagggaaaayggggttttygggttagtgttttattttttatttygggagaaattaatgttyggagagggttygtttgattygtatagaaaggtygattttgagggyggyggtygttygggggagaaagyggaggttttgggttygygggagygyggtagtyggggttggtatygtagaggagagataygttattgtttygtatttttagaaagygygaggygtygttttagttggggtaggyggtygaggtyggtttttatgygygtttttygaagttttttgaaatattttgyggagtttygtgtgtatagaatttagtatygtttagtttttgggtagtttaattttttgtagttttattttagttttttyggttttttgaayggtgattttttttatygtttttttagagttgtttygtgtttgggtttattttggggggttyggtattttttagttatttttttttttatttattttttttttttttatttttttttttattttttattttttttttttttaggagagygatttaygaatttttttttttttagttaattttagggtttagttygtagattttgygagggtaggtttttgtttatyggttygttaggygttttggaggtgaygttttgttttttagagtttttgttgtagttaygaattggggtttgggtygtaggaaagtatagggttgaagtttagygttttggggttatttatattgaggtagttagaggtaaagagttttaagaatttagaaaatattttttaggaagtygtttaattggtttttatgggataggtggagttattaatttgggatggttttgtaggaattaaagagtttagggttttttttttttttaatattatgtttaggagatttagagtygttggatttttttttttttgattggtgattattagagtttttagagttgtagaaaattttttttttaaaaaattaagtaagygttaataagattttttataaatttttattagttttattttttyggggggtaggtagattgtggggtttgattttttgagattyggggaggatttttggtagatgtgtgtttagttagaatatttggtaaggatttttttaatgaagaaaaagtggaggaatttagttttagygagaagaggtttttttattttgttttagatatatyggatagagggtatattttgattagagttaygtttagtggttaggaggttagtttagtatttttttttttattattttygttttgggtgggggggtaatttttttgggagtagttgtgggaattgtygttttttattttagtttagttagtattttgaagtttgtaggggaaggatagtaygtgggatggatattggggaaggagtttygtaaggttagggtgtaatttttaggttttaggtggtttggtaggttaygttgtttyggagatgtttgttagattttttaagtttatttagggtttggtagtaatttgttggttgtttttgygggggtttgggttgttgagtayggtgtagttgtttagggttaattagttttagggtgttygtgttaggttgyggttttttygtttttttygtattgagggtatttatggygtgtaaatgttttygtatttttagagttgttttatyggatgtttttaggaatttatatatttttataaaaatgtattttaaatgatggataggygagtttggggtaataaygggtgtttggtgggtagataagagtaaatgggaaggagttygagggaggagggggaagagaagaggaaatagaatttttagttggatattttgataatagttggaaggaaagtttagaaaagatgaagagagaggaggggagaaattaattggggtttttatttttgtygttggatttttaattttygttttaaatgggttttgtttttyggtaaaattagtttaaaggattttaaaataaagaaaaygagatgatyggtttgggagttttttaattagagtagagaagttagaggggggygggygatttggttttgaagttttagttgaatagttattttttttttttttggtaaaaaggatttttttagaattttygaggtttttggattttttttttygtaaatggagtygtatattgtattttttygttttttyggatygttaagtatgttttatgagggtygttgttttygggtggaatgyggtygtatgtaygygtttttttgtataygtatatataygtatatttataataagtgtttgtaggaggagtgttttgygygttagttttgygtttaagataggaagttgtygggttatygagttaaatgggagtgatattatttttttttattagtaaggaaagyggattataaaagtttttttgtatttyggtagtttatttaatattatttatgtattttgtgtaaggaattgtgggatttygttttayggtaaataatatggaaattttaaaaatagygatttttttgtgygtgtttatttaygygtttyggggtgatttggyggggttgtygtygggtgatttatatttttgaatygygaagygatagggaaagygygggygagygtaggagaygyggtygggggttttttygggtttttgggttttygtattyggagygggggaygyggtygttttaaggggaggaggggyggygggttgtttttgttatttagyggyggtyggagygttaygtgggygygyggygtygyggttattggttygaggtaygtgtttaggagatyggtttgygaygttattygagggggttttgttaaaaataagaataaaaatttagagtgaaagtgttttaggttgygtygagtggtttggaaattttygagttygygyggaggtygaggyggygagggyggyggayggtyggggagygygggyggtttagttyggttyggtygggttttggtttygygttttttatttatgygattygggtygyggagttttgyggggttyggygggggygyggtygtaygtyggtggggygtttyggttygtagyggggyggyggtygygaggagggggtttttatgtgygtgygggyggtggygggygygttgatygygggygttyggtattttygagggtyggttagggygtgygggyggggayggtygggyggyggyggyggtyggagtyggttygggygggygtgagygtyggggaaygygttgtttgtatgygygtagttttygtttygggyggtttaggyggyggygtyggagttygaggyggtyggaygyggagaggagyggggagttygggaggyggttygygttttygtyggattattgygattgtttagatttyggttgygyggygaagtygaggatttggttttgttgaattttttatygtttgggygagyggggyggttygtggtgtttttaatttagttygtggatttaaaggtggtttygygtygagygyggtyggygatttgtaggattttagttttggtygyggtygtygygtaygttttyggaagattyggyggggtgggggygygggggttttygtgtgygtygygggagggtygaaggttgatttggaagggygttttyggagaattagtgtgggatttattgtgaatagtatggaggagaatgattttaagtttggygaagtagyggyggyggtggagggatagyggtagtyggaatttagtttyggyggyggttygggyggyggyggyggtagtagttygggygaagyggatatygggygtyggygggttttgatgttgttygyggttttgtaggygttyggtaattattagtattygtatygtattattaatttttttatygataatattttgyggttygagttyggtyggygaaaggaygyggggatttgttgtgygggygygggaggaggaaggggyggyggagtyggyggygaaggyggygygagyggtgyggagggaggyggyggygygggyggttyggagtagtttttgggttygggttttygagagtttyggtagaattygttatgtgygttyggygygggygggtygtttttagtygtyggtagygatttttygggtgayggggaaggyggttttaagaygttttygttgtayggtggygttaagaaaggyggygatttyggyggttttttggaygggtygtttaaggttygyggtttgggyggyggygatttgtyggtgagttyggattyggatagttygtaagtyggygttaatttgggygygtagtttatgttttggtyggygtgggtttattgtaygygttattyggatyggttttttttaggtgagttygyggggattaygygtttyggttygtygyggggaggttygyggagttggggggyggtgttggygygggaatttatygggaggaaaatatttygaatttttttygygtataygtataaagatttaygygatattgtgtgaagttgaygtyggttygggtagyggttaggagtttagyggtaggattgattyg

SEQ ID NO: 6077 - DNA, 5566 bp, Artificial Sequence; identical to SEQ ID NO: 6076
  Description of Artificial Sequence: Synthetic polynucleotide

SEQ ID NO: 6078 - DNA, 1164 bp, Artificial Sequence
  Description of Artificial Sequence: Synthetic polynucleotide
gygatttgtttagygttaaatygyggttttagttttttttagttttyggtttagtyggtttattagtyggttygygttttgtagtttttttagagggaygygtttygagatggagagtaaagttttgttygtgttgattttggtygtgtggttttagagtttgatygtttttygyggaggggtggtygtygtygatygtaagttttgygygtaaatttttttttatttgtagattyggygggtggttattgttattygaattgaggatgagaagaaggaagttggaaggggyggtggatgygtttagggatttttttagtttgggttttagtttygaaayggttttyggagtgggatttaggaggggtygggagggaattttttttygatygtgaagyggyggygtttagttttygttttttttttttgtygggttttygygttattttttttattttggttgggatygygttttygggttygtaggtttygtyggggaggtttyggggtgtgggggtygggayggyggaggyggggagtaagggttyggttggyggtgatttgtagttatttttttgtyggaggggttttggaatgaaaggygygygggttaaggtgatttygttttggttggtattgyggtttagttttygttyggggattygygggtygattgtggttttttttggggaagtyggggygyggggaggygtttygggtattttagtygtayggggtaygttygttttyggyggggtttttygtttygttgtgggagtggtagtgggtgtyggggtggagaaagtaygygtggygyggagttttggggaygyggygttttattygttttggggagtttyggattttttttagtttttaggttygtatgtttttttttttttagtgttttgagaatttagygaggggttgattttttygaaatygtggygtagttattagtaatttgtggtygtygattyggggggttgttaggtttgygtttggttattttttttgttttgggggttgaggttagtttygggygttyggtttygtygygyggttgygagtaygtggggttgaygggygtygygtggaggtagygagtataayggtggttatygtygttagggaatygttygttygttggggtttaggygttyg

SEQ ID NO: 6079 - DNA, 1495 bp, Artificial Sequence
  Description of Artificial Sequence: Synthetic polynucleotide
tygtaaatttttttttgygtygttttttttygygtggaatgggayggagtagtttttttaggygttgtttggttgyggaggggagygggtagygagagtttygggttttygtttgggttttygggttttyggggygttggtttyggttttygygtagygtttagygatttttgtygggggttttyggtagtygygtygttatttttygttyggttagygygggaggaaaaggggttgygttygggagygtygagtttaggtttttttyggtggygtgttygygttttggggtgggggtgtggtggggaagagggagggggygaggttaggggagggtgygaaggaggygtttgtttttaatttgygggygggaggtgggtggttgyggggtaattgaaaaagagtyggygaggagtttttygaaatttgttggaatttygggttygygyggaggttaggagttgagyggyggyggttgtyggaygatgggagygtgagtaggayggtgataattttttttygatygggttgygagggygtygggtagaggttaggaygygagtygttagyggtgggatttatygaygatttttyggggygataggagtagtttygagagttagggygagygttygttttaggtggtyggatygttygtygygttygygtygygttttttgtaggtaaygggagaygttttygygtagygygagygttttagygyggtygttygttttttttttygagggataaattttttttaaattygattygagtttttggattaaattygtttgygtygagagtygttygygtagagygtttygttttyggygagatgttygagygtaaagaaggtagaggtaaagggaagggtaagaagaaggagygaggtttyggtaagaagtyggagttygyggygggtagttagagtttaggtgggtgygtagygyggttygggttttaygattttttttttgttttttttatttttttttttttttggatgtygtggtttttttttttttttttttttygtttgtttttttygttttgygttttgagygttygttgagtygygyggtgtttttttttttgggggtygtygtttatttgggygtygagttttatygggygtttaygtttagagtttagggtaagggatagtagtttyggtygtatttttttagagtttygggagygtttygttttttggtayggtttttttttagygttttagyggttgagtttagttygggagtgggatttgggttataggagtygaggttgygtgygygygtgtttygygttataagygttttgtaygggggtygtgtgttttttagygggaaaygttggaatgggtygtttggagggagagtyggttttttyggtgtgtttggtagygtagaagtgggtggtygagtaagaggtygygtgggaagttagtttyggygttttggggtatagggtaagygatgtagagtgygygtyg

SEQ ID NO: 6080 - DNA, 352 bp, Artificial Sequence
  Description of Artificial Sequence: Synthetic polynucleotide
gygtttttggtagtagtygtttaygttttyggttttgygtatygggtttgtttygggaggggygygtgaygttatygyggggtagtygagaggggatygygggtttygggtagggtaggygttttygtagttttagttataatataagggagagaaagtaaygttttggttttagaaatttttatygttaaggttagttttggttagaygtatagttaaagagtttttttagtttagyggatgaatygttygygagtggtattttttaaaattttggttttattttttaagatgtttttttattgygtaatttagaaagtattyggatygtygttatttattagyggyggyg

SEQ ID NO: 6081 - DNA, 1141 bp, Artificial Sequence
  Description of Artificial Sequence: Synthetic polynucleotide
tygtttagtttttagygttgygttgttttygygtttatyggatgattaygaatatgattagygagttgtttattaagtttaygaygaatattayggagtagatygtygtgatgatgatygggatggtyggggagatgtgygygggttttagttgygygtttttygagtyggygttgtygttgttgtygggttyggtttagtygggaaattaggygttgttgttggggggtaggtaggygttyggggygtaggtagggttyggtttttygyggaagatttggatyggggagtttatggtggggygattgtagtaggaaggygaggataggyggtatttgyggygttgygggagygaaagaatyggttggaygyggagaggtaaattttgttygygttttggttagyggygttggggattyggagtttgyggatttttattygggtygtaagtygtygggggtaggatagggagaayggatttttygttgttttttyggttagtaggygygtygttgggtgttagagaggggygaagagygttygtttttttttttttagtttttgaggtgttttttttattaattttaggtatyggtttttggtggaattgtttttagattgtttgagtttttagggttaagttttttttttattttttagtayggagttttatttagaattgtatttygaaagtttaaagtttatttatggtttttagagataggygaaggygaggttttttaygggaygttttggtaggtgttgaatygygygtttaygagtttygtttagtttttggtattatttgttttyggatttyggtttygtttttygttygagggttgttgtttygtygagygtagttttygttttttagygtaygttttttattattggyggyggttttgyggggyggggyggggygggatyggygggaygtagtygggaygyggttgggygttgggggtttgygggyggagagttygtttggtgygttygttttaggtyggtaggtttttgtttygtttygttygttyggagttagtttttagttttttagttttttagtttygygttttttttagtttygtaggttygttyggtttattaattgttygagyggtatatygtttggttttyg

SEQ ID NO: 6082 - DNA, 3297 bp, Artificial Sequence
  Description of Artificial Sequence: Synthetic polynucleotide
tygttygtygtttygaagttgttyggttttttttttagttygttttttagtttygtaaggttttttttttatttttttyggygattttttttygaggtttttyggaggygtttggattttttttttttgtttttygttttgtyggtygttyggttttygagggggtaygaggagttgtygggtygtttttygtttttgttyggggyggygttggtattgttyggtygattttyggggggtygttygttgaggtttttttattyggtagttaagtttagggaagaagaygttatygttgggtagagttygtttatgtyggtgagtatygtggtttttattaygttttatatttagtttttttaggatattagtttttttygattttttttaattttaattgattygtttygttggggttagtagtagggagggtggtaaggtygggaaggtygggaygtggttgggtaagttttaggaygggatattggyggttttygggatatygttttttttygygggaagatattttaagttatttttttttgggttattttttttttatggtttaagaaaaygggagggagttttygttttttttygaggttgttttttaaatttttagygtgtygttttttttygtttatttygagttttttttaaaygygttttygtttgtttttagygttygtttttttatttttttgttttttyggtaggtaagggaggaaatgaygtgatgttatttttgtgttaggttagtttttagttttagtttagtttttygggttttagggaattaatttygyggttttatygggttttattttygaagggaygttgygggttayggggataygyggtgttgygagttyggagagttgggyggttgggttttttttttygttgttttttggtttattttttttttyggatttyggagtttttggagaaggggaygyggagggygattgtygagggttttagygggatttggagttaggggttagtttttttttttatttttygttyggttgttgggtggggttttygygttttggttagttgggagggggygagggtygttttttagggygggaagatyggaggtttaggttgygtyggggtggggyggggatagagtttagagaggygtttygggtyggggagaaggtagggggttgttttttagagaygygtagtttatagaygygaagttttggggattaagygttttttttatgtttgtygtttattttygtttttttttttygttttttttatttaygaggttygagtaygtagtttagtatattttagtttygttyggtttygygygtygaggggaggygatgatatagagggtttygyggaygttttttaygygygtttggtttygtatttatatttttgggatttgttaatgyggggttggagtagtggggttgyggtyggggtggaggtygygtttygygtggggtttygggggtatttttagtattygyggyggtggagtgygtygtygttggagggaggygagaygtgggattgttyggtygggtaaaaggagtgagggggyggggaggaggtagagtaaggggaggaagaggtygggagaagagggttagagtaaagatygagagtyggagaaaggygaaaggygyggtgagtaatygtygaygtagagagggtagtttttygygttgtaatattgagaaggtattygygggaygtatgygtayggyggayggaggygagtyggtyggggtttttttttyggtyggtagggtggayggtgggttygtgagtattttagtttttygaatttttttttttygtttygggttygttttgaggtttygtgttggaaagtggtygaggttgggaggggygygtygttygttyggattttagggtgtygtygttgttgyggggygggagtyggtgygagtygggggttttttttygtagtgygagtttgggggagtggggttgygagtgygttygygtgygaagaggggtatygygttattaggattaatatgtttygggtttgttagggygttygygattttatttttgyggtttygygtyggtgttttggtggggaaygygggagtttagtttttagattttagaaatygtattgattattygaagygtatttyggaaagattaggygggtggaagygtyggtttttttaygggatagggagaggataaggaaggggttgggygttyggggttggtggtttgagygtygttgggaagggtaaggagatagagttttttggaatygtagygtttttttttaggagaagtgtaattagggtaggggtatygaggggtagggtgaggaagtggaygttttaygygtggattttagaagatygattaggtatgggygtttattyggagtttttgtttaygtttttgaaaatygaatgaatagagaagtgttttttatttttygtttgygttagggtagttaaygtgtaggygtygtygggatttttttggaataaattygggtatttgatttttygtattttyggagttgttttgggaagtygaaataagtttgggygttyggattgyggagattggaaagtagggggyggagggygggagattgggggygggaagtggaggtgtaggttgtagttggggatygyggtgggygttggaggggagggtttgtgtgygyggttgttttttagygttgggggagyggaygggttaggggtttttagggaagyggygtttygggatyggggtggttttttygtttttgtgtgygyggygatttttatatttagttygggyggaggagttttgagagaagyggttagttgagagtggggtgggygttttggggaaaggtttgygtgygttgyggttttatygttgttagagaagtggaagagagagagtgggygtygggagggggtttataggygtygygatttattttatttttttttaygtttgtgggggagtgagtggggaaggggttttgggagaggyggygygygggtattgaggtgtatygtgagtttttyggatttgatagtattaaaggaaaattttggygagtagttagggttagygagygattttagtagtagggaygyggtygtgygagagttygyggataggygagggggattttaggggagtagttgttgtttaygggttaygggygatgtayggagtggagaagtgaaygtggtttataggatttttgttyggaaggtggagagygttataggggaattttttygatttttgttygtttyg

SEQ ID NO: 6083 - DNA, 2213 bp, Artificial Sequence
  Description of Artificial Sequence: Synthetic polynucleotide
tyggttttaaaygtttttttagttatttgtgaatygygaaggagtyggttttygyggyggggattttgttattagtattttygygggtygaggtygttttttyggtyggtttttygttttattygaaaaggaattagagtatttatttaagayggtgattggtagggtagattaaggtgttttggtttyggttttagtttygyggtgygtttygttygtttattttgatygggtgtaggtagttatygtygygtagggygtttaattyggygttygtyggygtttyggygtygttttgtaggttgygggtgagatgygygatgtaggtggtggttagtagtagtaygtttagtttggatagtttggtgtygggyggtayggayggtagygtgygttgtagttttaggaaagygtgtygtagggtttgtattyggttgygttttygygtygtattygtygtygtyggtygttygttttyggaaygygagtygtttttagggttygtyggtttyggttyggttygttygggaygygagtygyggatggyggyggttaggggygygggttyggygttggygttgagggggttgttygttgggyggtygyggtttatggtagtttttygygtygygygygttgtaaaggatygaaggtgyggtgaggtyggggggyggtygggtttaattygagaggygtagttttttggtttttttygtgygtttattagtagtttaayggggttaagggygtttttaagygagttygttttgtttgggaygygatttgttttyggaygtttggggagagttgyggaatttyggagtttttgggttttttagaaggataagaagaggygtagtgtyggttttgttttttaggggtaaattaagtaaaaggtttattttattygggaagaaagatttyggaagtatagtttaggattagtattygttygygtttgggtgattttatttaattyggtaygtaygagaggtggygyggttttttttygtygaygtygyggaaaattayggtttattagtygttttyggttttttaygttaggggggatttttgttygaggagygggggatttttagttttatttyggggtayggtattygttatygtttygagttygagagttgygtagtaygygtttgaygggttttttattttttttggagyggttgagtggagtttygtttygtygtgagggygggygaggggygtggagtagggtttgtgtggttagggtygygttggttattttattttygttyggtygatgtttaagtygayggttgtttttaattttygttggttgtgatttttatgygggygtttygyggttaggygtgtgtgtttygatyggttaaggtaggtygggyggaggatttggtttatyggagaggttaygtygggggttgaggyggtttagagggttattaattaaatttttyggyggggygggttygggggyggggygtttttttggtttygtttttyggtttattgttttaygttgtttttttygaggygtttygttgagggyggygtgtggagagtttggggtgtttgtygtyggttgyggtggggtygggttggaggtygygggtgaggtttgtggttaatttygygttgtygaggttttattttttygagtttagtttgattttaggtygtttttaggtyggtgtttagttgaggygggaaygttgtagtttggttgagygtgatttttaggttttgtgaggaaaagtygagygygttatatygaggygttagtygtttattttattataaggtaaaagatttatgttgttttagttattttaaagttgggagatatattgtattttttattagatttygaatgtttttagtgtttgtaattttttaagaagtttttagagtagatagtttttggatygtgggtattttttttyggggayggggattttgttgatygttttygttgttttygygggggttatygttttttaattatttgggygaaatatttttttttggttttgtatttgtggatttaygggaagygtgatttgtagygaggtaggattygattttaggtttttttagaaagyggaygttgygttttaaggtttgtttagagtygttttaggaagtygtgggttttygatygttttaaatygtagyggtttttgtaggttttggattygtygttttyg

SEQ ID NO: 6084 - DNA, 363 bp, Artificial Sequence
  Description of Artificial Sequence: Synthetic polynucleotide
gygtttagtayggygggtagygtygygttgygtatygtygtygattatgagygaggatagtygyggagatagtygygtygagagygttaaggatttggagaagtagtttygtttgygygtgtgygtgtttagygagttttagaagatygagygggattatgtgggtaygttggagtttttggtgtyggtgagtgttttyggtagaygtagggggaygttygggyggygyggggygygggtttyggagtggttgygggaaggaygygyggtattgtttgtgyggggattygggaygggtyggggtattataggygygggaatttaygtgtggattttgygttygygggygyggtgattttygyg

SEQ ID NO: 6085 - DNA, 960 bp, Artificial Sequence
  Description of Artificial Sequence: Synthetic polynucleotide
tygtttttygaygttttaattagttattattttttygaaggaaaataaatyggtttttgatatatttttttaygtgtagygttygaygttaygggttttgggyggttgtattttttttttgtyggttayggtttaaggttttattattgygygtatttagtttttttttaggtgattttygygtatttggyggyggygttttaggtttyggaggttgttygggygggttggggttygggyggygttygttgagagtygyggygttttttagtygtttttygggygtygatygtygtttttttgtttyggggtggggtttaggggtattagtagtygygggttttyggtygtygtttgggaatttagggttagatttagttttataataaygttttttygttayggtaatttaattggaggtagaagtyggyggggyggtygagyggggyggggygggagygyggtygtygygagttayggtggggagygggygygggggattttggygggtttygggtagygyggttgtatttatttgtgttataattgyggygayggggggttgaggaatyggtttttttaaaagtaaatygaaaatgggtaatagagaggtyggggtagygttaagaggggttttgtttyggtgtttagggtaaaaaattyggtttyggtttttagaaattygagttagyggtggtttttttttttttttttttttaaaygtttttgtgttttygggtygaggggygtttttygygyggtttygagtgtatagygatattagggttggygttggagaggggagttttttttttagtatttttygggtttttttygtatttttatttatagttttttttttgggttygaygttttttygttttgtagtyggagtttgggtttggtgtttattgtttygyggggtgtttyggaygtttggtttttgtagygttttttayg

SEQ ID NO: 6086 - DNA, 1404 bp, Artificial Sequence
  Description of Artificial Sequence: Synthetic polynucleotide
aygyggggttttygggaatygtygtttttttttttygttttygygttygygttttttttttyggggtttyggtttatttatttttggtgyggtttygtyggatttaggagtttyggtygttygggttgyggggagggggygtttygggtyggttttagaagttattttgtaaagaggtagggggygyggggtygygyggggygagttygggattygyggggaagaagtttttygggatygygtttyggtygttygagtttttygygttygtygttttttatttyggtygggggtttatttgggagttygttgttttyggttagtygttygygtgtgtttagggttagtagtaygtataagtgttagygtayggtygtygygtttatgtttaatgygggtttygttgggygtgygggygtgyggggygyggggattygatygatyggtygttttygtaggygttgttygttgttygtygtttygttatygttygggttttygagtygtttagttagttyggttgatgagttgatagygygygtttattggttygtggygtyggaggggyggggygtygtttagggtyggttaatgggygtyggttttyggtttttygaggaagaggggggttygggygtygtyggggggattttttttttggggygggyggtaggtggggggtgtgggtttggtyggtyggttygttaggygyggggtttaggttaggttggggttgtttggaggttgygtttttttttgttygyggygtttyggttttygtygtygagagtggaygtttttttggggtaatttttttyggtttagaggtagtttygggggyggggattttgygaatyggggatttygtgaggtygttygttattygtgggtagtgaaaygygttagygygtagagtagattygtttgygttgtygtttgttggaygttttttgagtatttattggggatygagtgygggygaggtagtagygaaggaatygggaggggaaatttygtgaagattatttgaaaattgaygtttaaaataaaygaattttttagtattygttaaaggatagtggttygttagtgtgtttgttayggggyggtygtaggatttgygtttggaatygggygggygttygggayggataatgtygtttggyggtyggtttygygggaggttttygtayggggttaatttyggtyggygaagttygttgttyggaatgygaggtygaggtttttttttgtgatagatygggyggggttaggaggaggggtagggygggtatttyggttygaagatttaggaattgttttggtttggtttggggtttatatttgaygtttggygagggttggtttygggtttggttttatygggtttgggagggaygggyg

SEQ ID NO: 6087 - DNA, 1247 bp, Artificial Sequence
  Description of Artificial Sequence: Synthetic polynucleotide
tygtggggtattaygygyggatttttgtttggyggtttttgygttyggggttgttgagttyggggttygttttgaggtygyggttgtggtttttggttttttyggttygygttattgtygygyggygttygttgtattttgttttttttgyggtttygtatgtttttggtggaatttagttyggyggaygaygaggaggatgagatggaagtttgttggaaatygggtaaattttatagaaaattgatgaggaagayggtygagagtaggattttgggagtatttatggygggtaagtggttgygtttttttaggaggyggtggyggyggygtaggaygygyggggtayggagyggttggatagyggtyggggttyggtttttygggyggattyggagtgygaggagtygggttttagttatataaatttyggtttygttaygttttttttygtttttygttgggaggggaggaatggggagggagggtagaggaggggtggggagggtgggaggagagtygggtggtgygggtyggaggtgtgggggagaggggtygyggtgygtyggtgtggtaggaagaygtagygttttygygggaygygygyggggttgtygggyggtgygygyggygygggtygtaagygttgatygggggaaggygggygttgtyggttygtggtyggggagtaaaggttggttygtygygttagggtttttttygaattttyggaggtgtggttttttygtagygyggtttyggttttyggttttygttagtygtttttatttttttgggagygagyggtttyggaggagggaagyggyggyggygtttttaagagatagtttggagtaggygtttttgttgtaggttgygtgttgtttyggggyggtggtatttttttttttyggttttaatygttaggtttgtygtttgygttttttaggggttagttyggagttagagaagtttygttttgggttaggygtagggtttagttyggaatagttttattttttyggttgggtatygttttttataaagataggygtttattttygattttygaggttaggtaaaggttaygagtttttagagtttggatygatgttaaaagttgttgygtttttttgtaggttttagttttttttttygtagtttttaattttttttgaygtagattttagttgttttattttttygtttgttttygggattttttttttttygyggtttgtttttyg

SEQ ID NO: 6088 - DNA, 1861 bp, Artificial Sequence
  Description of Artificial Sequence: Synthetic polynucleotide
tyggtgagtagagtyggygtagttatagygyggagtygyggygtttattggttttyggagttgttaatyggygtgtaattttgtaggaatttttttygggtttatttgggagttatattgtygttttttttttttagtygtttaggggagtttggagaagtaggtttaggagggagggagttagaggaaaagaagaggaggagaaggaggaggattyggggagggaggygyggygygggaggaggaggggygtagtygyggagttagtggtttygtttggaygygttgttttttagatattttyggagttttagtygygyggatygygygttttygtygttttgtttttaaatttttgtygtagtttttttttaagttagygaatttattttttaaaattagaaattgaatttyggtaygggaaaggagttygyggaggagtaaaattatagtagagtaagaagagttttagagagtagttttttyggagtattaatttygtgtygggagtgtagaaattaataagtgagagggygtygygttttyggggygtagttgygggyggygggagtaggygtaggaggaggaagygagygttttygagtttygagttygagttttygagtttgagtygtaatygttgyggtattttgtttyggattygtgtgygygggttgygtygagygttgggtaggaggtttygttttgttttggttgtaagtagyggttgggagtagtyggtttttggggaatatgyggygygygtggattttgtttattttgggtttggtggtttgygtgtyggyggagtyggtgagtgggttaggyggaggatgygygygtygtttagggtgtttgaagttaygagaggagttygtagggaataggggagygttatttggggaatttttagtttttaagtatatatyggagattygttgggataaatgygttygttyggttattttttttttttttttttttttttagaaaagygttgttygttggygttatttygyggttygygggaatgggggtatygagaattgyggtttggtttagtygtagaggtttttgaagttatttttaattttttygttttyggygggttttgttgygtggtttgggaaggayggaggggaaagggtggtaggaggggggagtttgggtygggttygygagggaayggttttatttygygygtttttygagattagggatgatttggaaatttyggggttttttttttygtatattatttttttygygttagtttttttgtttgattgtatgtaagttttggggagatgggggttagatttaagagattygygagtgtttagagagaaaagtttgtaaaagtttttttgtttgatgttttttgyggttagggygaggtaatygatattaygtggaatygtagtaggygattttttaaggggatattgggggaggtayggaaygygttygaaaatgttgggaygtyggttattggatttttagttttgyggygatttttttttygttgaggggtggaggttgtatygyggggygttagggaygggaggatatttttataggagttataygggagtgtygtaagtagggygaggyggggtaygtgtgatayggygttyggtttygggtygtttggtygttgggggatagaggtttttttttygttaygttygttttttttggttttggyggggygtttttggggtygggaggagtttygttttyggyggagygtttgtyggtatttagtttttttttttygttttggyggtgggaatttgatttttttttttggtygygtttygggggttggagtttgtttttttaygtygtttaatgagyg

SEQ ID NO: 6089 - DNA, 3044 bp, Artificial Sequence
  Description of Artificial Sequence: Synthetic polynucleotide
gygygygtgtggaaggttgggtggggtgygtatataygtttatttgtgtaygtatatatatatatatatatatatatatataggtatatatattygagtttagttatttatattgtttgtttagggygtttggaagagttggygagttygtttagttttgtttattyggtttygtttygtttttttygggagggtttttygggyggygtttagtttygagtagagtaaaggayggyggyggttattttygtttttyggtygttggtttttygttttttttygtttttttattgaatttattttygtgtttygaaaatttgattttaattygattttttygygttttygttttttttttttagagtgagygttaaaaagggtttgatagatagaagtttttggttttagtatyggtttagttygtttttagaygatttttgttttttttatttttatagtttttagtggtygttttattttygtattttttyggttaattttaatttttttygttttttttygygttgtttygygttttttttttaggattttttygtatatttttagygtttagygyggttttttataatttttttaygtttygtttttttygttttgttttygttttygatattatttgygttttttattygttttaatttttttttttygttatttttatttgtgggtttttagttttttgttttttttttggtttttatttttgatattttagggattttttttttttttttaygttttttttttttttaggatttygtttygatatttyggggttttttygttaygygtattttttttttttaggttttgatatttgggygttttttttttgttatttatttttagttttagttttgattttygggygttttgttatttttaygtttttygtttygtttyggtttttygggygtttttattygtygtttttatttttttatttgttatatttggtatttttgtttttatttttgtttatatttttttttygttttygatatttygggygtttttttataygtttttattttttatattttygttttygaaaattygggygttttttttttttaygtttagtttttttttttttttygttyggtttyggatttagtttggagatygygttygggaggggyggttgtygttygyggggygttygyggtgttygggtttgggtagygaggaggtgaygtygttttygygggatgagttygggaggyggaggggyggaggaggtgttggyggyggtattgagyggyggyggygtagggygygygggtttttygygtygattttatygatttaaggggyggyggyggtggyggyggttgagygattttgggtygggygygtgatgaggaggggtyggygttagatttygttgtaygtyggagttygtttggattygggygttggtagtygaagggttttggtttygggatttttygtygttagttttygttatatttttttygttttygtttttttattttagtygggggtggggtgggtggggttggggttttygygggggttttyggtttygyggttygttttygggtgtgtttggaggagttttttttttgtggygygygggagttttgtgatgygttagtyggygggayggatgagttgttttttygggaaatygttttygtttttttaygattttttyggttttygtttgggtgtttttygggtyggtagtatttygttttygggygttygaagygagtttttygggggtttgttygtaggtattttttttttttygaggyggygygygygttttyggttttgatygyggtyggatatattygygtttyggttygtttgtygttttttygtttgttttttttagttattttatttttagttgttttygttattttattttattattttttttygttttttygygtatttygygtttyggtttttagttttttttttttttgaatygtttattttatagtttttygttttygggaagaagaaatatttttygaagygtattttttagttttttttttttaygygttygtttttttttttttttgttttttttgggggaggggggttgtygttttggattgaaggttattgatttgtatgtatttgttttagygttggaggttgttttagtygtygygtyggtgtygtygttgttagtggagttgttttttygtttttttagggtggttyggttttattaaatatgtyggtttttgtygggtttyggggtygtttggtttttatttyggyggttttttagtygtttttgtagttygagatgtttgattttagttattttayggaggaggagaggaaaattattttggtygttatggataggtagaagaaagaagaggagaaggagtagttygtgtttaagtaaggatttggttttatattttygtttttttttttgtttttygttttttygtttattgttttgyggtygtttgygygttttagttygtygttttttttttygttggyggygtttaggttaygagggttgyggttagygtyggtygttygggttgttttaggggtgtttgagagtaggggtgtgtgtyggggagggagggygttaaggtyggttgaggtgagggtggygagttttaggyggtgtgattttttttggygttttttyggattttttygttggttattttggtttyggggttttagygggattggggttgaatttaggttttgtgygtatttttttttttttygtygygttgaggtagtgattggggtatagaatttaatatggtygtgtataggtgttttttggayggattygggygaaggygygttggtaggggatgyggaygttattttggttttaygttttygyggggyggttttattagtaaygygggatagagtagggttgtttatagtggttgygagtagygggyggyggygygggttaggggtttaagttttgtygyggtygggtgggtgtgygttygtygttattttttagtttttttttttyggyg

SEQ ID NO: 6090 - DNA, 1603 bp, Artificial Sequence
  Description of Artificial Sequence: Synthetic polynucleotide
tygtatttygttygattaaggtyggggtygtagtttgtattyggattggatttggatgtagttaatttttttttggttgatggaatagttttttttttttatagtttyggygygtttttttttygygygtttygtygtttttygtygtagaataggagttgygyggttyggagyggyggyggyggygtyggagtattygtttygtaygtyggggygaggggygagygagygygttttttttttygygttttgygttttygygtttttttttttttygttgttygttttttygtttttttttttttttttttttttttttygtgttattttttttttttttttttttttttttttttttttgatygttygtttgtatatttttatttttttttygtygttttttttttttttttttttttttattgttatattttttgtgttttygtttttttttttttatttgtttgtttattttygaaygtgaattygyggttttyggaggagtttagygttyggagtatttggagttyggtyggyggygggtygagtttggttagyggyggyggyggyggyggyggyggygggagtygagggagyggtagtygygatygygggtatygygggagttttagyggtagtagtygtygtygagatgtttyggygaaagtaaagtaaatttyggtagattaaaygtaagtttgygygyggggtygggagttggtgggattattgtttaggagyggggtgygygggaygggaaagyggtgggtgggtggyggggttaggggagattygttttyggttttttagatgttttaaattttgtttgagtagtygaagggataattagatagttatagatagatagayggttagttygagtttygggtaggagagaggttgygaggagtagtttatgtttgtttygtttagttttygygttttygggttgtttttttaatttygattygygtaygttgygagttttyggygttgtygtttagtyggaggggtagtttygtttttttagaygtttattattgttgttgttattgttttgtgygattgaygtgggattatttttgggaattatttttagtaattagggtagaaattttttagaaaagttgggyggtygagatttyggggygagggaggtaatttttttaygyggtggaaaattagagygttagggtttygattttgggyggtgttagagttatattaaattygaagygaaataaaaagtaggtgtaaaagttygygtttttgyggygggyggtygtgygtttttgttttgygggygygggttggtggttggtaggtygtgttttgggatttygggygggttyggtttaygtygttaggaygtttagtygagyggggattygggtggtgtttggttttggtggygygyggagttttttttgggaggggtygttagttattttttagygyggaagttgtgagtttaaggyggtgggygygtaggggagtgtatggttttgagttttygggtgttygggggtttygatggtgtttagaggatayggygggttaagagatatttttygaaataggtaygttygtagagattaagtyg

SEQ ID NO: 6091 - DNA, 1365 bp, Artificial Sequence
  Description of Artificial Sequence: Synthetic polynucleotide
gyggygaatatgagtgyggatygtaygatttagttttgagygttygattggygttyggttygtygagtttttagygygtttygtttyggtttttygygtttttagggtatagaaaatagagtgttttgtagagttttagggttttaaaggtggggattggggattygtaaaagttggggtggagagtatagttttgattatttgagttttyggagttagggygtgagtgagygtttttataygttatttttgaagtttattaygtatttttggtagagagggatttatttygtttattgygtttttatyggttgttttggtagtggttgtaatttatgtagtttagaatgatgagggtaaaggagaaaaggygaaattgtatttgggyggtygggygggggagagaygttttttaaagtttaggaattggagggttygtttaaagagtyggygtyggtygygttgttggggaggatttagagggagattygttatttattttygggtygtatyggttagtttagygygattagtattttttygttaygaatttgagagataagaagygaaaatagggtgtgtgggggatggagagagtttyggggaggtagttgygttttygtaygttttaatttaaagaagagagggaaggaggaagygaatttattgtttagtaygagtygyggagyggtttaatttagagygggtagttgyggaygagttggagaggaaggtgattataattagtgaattagtaatttttgtygagttttaagtttygatttagyggtataatgygttgtgtyggygtttyggggaaaggaaagaattttaaaggtattgagagygtagggttaaaagaaygtttttaggttatttggagtttayggyggtgtatttaagygtygtagttgyggttgttttggtgtgggttgtttatygtgygtaygtttygggyggygyggtttttttaggygyggtgttttatttygggttygggaagygagtygtttggttagtaygtgggttggggaaaagtttgtygagatyggttgggagygtttggtagttttggaattttagyggtygtygyggggttggygaygttaggtaggagygyggagyggygggtgtagttattgggatgtttygttttygttygygagygyggtttttaggtaaggggtgygttygtttatattttttgtttttttaattaattgtgtygttttttgygttttttttayggttattttatagttaagattttttttttttygagttgtagaaggtagaaygttttygggaggaygaagtgattygaagggatgtggtaagygtatttttygatggagatgtagatyg

SEQ ID NO: 6092 - DNA, 419 bp, Artificial Sequence
  Description of Artificial Sequence: Synthetic polynucleotide
tyggggaggygatttttggatgygttttgtgygagtaaagtygggagagygagttttaagtatttggtagyggtgtttttagtaggygtygaggaattyggttatttatttttggtgaattttgygtttattgaggtattygaggtayggatgtgttygtttagtattyggagaygaaggagagagagyggggatatgygttttagttttgttaggttttagggtttttatttttgtatttaaagtttttattttattttatttttygttatttattttttgtttyggttattyggtgyggttttagtatygygygttttttyggtayggttttyggagaaagttttttaattattagttayggtatttgtagtttttgtaygtygttyggtttygtygggtgggtagygttygttayg

SEQ ID NO: 6093 - DNA, 3675 bp, Artificial Sequence
  Description of Artificial Sequence: Synthetic polynucleotide
tygygtagtttagttygygtyggggyggtgggtgggtgggtgtttgttatgggattatttttagygttttatttttttygtaaaagtggygttttygttttttyggtttaggtatattygttyggggttygtaygttyggtttagatattagygyggtggagagtatygggtggggttttygaagggtgaggttyggaggygtygyggagggggggttttttagagaggagggggygttgygggaaggtttttaagggaggttgygtttaattttygaygttttgtatttagttyggygyggygygtttagtygttttttyggatttttttyggggygygggagtttagyggygygtttagtttttatttatggtggtgatgatygtgatygtaaagtagaaggagtyggygaatttttattggaygtyggygyggtgyggtttygattgtaggattattagttttagttgtyggtagttttygttgttgatgttgtatttttttttgattyggattttttyggttttgagtttttttttttygygtatttygtggttygattygagggygtygaatayggyggygtttattagtaggtaggtgaaggtgtagaygatgagggatagagttygtaygttttgtttttttatggtygttagtaaggagtyggygyggggggtatgtttygtaggtttatagtygygygygttttattgtagygttyggyggtygtygtygttttttttttygtygtygtygtygtygtttttaagttgtaagyggyggyggtagtagtagtagtagtagtggggaggyggggggyggggaggttggggggggtttttttygttggggtygttatagttatygttatygygaggyggttggyggggtaggggyggygygggttygggtttagtygagaaggyggataggtataggaggttgttygagygtyggggttaggygttygggaatttygatattttgygttagattyggtygaagtagttygttttattgygtagggttatgtagggyggtttygttgggtatygygygggttttgttgtttttygtatttygtttttygttttygygggaaaygtagggaygggaatyggagttagaaagyggtyggagggyggtygyggggttyggtatttttgtgggtttagttygygggtggyggtgtttagtaaggagtttgtaggttygygygtttagyggaatttgtttttttttttattttttttygttttttttyggtggtggggaggaaaagtttgygaagtggyggtgtttttggagttttttgtaagyggggagggggtygagtaggtgtagygggaggggtagttygttttttaaaggttygygygtttagygtttattygggygygygggtgygtagyggggttttygtygggygtyggtyggtgygygaagtttgttyggtttaatttttaaggygygggagyggggygyggttttaggayggtagggatygygatggagyggtttygggggyggtygggggayggygyggtggyggtyggttagttygttttttygggggyggygggygyggyggyggyggygggaggggtttygygggtttygyggagtagyggggyggaygygggygtatgagtygygygggggtyggggtttttyggygttygggygtttygggaggyggtygtygygttggtttgtttygggygttaygtgygtgygygtygttgggagttygaatgtgtgtgtgygygtgtgtatgtgygtgtgtgtgtgtgtgtgtgtgtgygtttggtagtttygtttyggygggagggtttyggggagygggggtygggttaygtygaggtygggttttttttttttttttttttttgtagtttttagggygygttatttttygtttggtttttagttagttggygaggttgttgtggtagttttygttgtagatttagygyggygtagggygtaygyggagggagttygggaggggyggtttgagtygttagggagggggygggggyggagtygtyggygggttttggygggggatgggaggataaaygyggttttttgggtttttttagtttygttttttaagagygtaagtagttttggygggtggagagtttgagggattyggggttggaggaggaaaaygggatttagttagagatggtaggttgatagttttaggtagattgggtagagagtggggagtagaaggggagggggttatgggtatataggagagyggtagtagyggtttaygaagttttttttattttttattttttatttagttattyggygygggagygtgttattggttagggatatggtttygtggagtggtggggtttygagggttgtttyggttttttygttttttagyggtatagttygtttgggttagtatttgtagattygagtygtttttttggagagygttaaggatagtatgggtygttatttttggagttaggatagyggggaaagatatygtaatttttygatttagtaatttttttgttgttttattgaaggaaaaaaaaaaaatatatatatatatatatatatatatatatatatatatatatatatatatatatatatatatatatatatataattattttttgatatatataattattttttggttttttatagttgggygtaaggtgygtygtggatgtagttttgagttaygygatagttttttygagattatttggggtaggaataygaggttygggttggggygtatttattttttgtttttagatgagttttttttaggttttattttttttttattttggttttttttatttttttttttttttygttttttttttttaggttatygaggggtttttttttgattttyggttttttgaatttygtttggagttttggagttttaaaaggatagatttaagttttagagatttttgggttttttttttttttttgattttagttaaggaagggatggagatgggaaagagttgtttggyggtaggttagtagttggttaaggggtggttggggaattagatttaattttygggtagttygygggttttaggagattagttttttttgtgggtygttttttggagyggtgttygggttttttggttttagggatttygggtttagagggtttgggattttagtgatttatygaggttttttagttgggaygttttgtattttatttttagggattaygggtgtttattagggaaggggagttygygttgtgggttaygtttgagtygttaggttttygttgggtttgygggygttttggggygagggagyggggagttttatttygagtaggtattttttttagatttattttggaaattaaggttttygygttyggtaagtgagtttggttgtygggtgagttatygygagygggygataaggatttttagtagttggtaattaattgygtygtggtttagtttaygayggaattttagttaggtttttygtygttttggtagyggygttatttttgagttatagtygtygggttttygygyggttyggaagtygtttgttygtttyggygttattagggggtattggatttygatttaygyggyggtygygtagtyggtttygttgyg

SEQ ID NO: 6094 - DNA, 3675 bp, Artificial Sequence; identical to SEQ ID NO: 6093
  Description of Artificial Sequence: Synthetic polynucleotide

SEQ ID NO: 6095 - DNA, 3378 bp, Artificial Sequence
  Description of Artificial Sequence: Synthetic polynucleotide
gygagygyggagtyggagagtygggagtataggyggtygygtygygttttggttyggttygggttygygygttagtatygttygtagygygggtattyggatttttygggygttyggggggttttagtaggygygggggaaygggagggggtttgygtgygtyggygggtgttttttagggggygtttyggygaggtttagagygggtygggggyggyggyggttggaggagttttttttattttyggtygggygttyggtttagtygtyggygaygygaggygttygyggggatttgtaattygtyggatygagttttygtyggyggggtygttgttgttggggaaggtaaggaaggttttggyggggggttgggggygyggygggtgggggygtagygagggtgggagggggtygggggaggggygggygtttagattttttaatttygtygtttggggtttygtagtttygaggttttgygtttagagtttaggagtttggatttttattttttatttttttagttttttgttttttttagyggtggygatggaatgtggtaggttttygygagttygtattgggtaggttgaggagggggygattttggaygtaggagaggtttttyggygtygtygttttttttttatttatatattatagtttggtatttttttttattatatgtatagggtaggttggggagggygttttygttgtatttttagtatatatagaygttggygggggtttaagggagttttttatggtttttaatagttatatatagaygtagtaggtttyggagagttttygagygtgttttttttttgttaattaygtttagggttttttatagatattgtaagggttygagaygttttttttttaygtatagagttyggggtaggtaggagaaaattttagattttttttygaagttttygttygtagaagttttygtttgtagatttggtattggtagtggagattttttggaggtatttttttttatttygggyggagggttatttttgygttttttatttttaygygaaygtttggtttttttttttttgtttatttttttattgggtyggataggtygygyggataagtygtttttaattttgggtyggttttatgtygttttygttttaagygtygagtattttygggygtygagtattttygggttygygtygtyggtgagtagaggtygtyggttttttatygtygtygygttagtttggagtygygyggagttgtttygaggaaygagtayggttttygtttttttttggggaggttgggagttttggattyggttaggagttttttttttaggttttygyggttttttgggygaggtagagagttttttyggtttygggagggggyggyggagttgagaattatygygaagygatgygatygggagggtttgayggaggttgyggtttygagttygygtttttttttttggtygyggyggtttttgtttggttatttttyggtagtttgaagagaaygtttaatttggtattttagttttaggtygttgggtattttatttttttttatttttattttgggtttttaagttttttggagygtaggygtttaggttgggattygaagagttttaagttagtttttttttagtattygttttygtygygattttttygtttttttttygggtttggggygtagatttttgggttgtaatttyggagtagttgaaaggtaggaaggygtgtgggygggtagggggtttgtattttygttttagaggagtygtttgtygtttgtgttggggagggagttgggaggtttgttttttygttttattttgggaatttayggagattttyggtattttttttatagatataaatataygttttttyggagygagagtygtygygggggaatagtagaggtygygygggyggaggygggggaaaggggagttgggttttttttttatttgggagggaggtggtatayggtgtgtggggtttggggaggygattgttaygttttttagaatttttatgttttttattygtttgygatttyggttgtygaggaggtaaygagggaggtygagtygttttttttygtgggyggtagygaaattttgygttygtaygtyggggtgtygtygagttyggttttgagtatttagtaaggttaagtaggygaaggagggggygggggtttttgggygygttttygttygygtatagtyggggttttggaagggggtgtgygtagttygtygagttagtttygttygtttgtygttygygttyggttttyggaggyggaygttgygygygttyggggatttyggagygttyggygttttaygtttttttttyggttygttagttgttttttggygttgtttttagatttgttgygtttygatttggggggtagaaggttggttygggagattyggyggttgagggtygagtygygaagtttagggatgygttagagaggygygyggtttygygggtgggygttgygttggggggttygagtttggggtttgtygttttygattttagggaygggygtttgtttttgtyggggtttygygtaggggyggatagagggygattygtygtttyggttttaggtagtatttattyggatttygggttagggagggggygtagttaagttgtggagttttyggaggtttttttttttttygtaggtttyggtttttttyggatttyggtggtygygttygtgaaatggggaygygggttttgttttyggattttttttagttttygatttttygtatttgtttygagatttaaygtgttyggttygtagygtgttgggtttgyggygttagggtggttygagtttygagattatttgygtttgyggatatagtygyggggtttggtatgaagggttttagggagggtttagtaagygttyggggttygagtagttttttgyggygtttttygttttyggtyggttygatttygttttygggagtgggtygtggggygyggagttygtttttyggggaygtygyggggttttaggtttaggyggtyggygyggggtygtagtggyggaaggyggagggtyggygygttgtygttgattgtygggagagggygttygtatygygttygygyggttttgttygtttttttygtttttttygygtttggttygyggtttyggttttattttgggtagtttyggtygttatttttttttygttygttygttygttygttygttygttygttygttgttygttttygtygtygggtttygtgaygygtttygygtttyggtyggagtttttttygtyggttyggttyg

SEQ ID NO: 6096 - DNA, 1108 bp, Artificial Sequence
  Description of Artificial Sequence: Synthetic polynucleotide
gygtgtttagatgaaaagyggggtagtygyggttygtagatagygggyggttgggttagatygtagagggaagtttttagyggtaagttttttygyggggaaggttgtgtttgttttaggagatgagtygtaggtattaggggtgatgaggttygggggaggtggatgtgggggatggagyggttttaaggtygttagttttagtyggygttttgggtygyggggtyggagagtttyggagyggattttygtygygtttygaattygtttygygtttttaggttatattyggttygtatttttttygttttaygtgygtttaygygttttttygggtttttttttttttttygygygggtygggggygygggtttyggaggagttgggggyggygggggygyggggygggygattgtygggtttygggttagttttygtttttygtttygttttygatygttyggttttttygttyggygttttttygggttgygtttygyggtttttggyggyggyggyggygggygtagagygyggtatgggygttygggtygyggggtttggyggyggygggyggaygggygygyggttgygggygtaggtgyggggyggygggtyggggtyggggtyggggygyggagtygtygttygggggtyggggygttygygttttygtygtygttgaygtttygtttgtttttttttygtgtttygttygtttttagatttttttttttygttttttygtagttygggttttggtygtggygyggttgtygtayggtgtttttygaygtttttyggaygygttgtttttgtgatyggttttttattttygttattttagtttagtttagygtygaygyggtgagatttyggtygggtyggygggaggggygtygggtaggggygygggygggggttgtyggygggtttgygggtggggagggttygtattygttttgtttyggaggggtygttgtggttygtagtygtygtggtttggttyggtyggyggggtttatgygtttttggagagggtgggtgggygtygagygggtggtagtgtggagttggagaygggtttgggaggagtygggattttyg

SEQ ID NO: 6097 - DNA, 1700 bp, Artificial Sequence
  Description of Artificial Sequence: Synthetic polynucleotide
gygyggggtgggygttttyggttttttagtttttaattttttygygtattygggaygggtgaaggygtttagttgtygagtatattygygaygygggtttaaatttygtyggtttttaggtatttttatttygttatagygygggttgttttttttttttttttyggaggaattttttaattttttagtatttatattataataaaggaggttyggtttattaatgygygatygtagtttatagggatttttaaygaatttyggtttagagaatgtatttggtygtgttaygygygattttygaggggtaggyggaygggtttaggygyggataaaggggtttttyggggygtttaagttyggggygggaygtygggagyggagttggtygggaatttattttygtagyggttyggttgtgtttttygtggagtagaagggyggygggtagtagtagtagttagaygttgagtyggggttttatggtggygygttygaggyggygagggayggttgttyggygtgygggggtygyggyggatagttagttttyggaaggtyggatttttagygttaygtatygtttygggtgyggyggttttaagyggagatttgagygyggygggtygagttttttaatttgttggygttgttttttttttttyggyggtgygygggyggygttttaaaggggaggattttgyggygygggtaagaggyggygggagygygyggttygggagtgtggttgtagtgygtygggatattagggtttygygtttygtatttaagaggttttygygttttaatttttygygttygygygttygyggatttaggtygaggatygaaaggggtygttygagttttyggggtyggygtttagagagtttagtaaggtyggtygttttgtyggtgtgtygtyggygggtgtttttggaagggttaatgygttygggtagtagtttttgaagtygagttygaggtgagagygattttygagyggygtttagattttggttygagagtatygatttggagygttttgtgtaggttagggttgtaygtttttttgtttgggagtagaaagggggagggtgggagagygaagatygagtttttyggttaaggagtatttataggggtttaaygggaggtttttttttttttygggtygtgggggggayggtttttyggttatttttgtatgygggtygygtatygygttgttttygygtttygyggatygagatyggyggtgaggatgggttgttttttttattttgygttaaattygttttgtttgtygtttttaggttaagtgggattgatyggggtttagagtggaygaatygttagtatggggagagattagygygyggtggtyggttttgttttayggyggtaagygattttttgtttggttttygtgggttaygygygtatggatttttyggtgtaattttyggggattgataagtygggttygtaygtttaygttttttttttttttttttttatgtaggtggttgttgttggggatagtgatygtggggtttttygtttagagygttttggyggtaagttttggttttygygtttggatttgygygttygagagtggttgggaygtttgagtggttttggagaaggtagttygttygtgygttttygagtgtgtgtgtgygtgtggatgttyg

SEQ ID NO: 6098 - DNA, 692 bp, Artificial Sequence
  Description of Artificial Sequence: Synthetic polynucleotide
tyggygattyggttatttttygagggttttaggygttttatttaayggtygtttttygttttttgttygttattttttygtttttttaygaaggygygaaygttttagattttygtyggttttygatagtatttatttagttttttttttggagattttaggttgtattttgggatagaaaagaaggygggtaygatygyggtgtygggttttattttagtygtttttttttttgagggagttaggygggagagaggggaattatygaggtttyggttttttygygttttagagyggtygggygagttttattttyggtttgtgattygttgatttgtttttgttttattagtygggyggtgaattggattgattggtgatttttggtattaggtttttttatgggtatyggagtaggyggataggggtggggtttygygagygatayggaagggttagtgtggyggagyggattttgtggaggyggggttattgtgtttttgagaagggttttygggggtggagtttattaaggttgygggggygtggttayggagyggagttaataaaagyggggygtgtayggtygygggttagtgtttatgaagggygaggggtgtggttatagggygggatttaygaaggatgtaggggygaggtygggtttttgtaggatgtgyggtygygggtyg

SEQ ID NO: 6099 - DNA, 1924 bp, Artificial Sequence
  Description of Artificial Sequence: Synthetic polynucleotide
tygtygtttgtttaatgttttygttagttttgtyggtttttatygtygtttgattttattgtttttttygtggtttttgttgtttttttaaattgtttaaygatygttatttagtaaaaatgaatgaaayggggtygtgtgatttaggtagtttggagatgagattttggaattataagttatattttaaygtataaatygattttattygttttggatattygatgtaygyggaatgggygttgtaaaatgyggttgtttygtyggaggtatttgtttgggatttgttggtagtygtyggttttttttgtttgygattttyggtttagtygtygggattttggtgtatttgtttttgggygttttttttattttttagtggtygttagttttatttttagtttgtggtttyggattygtyggtttgagygttygtagagggtyggtygtygttatagtttygygtttyggttttygygttttttggattttygttttaggtyggygtagtttagtttttygggtaggttttaygttatyggggtttagtgygyggygaygaagyggagagttgtgtttagatttyggagagaaatttyggtttygyggggyggygyggggyggygyggggttyggagttgtttaatttygtygtttygggaaggyggtttygggttygtagggagtttyggggagggttttyggtttygtyggtagyggygtygaggggtgtttgggtttttggggatygygagaggaaaaagaayggaaatygtatyggggaggaaggaygygtagaaygttttygtgaagyggggtgtttyggttaggygtgygygggagygyggttygggggagttyggyggygtygtygygygtattyggtagaggtttygygggagaaygygtagttyggggygtggggyggggaattgttygygygaggttttyggygygtttgggtttyggygagagtaaagygygttttggtatygggggyggyggygtagaggtygggaggaagaaattygggttttggtttaggtygggtttttatttttgygattygygagaggtttaggygggaaaggyggygagtggygttagyggtttygaaagtaaatttggttyggtgttattgttygagggtygtygggygygttttttaattttttygagtttggaaaayggagattttygtagygttttttttagtgygtgttgygagtgttgaaggaggattyggtgtttggaygattyggagtaggggaagtattyggtygaygttgtygttgttatyggygttattggygggtaggatagtggggygggtaaggggttttttygygtttttyggtttttygygttyggygttagttttttggtttttttttttgygtagttttaggtttagtttttagttattttttaagaagaygatttygagggtygaaggtygtttttgatttttgattayggatttttygtgtaattyggaagagtygtgattttaaaattyggtttyggggttatagaagttygagatttgggaggygttygggattttttttttagaatygtagggattyggtttgggatttagggtgtggtttttygttttgygyggtygggaaggyggtygggttyggttatygygttaagtattgygtatttttgggaygygtygttgyggggggttggggggttggggygtttttaygaygtttggtttgttyggttagtgtttggtgtygttggtgggttygtggttgygaygggtaaaygttygtttygygagtygggtaaggtaatttttgygggtygygttygaaggtyggatttttttaagtygtttgggagtttttaaataggtggattygaagtttttgtttgatyggagaataaygtttaatttatttygtyg

SEQ ID NO: 6100 - DNA, 1991 bp, Artificial Sequence
  Description of Artificial Sequence: Synthetic polynucleotide
tyggtgtatygtgttttggtaatygggttttggygttttygagagyggggygaggggtgttaygygatttttaggtygttttgtatttttyggtgygtttgtagggattttgtagtaaagttttggatgtttgtagtyggtgtaagtttgtaagtagttggagagyggtggttggagtyggggggyggtgggygtggttaygtttttttttaggtagtttygggaatgttttgaaaagtattygaaagttttgagtygygygygygttaaaagaaaaggtataattttttattatttygggygtggygtgtttagatttygttattttagttgygttttyggttgtagygtataygttttttgygttttttttttyggagygtygttgttygtygggtttatttttygtagtagtttttaggygagagagggggttagagtgttygtattttttttaggggtattatgtttaaygaygaggtatttagtaagttttttatatygtyggaagttttttaygttttyggggtatygtygtagggtagagtygggggttttggtaaagygtttggggygttagtgggggyggttagyggttygagygtygggggtagtagtagaggaggyggtttyggtttyggggygtyggatttgggtgtygggagtaagaagttttygyggttgtttaagtgygtaygttgtaggaattayggttaygtttygtygtttaagggttataagygtttttgtatgtggygygattgttagtgtaagaagtgtaatttgatygtygagaggtagygygtgatggtygygtaggtgggtgygggygtgygggagttygggtttagttttagtttttttttttttttttttttttagatggagtttygttyggttgtttaggttgtagtgtagtggygygattttggtttattgtaattttygtttttygggtttaagtaatttttttgttttagttttttaagtagttgggattataggygtatattattatgttyggttaatttttgtatttttagtagagaygggggttttattatattggttaggtyggtttygagtttttgattttaggtgatttattygtttyggttttttaaagtgttgggattataggygtgggttatygttttyggtggggttygagttttttgaatgaagtttttttagtatggtygttgttatgygggttttgggttgtggagagatgyggyggtatttgtygatagyggyggygtttggggttttgggttttyggttaygttatatygtyggtttgggagygtyggagaygygtttgatttygttygtygggtagagttgygggtttygttyggttyggggttttttaygattttttattttgtgtttyggyggagttgygggggttttttttgttttygggtttttgagatttttgatttygtttttagggtagggaatttyggggttygtttttttgggttttttygygattttagagttygygttttaatagaattgggagggtttattgygttagaggagtttttaggattttygttttygtttttygaggtgaggttagaggggagggttygattttaagggaattttagggatttttagtttygtttttttagtagagaattaaggaatttttttygttttggggttttaaaaattttygatygygttttgggagtagagggtttyggggttygattttttygagygtttttagaatttttgattttttttttttgttgagttgtatttaaattagaaaggattttggagggyggtagygttggttgttaggttagygggaaagggaggttyggtyggttgttgtttaygygggtaatttgtyggaaagttttgtttgtttttttggaaaagtygttgtaatggatatagygttgygyggtttttttgygygtttggggygttttttgttttygtttttygtggatggaggttgagyg

SEQ ID NO: 6101 - DNA, 1667 bp, Artificial Sequence
  Description of Artificial Sequence: Synthetic polynucleotide
tyggggtgtaatygtaatattttygtaggttygagttttttyggagttgagtttttgyggttaaatgtygggataaaagyggttttgggttyggaaaaaygyggttagatttggattggagggaggagaagagagagaagyggagyggttattttattygtttataggtatttttatttttattttygttggtttttttttttttygtttygygagtatygtygygttttggagygtygtagtttttagtygygggttggggtagyggagagggtttggaggagggggtygygagygttttygygagagtggtttggttgtaggtggtaaggaaggtgaagtgtaggtattygaggggygtaaaggaggaggaaggygtggggyggggagtgtaaggagatagggattttaggggygggggtggyggtgggaaggaggaggggttgggggagggyggyggaggtgttgggttyggtyggtttaygagggagttgtagaagagttggtttagattttaattagagttgtygtyggttttttgtagtygtygtagygttttygygaaggaggaygtgtygattyggttgygygtttaaggtagaggttygygtyggygttggttgggygtgagttgggaggtygagttgtgagygygaagggagttggagagaygattgyggtattttyggtygtttyggagtatataygattatyggggttgygggattaagggtygygtygttyggaggtygtttttgagygggtttygtagtttygtygtttagygttttttggttttttttygtagttaggttgttaatttattygggagttyggggtatgaayggttayggttttttttatttgtatatgggyggttyggtgtygtagtygttaygggygtttttgtagygtaygtttaagtgygygygttgtygtaattatggygttttgttttggtttaagggttataagygttattgtygttttaaggattgtatttgygagaagtgtatttttattatygagyggtagygggttatggttgygtaggtggygttgygtyggtagtaggttaaygagagtttggagagttttattttygattygttgygygttttgttagggttttygtygtygggggaygtygtygtygtttygtagtygtygttagttttttagtygtygtagtygtagtygtygygttttgttgtygagttggtygyggtygtygtgttgygttggattgtygagtygtagttyggggttttgtaggygtagttygttaagttaggtaagagygtttgaggtgygggagtttggtygggygygggggtaatttyggagtgttagttgtagttttatttgggaggattggaggtaaagttttgggaygtgggtttgtyggggtttttttttttatttttygttaggtyggggttttttttttygggagaagtyggttgagtttggatttagygygagtggtattygygttygtagggaaggygttttygggtagttaaaygaygggattgtgygttagtatygttaggtgtttttttaggttgaagggttyggaaygtgttagattgagtagggagataayggagttgagataggataaaattaaaatttaygtgygtatatttattayggtggggtyg

SEQ ID NO: 6102 - DNA, 433 bp, Artificial Sequence
  Description of Artificial Sequence: Synthetic polynucleotide
tygygagataaatggtgattttttttttgtaggtatygttatatttygggtttagattttggataggygagtyggttgtatygaaggttyggtaggyggattttggyggagygttttagagagaagagtgtagatygygggaggyggagggttttttgttagygtgtttyggttaattagtatttatatygtttgataatyggttaattagaggaygtaaagtttyggggtttgagyggatagtattaggaaggggagygtagtttgtagattgaagttagtggygttgygttgaatgtaattgygygygttygtygggtgagttagygatttgagttaggygggggyggttygatttttttygtttagtttgggttagaggaagtygaaagyggttttagtaaggtgaggygttygaggttgtagaagatyg

SEQ ID NO: 6103 - DNA, 896 bp, Artificial Sequence
  Description of Artificial Sequence: Synthetic polynucleotide
aygaggattaaaggtaygaatttgtttttaygttayggttygggatttagggtgyggggattaygyggagygtagtagagtttagggtaggagtygggaggtygygtaggtagagttygggtagggyggaggggaggtygyggagggtygggtggaggtttttatygttagttttaaggtttgtagtatttttttttggtttttgtttttagggtygatgtgttttygagygaagtygtygtgtttgggtagaaggygttttaggaggygygaggttttagtygyggygttgttttygtygttattgttgttgtttyggtttygyggygtttagtayggtttygattttttagttaggyggyggtygttttygatttygyggtttaggygtagtttttaygttttggtataggattgtatggtygyggttatygttttttgtttyggttygtaagggttagtygygtttttggttttttttttggtttyggtttttygggtggyggttgygttyggtttggagtttttttygttggatagtyggtyggatagatggatggaygttygygggtaatgaatgggygttgygtttaattaagatattygygtaaagttgtggttttatttaaggtatttgtttygtatattttaagyggygttttggaggygggaggtgggttggggttaggaagtttttggttaatgaaagtagatagagggggagggggyggaatagttttygttttygttttttttttttattttttttttagttttttygtggagtttygttttttttggatyggaggttgttatttttagttttatttatttygaygttggttggtgtygggggtygggaygtttygtaygtygttygttagggtgtggagtyg

SEQ ID NO: 6104 - DNA, 1494 bp, Artificial Sequence
  Description of Artificial Sequence: Synthetic polynucleotide
tyggggtttttttaagyggagtattttaaaagtygtatygygtagtagaggtttttaggggtttttattygtttttagtgattayggagyggtttttatttttygtyggygtttggttattttttttttttygtagttttygtttgatttttatgtgattgtaggtaagaatagtttagtttttgtgtttttgtaaagaaygtaaataaaaatgtatattattattatttaataaaygygtaatttygtaagatataaagygttttttaaatatygtttttttggtaatattyggtattttggggttgttaaatygtagataaagaygtttattagygyggggggtgaggagattaagggagagataagattaaygtgtttttattaaygggagyggyggttaaaagggygtyggtgttaggggtgagggayggggtatyggtattaattagyggttygtttyggggttttygyggttaaggygagaaygtaggattaggagtattgttgtttattttttatygtaattygtatatttygggattaygtaayggyggatggggygttygggagyggtttttgtaggggagagtaataggttttygygttttggaggtttggtttgygtttygggtttttaggttaatattttatttttagtttttygatattaagattgtgtttttttgggttaaggaaaaggaaaaatttttaaattttttagttagygagagtaaaagaaaggggtggygggggtgttgaaaggtttaggattatttatygyggggttggggggagtggagatttgygagtagtaaaggaaatttttagattttatttttttaaaaaagttatagtagyggttttygygaagygtygggtygygyggggtggggtaagygtatygttttatygttttayggttygtygttatttttatttttatttttatttttatttttattttygtttttatttttatttttaagygtygagtttagggygttygygtatttttttygtyggygygygygtagggygygggggygygtttyggtttttgggtyggggtttaagygtygtttattyggttygyggygttygtttagggtygygaygygagggggyggaggattggggagtaggggtygtyggggtttttggatgtttygtttygtttaygtttattgtttttttttttgaagtaaygattyggygaggagtttyggattaaaaygtatagatatttaygygtgattgagaaatttaatttygyggtggttygaygttagtttagygtttygtygygtttttttttttagygygygtygtatttgygtygatyggggttgtygyggaggyggtggyggggtttaggttgttggggttgtygtgaygtttgygatyggyggggyggygggygygttttggttaattaggggaygyggtygagtaggtttgtgyggggttttaaattygtttttgggtygttyg

SEQ ID NO: 6105 - DNA, 828 bp, Artificial Sequence
  Description of Artificial Sequence: Synthetic polynucleotide
tygygattttatyggggaaatatygyggatagtygggttagtagygttyggagtttattttaggtttttaaatttgtagtattttttagagygygygygttyggagygggatttgtttgttttagtgtaygtygyggagygaattatygggttggygggggtggaggggtgtaggygtgggggttgygggtygttygggttttgggttttttttgtygtygtygtygtttttygttttyggttaggagtygygygtgaygyggttygtygtaggagtttygaaggygyggygtyggygagttttttttyggtaggygygtgggtggtagyggttaatttgatagtttttygggtygggyggttagygyggaggygttaygttygggtygggggygggttgaygtygtygtygtygygggaggagggataaaggggtgggttttygygggtyggtatttyggyggttgggttgygggttagagtattgttyggtggtgtttaggaggagtaggagtaggagtagaagtagaagyggggttyggagttgygygtttaygygggatttgtgttygaaatgtyggtgygaggagatygygggtttttatttyggygggagttgttaggttggtttygygtaagtgtttttttgtgtygygyggttgggaggagggtygtgagygtgagygtgggagygttgggggttttgttygygtgttgttttgaagttgtttttygatgygtygtaggaagttgggatttttttattyggaygtgggaygtaggggaggggtaggttttatygttygggttgatgattygtggttttyg

SEQ ID NO: 6106 - DNA, 2705 bp, Artificial Sequence
  Description of Artificial Sequence: Synthetic polynucleotide
tygtgtttggtggttygggtggggygtagttgygggaaatgtattyggagttgtgttttttttyggygaatagtttgygttattygtygtatygggaggtggttgggggttgtygagygagtggtgaaygygatgggtggagagygttygaaaygaggtggaaaagggggygggggygaggtayggygtttttttgttttttttttagttatagaygyggyggyggyggttgagttttttagtttyggttatgtgatagtttygaagygttagttgygggggtttyggygtttyggggattattataaaaygtagttaggagagygygtygttgttattgtygtygttttttttttttaagataagttygggagaaaggyggtagttgyggygyggayggttgagttttttyggttagtatttatttagtattygtagaygttttttttagttygtygttygtttttagagttttgygttttatattttttagtagaatttgygggygttgtygttttagaaattattaaagttttttttttttagygatagtttagggttgygygttttttttaatttyggygaygttgygagtttyggagaaaagagaggygttttagaagttaattttttttttttttattttgattttttattttaggaaaaggagaattttagygyggtttggttaagtgtttggttaggggtttgygtttagggtattggaagttttgttgttattggtttttaggatagtaggygtaaatttagatttaaagggttagagtttttattgtttagattttttttttagttattttggtttgggtttttttyggatttagaaaaagtaaagaggtygggaggaaatayggttttttgttatttttttttgtagttagttttagtatttagtttttggttattygggggaagaygtagagaaggyggyggtaaatttggtgtatttygttygygattgtgygygttagtyggtaatygtyggggttagaagttgttagttttygagagttgagtaggttygaaaggttaaggtyggagatattaggtaattyggagaaggtaggagagagaagtagagagggtttggagggygagagggtaaagtggygggattggaggggtygagtgggaattagtgggggtagttaggttttaggaayggagtgyggagagattttgtggtttagtgygggtyggagggyggtggaggagtygggggygatgtygyggtyggggaagagttygtatagygattaaaaatygttttatttttatatttygttgatygttatggtaatttagtattyggtygagaagatgttgtygttgagygatatttataagtttattatggagygttttttttattatygygagtatatatagygttggtagaatagtttgygttataattttttttttaaygattgttttattaagatttygyggaggttygattagtttggtaagggtagtttttgggygttgtatttygattgyggggatatgttygagaayggtagttttttgyggygtygtaagygttttaaggtgttgygygtygattatatttatttgtaygygggaagtattaagagygygtygggygtyggttygggagggtatttttatttttattattattattatttttattattattattattattaygttgtygtatattattattattattattatttattttagtygtygtygtygtygttttygtygtygtygtatatggtatattatttttattagtaatygtttattgtttygtagtygttttygtatttttygttatagttttygtagtaatygttttagtagtygtagttttagtagtygttttatttyggtaagatgtaggaggyggyggtygtggyggyggyggyggyggyggtygyggtagtygyggtgggtagygtgggaygtttgttttagtttttattttaygggttgggttyggtygtygtygttgtygtygyggtygtggygtttaygttaggttttaagtatttttttgttattgagaatattattggtygggattataagggygtgttgtaggttggagggttgtttttggygttygttatgtattatttgggttatttygtgttyggttagtttggtaaygtygttagtttygtgtggtygtaygttggygttatggattyggtggtygtygtygyggtygtygtagtygtagtyggagtttttgtaggttyggagtatggggttttyggggtttyggttaagtttttgtgttattyggtaagttagagtttgtttgttatgtyggtgtttattaagtttaygtttgygttgtygttygtgttygygttgtagtyggggtttattgttttygyggtttygtagtagttttyggygttatttatygtgtgtttygyggtygyggtttygttygttgtttttttgttggagtttatagtttttatttyggtygaaagtaagggyggttttttgtattyggtgttagtgtatttttaggggattyggygggygtggggagattagyggggtgagagaygtygggttyggaatygtttaaattattygayggggagagggygttttggttaggtygggtagagttggygagttttagtttttgttggaayggaaggtatttaaatagaygaataatttyg

SEQ ID NO: 6107 - DNA, 704 bp, Artificial Sequence
  Description of Artificial Sequence: Synthetic polynucleotide
gyggaatgtgggyggggygtagttggggagtttgyggggaatgtgggyggggygtagtggtgggagggygtaggagtgtgggyggggygtagttgggggagggtgtagagatttgagggtttgaggttgtttggttggtttygtttttagaggygggtgtygygttgtygtttaggtatttggggtttttggtgtttgagtgttttattgtyggygygaatataattgttttagttataggygaggtttggttaaggtgtgggygtatttggggtaggttttgagaggtttagygttyggtggtgyggatagaggyggggtatygyggygttygtygtygttttttygtaggtgattatttttttgtaggtgttttygggttttaggtggttgygtgtttgygttatggttgatattttgggygagyggtatttggtgatttgtaagggygygayggtggaggtygaggyggygttgtagaataaggtggtggtattgtatttygyggyggttyggtgygygtygagtygygattttaygtygttgttttgygatttttatayggygttggtggtygaggygyggyggttygygtttttygaagtggttttygtgttagtygayggtagtttttaggagatgttggattttatgygygagttgtatggygtttggttggygttgtttttttaygatttttatyg

SEQ ID NO: 6108 - DNA, 950 bp, Artificial Sequence
  Description of Artificial Sequence: Synthetic polynucleotide
tygggayggagygggttattygagtggtaaatttttttttaatggatgygggaaaagygtatttgtagttttttttttatygttgttaagygagttgattgttaaggagtgygtatttgtttgtttttaaygtgatagtygygggagygtttygtatttygggttttagggaatgaaggagtttgtttygaattggttttagaatttttagtttttagggyggttygygttygtatttattttgattaygtaggtgatttygggttttagtatttggtygttggygtgyggygtttttygagggggtttgggtagyggttygtygtygggtyggttttttttggyggygtttatggtyggggygyggggygtygagggygtattgtygttyggggyggttaggttgggygygttgtagttgttygagagtygygygttygttygttttygggyggtygaygataggtygyggaggttygagttggagagttttaggtgggatattttgtggagtaggtggtttaggttgtygggtttatygtygggygttttgygtagygtttygtyggatattaagtagggagtygtygtyggggtygygygygtygtygaaattttgttttygtygtygtttatygataggttgtggagaaggttatygatygatgttatygagttatttttgaagyggttatatttggtgygtggaagtatgttttttygtgggttygttgtattygttygggygttgttggtgtyggtttyggygygggttgtygygtatagtaggygagttattgttttyggagygggayggagagtgggggtttygggatagttttttggagaaygagagtagagtaagaggatggtgtttttttatygttaaaagttagtatagyggyggtygygtagtttyggttygggagatygttgtttggggttgtayg

SEQ ID NO: 6109 - DNA, 4861 bp, Artificial Sequence
  Description of Artificial Sequence: Synthetic polynucleotide
gygtygtygttttgagtattttgyggaaaatgtgagaattttggggagttattgttgttgtaaggattygygggygggttatygygttggtgggggggttttgtttaaattttgygttttygattttttattygttttataaagggttggtgaagattattttaaggatygtaygaattggttttttaagttttaggaaatygaaataataatygaggyggttttttgttygggttattttyggagygagttttgyggyggatttttggttttygtttttttgggtattygyggtgyggttagatygtttttgttagygattttttggttggtaagggagaggaggtggagtttagattggttttttaygtttagagtggaagygatttttaggattttgtagttatygagtygttygtygtgtttagttygggtttgatggtgaagagtatagttgttttygatagagtyggaggaaaggaagtttaagaagtaattgttygygtttygtttattttgtygagtttatttttatttttatttttattttttgyggatttagaagttgttttatygagttygattgtgttataaaatattttattggaaaaaaagttatygttttygtaagagggggtaggggttttagygatatyggggattyggtttttaggtygagtygaygggttgtttyggggtaattttaggtygttgtggtttgagtttaatygttgggttttygaygtttagaagygggtgtgtgtttggaggtttttyggtygggagggtaggttttagayggggtgggggtgtaggygaggagyggggygtgaataygygtggagygttttgygttayggagtttagggtagagattgtagttttygtygggttggatgygagttttttaggttagagtttagaagygygttgggatttgggtttggtttttgggtttgtgttttttttygtttggttttaattgttygtatttaagattataataaaaaggtttaggaagtaaattttttggaygyggaagggtyggttygygggttttygtygagtgagggggttgygggtggygygggtattttaggtttygtatygtatatygtttttagttttygyggtttttgtygttgggttygttyggtattttygtyggtttttttgtatttttggygygtttttgtttagtaagttgttygttygttggaattgagttttttttgggtygttttttgggtttggtgggagattttaggtygtygttttgtagtatttgtaygggggatygttagtatttgggtgagttagtaygtggattggggattttygaggagatttgaatttaggtaggattaaggagtgtagggtttatatgaggaaatggtggggaaatgtttygggaaatggyggttatttgtttaaatgtygtttggggagyggttyggtttggggagtataagattgttaggaggtttgaaggtgtygygggaaaggaygaaatgttggtttatttaaggggtagaaaaaattgagaggatttyggtgygtattaggtatygagggaatyggggggttgggtagagttttagtggggagaaagaggagagtagttttgtatgtatyggggtatggtttaggaagttgaggggtgggaagttattaggtatatttattatttttttttattttatttttygattttggtattaygtttttatttgtaattggtttaggtttagggatttagtaagatttattttggaaagagtagggygtatttttagtaaggtaagtgattatatttttatagttygttggttttagttttgtatygttttatttgttyggygtggaaaggtatttttgtttttygaagygtttttttaggtttattagttgtagttyggtgaatatagtgyggtttygaygtttttttttggttttggtgtttggttttttagggtttgtygtttttagtttttygyggagttgtaattygagyggtaggtgtggygtattygyggygtygggtagttygggttttgtygttagtaaygtagagtttagttttgaatagtttagyggygttagtgggaatttgaatatygtygtttgttyggtttttagtayggttgygaagaaagagaatgaggattygggtgagttayggtygygtttttttgttttagggattgtygtattaygtgtygygggggtgttygygtttggttagtgttttttagygtaaaatttttaygttttgtyggtyggygtyggtggygtagatggagattttttttaaygttgtygttttttagatttgggagggagtattttttygattttgttygtgttttgttttggagttttttaggttttagttgtttttgagatttyggggtttttgatgaatatgtttgtagttgygagaaattyggagtgtgttttgtttttyggggaaagtagaaattaaaaagaaaayggtagttggttttaagaagatggygtttgttttaattaaattagttttgttgygttagaaaaagaatatgtayggagygtgtatatttgttttttygtgygtggtataatagttatgyggtggttaggagttatttgggtyggagttgggtgtttttyggaaattttaaagtattttgagaatttggaaattattgtttaygttttttatttttagaygtttttttatgtagatgtttttattttttttagttttaaaatgattgtgtgttygttttaaaygaattagtagtaatagagtagatggagaygaaaggtagtygaatggtygagttttagttggatttagaaggagygygttggttttgtygtttttaggttagggagtatygattaggaggtgggggggtgtagggaaggygatttgaagggttggggtttyggttatagygtaggagtttttttttttygataggtttgttattgaggtgygagttttagtttggttggagtyggaaagggtagggtaaggygtaggtaaatgtggggtagaggattygtagggaaaaggtgggagatgggaggtaggtygattttaatgagagaagygagggaggtygatyggtagayggttggaaagygagatagggaaagataagaygagggtggagtgygatggagatagtattattagggtagagtaggtttygttaaattagaagaaagggtagaagttgaaaaggtttgygtaggtygtttaagttttgtagaggtttagtygatttgaaattagaagggatagttaggtagttgtttatagttaggtttttggttttaaggtaaggtygaagtaggttygtattgyggttaaggtygygtttttygttygttggagttttyggggatttygggtyggtttgggttygygttagtatttagttttygggagygtaggttttttttttagaggttygatttttttgggttgggtagtygyggttattttyggttatttttttgyggygaagtttaggygttygtggtttgaggtygtttttatttaygagagttygtagtttggtagtgygtttgtattggggatgtttattyggggttttygggttggaggtygaagggaagtagtgaaggaaagagygaatatttttttygggyggttygygggtaygaggtttggtttttgtgaggtttggagtttgtatttttygtttttygtttggagggtttygagagayggttttagaatttgygtttttagagtagtttttyggggttgtttygatgtyggaggaggttyggggygttttygyggtttagttygttgtttttygttaagttyggttygygatttygyggtygttataygtatttaggtggttgtggaagggtygygtygttagtagygtttgtaygtygaattttagtagttygttygtygyggtagyggyggttgygggygyggygtttttgggttygggtggtttygtgaggatttttttaattatgaagttgygatagyggtgyggtyggtggttygygtagttttygggygggtygaagygygyggygttyggttttttyggtygttgtatygyggygtttattgttgygttygyggtttggyggyggyggyggygayggtttggtttyggygyggggttygygyggggttttaggtyggttygtagttyggggyggygygygggygtyggtttatgttttttttttygtyggtyggtygggyggaggygtagggygygggyggggygygyggggttyggtyggtygaattygggattgygttttttttttaygtygtygygttttttgttyggttagtttygygttatygtttygtttygtttygtttygygtygttgtttttaatttttaggttgagtyggagggagggatttagaagggagggaggyggaagggaggttaaaaaggagggggttaygtgaaagaggtyggtygatygagatygagggagattgagyggagygtaygttttggaaggagagagtyggagagttygggaggtaagatttttagagaygagagtyggagggattaaaygatataggtgagagaaggggtagaggtagayggygtgggttaaataagattttagatagtgatgtgagggtattagagaygttatygagatgtgygtagagagattaaaagaggygtgagagttagygggttgtgaygtgayggagggtatagaggtaggyggggtagaggaagggggyggtaaagaaatgggaatagttagaaaatyggyggtttgatyggtttttaggtagtttyggaaaggtygggaggaggaggggtaaaggtygyg

SEQ ID NO: 6110 - DNA, 999 bp, Artificial Sequence
  Description of Artificial Sequence: Synthetic polynucleotide
gygtaayggtttgtttgygttttttgyggttatagtygatataygttygtagaygtaygtayggatatttygttttttattagygtaygaagaygggaygygygtttatagttttagggttyggttttgtattaygagttaaygygyggtttttagggaggtggygtagaaggtatggygtttttgtttayggygtttyggttttggtagtttttatagagattttygttgatggtttaggtttaaaaggttttttttttygagtttgygtttttttagttttttygttgggttagggtttattattttttttygtyggygagygtgggtttttttggaggygggggtggttttgtagaggtagttttaggtgygygttggagaggtyggttygtygygygggagatattttttttaaagtggaagygttgygtgggtagtagygygggtygggttttyggattttagtttttgttgttttygagattttygtttygygtygtatttttygagtttagygttttygggttgygttgggygtagtggttttyggttagggygtagtyggtttgggygttagagttttttttagttttyggtttagggyggggaagygttagttttygtagtttttgtgaaaggttttttgtgttttttgtttaggtgygygttgtggtatttttggttagaagtatttttggyggtttgttgggtttttygtagtttttggttgagattttgtygtyggygttaaygggttgygttygygttttygttttgttttygttygggtttygggtttygygtgtatattattttttggttttttttattaaaattttttgatttttagttygatgttgtygtygyggttttyggaattgttgtttttagayggygagtyggggttgggagyggtttttayggggayggatttttttyggaggyggaggtggtttttttgaygygaaaggtaggggygygtttyggtttttagyg

SEQ ID NO: 6111 - DNA, 1750 bp, Artificial Sequence
  Description of Artificial Sequence: Synthetic polynucleotide
tygyggttttagggttyggygatttttaaggttttygttttaggygttgygggtaaatagggtttgggggtttttttttatygygggttgagttttygttatttgttttttttgtygygggtatttaagtttyggaatttgygagttaggtagygttttattttygyggygtygtttttgatggttattttgtggatttttygtagtttttagttttygatgtggtattttygattygygtatttttggtttatggagtttaggagygtttggtttaggygtttttygaaattgaagagtttttttatggtggygattttttagaygttaattattygttattgagtygtygyggtttttygtggtttttttatttygattaagttttaaattygygatttttttttttatttygttatttatttttaaatttaagatttattattaaattagtaatttatttttaaatttaagatttatttttaatttygygatgtagtttagaattygygatttagttyggtttattatagtttttagtagygatattygtagttttygattttttagatygagtgagtttaattaagtygttattygygtgttagtagttgggygtttygattttttagatygygtgagtttagtaaagyggttaggygygygtttgtagttyggygttagttyggatttygggagtygttttygagttygygtggayggtagagggyggttgtagttygggygtaggygtygttggtttgygggtttttttgggttygygtaggatatttyggaatygtaggygygtattttttttygtttgagggttygtttggtygtgattttygttttttttttttttygaagagagatggggtygttggtaggggtttttygtagttatyggggatggggttgagggtyggtttttgtttyggtgtagtygtygygggtagatygtttggtttggtygtagttatagygatatttagtttyggttttgygaggttgggygygttagttagtttgggagttgtttggygtttgtagttgggygtttaggtggtggagtatggtttgggyggtttttggatygygagtgtttttggtttgagagttygttagattttgtttttattyggttttttttttgttagagttygagatttttagttaggggttttttgtaattatyggggatggggttgagggtyggttttygtttttgtgtagttgttgtaggatagatygtttggtttggtygtagttatagggatatttggttttggttttgagatgtggggagtgygggygggttygagagttgtttggaggttgttgtttgtatatagaaggyggttgtagtttgggtgtttaggygggttggaggtgtatggtttggtyggtttygggatygttagygygtttagtttgagggtttttaggtygtgtttttygtttatttttttatttgagggggattggggtygttggtatgggtattyggtagttatttygtgtggggttgagyggygggttttyggttttgtttttgtgtagtygtygttgggtagaatgtttggtttggttgtagttattgggatatttggttttggttttgygatgttgggagygygagygggttyggaggttgttaggtagttgttgtttgtatatagagggygattgtagtttgggygtttaggyggyggagtatggtttgggtggtttttggaatgygtgygyg

SEQ ID NO: 6112 - DNA, 391 bp, Artificial Sequence
  Description of Artificial Sequence: Synthetic polynucleotide
gygtaggtygtagaattttttygygaaggtgtygtaggaggagtygtggygyggtatygtttygtyggygttygtgttttttygygygygttttyggggttttyggtttttygggttygtatygtygttygyggggttggttgygtaggyggygggtttygttagtagtagtaggagtagygaygtttagattttygggtgttgtyggggyggtygygttattygtgygtatagatttygtagttaggtygttygggtygtagygggggygtygygggygygggtygggattgagttttygtygaggttattagtaygygttygygtagtygyggagtttttygtattttygtttttttgtttyggtttgygtattttygttttagtatyg

SEQ ID NO: 6113 - DNA, 817 bp, Artificial Sequence
  Description of Artificial Sequence: Synthetic polynucleotide
tygggatagagaygggtaggtagyggtgggtygaagggttyggggattagggttygggtygggaggggygggygttttatygyggtttgttggaaggygtttttggtgtaggtgtygttatttyggtaggagatggtagggattttttggaggagtagygygtatttgtgttggygygygyggygggtggagatgtaatygaygygyggtattaygtagtttttggaygagaaggttaygatggttaygygygtggtygtgggtattayggggaagtyggatagtagtttgyggaygaatatgagttygttgyggaagttgatttygtttaygttggaygaattatttattaggaagataagttttaggygttygttgagttttygtagtagtygtaygygtygtyggaaygtttggtttagtygttttattttgtttttygtygtttygtygttaggagygggyggygyggggatattttygggggtttygggygyggtttyggggaagaggyggaagttgaaattgygygayggggatatttgttgaaaggtygtttagttygaaaygagygttagattttagtaataaaaggttaggygaggttatatygygttggagatagagyggttgtttyggagygtaggyggyggttygggygggaagaggygttgggyggtyggattygtagaggggygtgygyggagttgggygyggggtagyggttaagagttttagygtttttttatttgatattggggatagatataatttagattttttagtagttygggaatttyggagggaayggygygyg

SEQ ID NO: 6114 - DNA, 814 bp, Artificial Sequence
  Description of Artificial Sequence: Synthetic polynucleotide
gygaagaaagtygaggygtygaggtttttaaagttggtagtttygggtggyggtgtaggggygaagggggggyggggggaatygtyggatatgyggttttggagttgggtgttgtatttggggttgttgagygtygygttgggttgygggttggtygagygttttygtygggttyggagagattygygggtyggtygattttygygtttygtygtyggttyggttatttgygttattygggyggttygyggtygtygygtttygtygtygtygtygtygtygtygggyggtgtttgggaagtygtgygygtttttyggyggyggtagtagygggaggygaggggygttatygaggagtygagttygtygagtygggygttttattttagygggygaggygagtagttgygttttygggtygatttygagttgtttygggaygygtttaygttgtaagtgtggttgygagyggaggggggttagaggttttyggtagtgattataggtaggtgagggygtttyggygggygttgtatygtttttgyggttttagaggttygygggtgtttgggygygggtggygggygggtygggggtttgygggygtgtttgtgygagagttgtttygygagyggygtagagatattygggygagttgagagttttattttgttttatyggtggaatgggtatattyggaaggygtagttgttttatttttgggaggaatttggggagtttttttggyggtttygyggattttyggttagtgagggttggttttyggagtttagggtaygtaattygtgtttyg

SEQ ID NO: 6115 - DNA, 1429 bp, Artificial Sequence
  Description of Artificial Sequence: Synthetic polynucleotide
gygygtataatgaagtagttgtttgtagygttaattagttggygattttgaggttattgygtggttttgttttggtygtttttaataaygggatagagygtygggtatygygtattgattaattatttttttttygyggtygttyggtttttttttttttttttygtygggtttggttttatttttttygggyggtttgygtttttttttttygyggtttyggtttygtggygtyggtagtttygggagtttygggaagtttgygygyggtagtttygtagtyggtagtygggagtttygtagttttyggggagygtyggggttggtggtttttttgttggaggaggygtggagggagygtttttgttttgagttagttayggtggtyggttggaggttgttattttattatgygtygggtttgtttgtttgygaggaagtagatggtggggaggtaggtagyggygagagtggttagatttgaatttygtttatttgttattttttataaaaggtaggttygggggatttaggtattygttgttattttttgggggagggggaggtygaggggtygtygttttyggygtttgygaaggtttygtatttgtyggtgttygttttttttattttttgttttttttttggttgtagtttttygtatygygtaaatgttatttaygtgttaggatgtgtgtttatagtttgtttttttgtttgtttagtttyggyggatagggtttagyggttgygygaygtttttygtygttgggggagattagtaaagttattygtttttggatttyggggtttgggtttttagatttygtttygyggygggagatgygtttgagttttttatagayggagygygttttagtttgaygtagagggatgaatagataagygtatygggygggaatttygattgtttgtgtatttggggtyggtttagygttggaygtgggttgttggttygagaggtggygayggaatygygtgtttatatgtatgggggagtggaaagtygtagggtgtgtttttaygttttttgagtagttygyggtaagagttgttgagtattttatttttygtttttagattttaaggtagtttttygagttttttaaaygtattgtatttagttttttygagagtggagttgtattaaggataaatattttagygttattataaattttttttgttttttgggygatttttagatgaattttggtgatttttagattggatttttattttttattttttttgaaagaaagtgttttagatgygttaataaaatatgtttatgtattygtgtaggygttygtatgtttgygygtyggtygtgtgtaggygtygaagtataygtttgtgtgaatataygggtaygygygtttttgggtttagtggtttttttttygyg

SEQ ID NO: 6116 - DNA, 7708 bp, Artificial Sequence
  Description of Artificial Sequence: Synthetic polynucleotide
tygggaagagygagaagttataygttgggttgtagattgggttttagygggtttggagygtggatatgttggttggttttttttttygggagttatagttttygtyggtttygttatttaggttttgtygggtatttaggaggtttgtayggtygtttgtagttygttgtgtagagttygggtygaaggyggagttygatgggaaayggtyggtygaaggtttttgtaattttgttataggtttgttttttygggttttttaggygggtgtttgaggtygyggttttaggtygaggggagatygtagtgagaygagtatttttttgttgygtttttttaggatagagggtttaatttttttttttgaagatatygtaggaagttgttygtattttaaaaattttaaatttygygtttttttttttttttgttttttttttattttygttttttagtttygtttattagtttttattatttygatttttttttgttttttttgtttttttttttttttttgggtttttygttttttyggagtaygygttgttagggtttggggygtygagyggttaatggtayggyggtaggaygtgatgttaggygyggttgtagaaaaggygyggaggtttgygttggygyggattgtagagtyggggttgggttaggygygygtttggagagtattgygygyggttgggttygyggtyggyggtttttttttttattttgtttttttttttttttttttttttttattttttttttygtttttttttttttttttttttttttttttttaattttttyggtggttygattyggttygtaggtttyggagaaatttttattttagtygtygatttagygtttaagagggtygttttgggttgggggygtattttagggaggggaggggtttaggtagttgggtygtygyggatatttagyggttttagggtgaatttygatygtagtygtygtygtttygggtagagtttgygtttttgttttgygtttygggygttgaagtygggygggygatgttygyggygtgaaagygttygyggygggygtygatttttgttttagttttttgtttttttygtttygtttgtttygtgtttttgtgattttggttttggygtygtygtttaggygtttygtaatgtagttgtttttgygtttyggygggaggygttttgtttygygagygttyggggttyggagttyggtttgggggtttagtygagttygggyggggtyggggtygyggtggygatgtatygggttygttagygttaggagygttaggtagttgaggyggggggtaagttttttttyggaggagtygygttttyggtttygtyggtttygtygygatgttgttttatagtttgtygggtttygaggtgtayggggttatygaygagatggatygtagggttaagagygaggttttygttattagtttygttatygatygyggygatatygagayggtaggygygyggttgtggggtyggggttgagagttgggatggggtygggttagttagygtttttgtttttygaagtttggggagygtttttygtgtygtaygggattgggtgttggggattttyggttagaatgtaaggtyggtggttttyggttygggggaaattyggttgttgggaygtagaagggaaataaggttgaaatygaaatttyggttttgggggtagaggagagygtttttttygaattggaagygaagttttattygyggttyggggyggttttttttttattttgttyggtgtyggggtygatagtttygygtttttttttatttttyggtttyggttgttggyggygtygygagyggygttagggaagggygaattagttgggagtattggggttttagtyggtttgggtygtttttagtttttyggtaatyggggattttttttaatttttagygtagttttagaggtygaagttttyggggttaatatttgtygttgatygygtttttagatttttgattggttagatttagttaggttagggttgggagtttaggtttyggtttggttttygtygaaggagattttatttggatttttatatttggtttygygggtttagttttaaatagttagtttttygttttaggtttttttgggggttagaygagtagatattgttygattagygggtttagaagtgatttttaggaggtygyggaggtggggagtaygggagaagtttttttgtttygggagtaggagtagyggygttagtgttttttyggtttttgagygttttttyggttagattttttttgttggttagtttggatagggaagtatttgggttgaatttgttttttatttayggattttgagggtgtttttgtattttatttattttattttyggatttaagagggttttagttygtgtggtagaggagttagaagttggttgatttgttttggttttaatttttggtttaaggatttagggattattggagttggggtttaggaatttygttgtttttttaaagaggattttgtgtggagggtgatttaatggttattttatttttygggtggtttatttaagaagtagtttagggaaagtttttggagggtttgattggagtagttgttttggtttttaaatatagttygagtattttgggggaaaggatagggaggattggaaggaagagaggtaagtattagagttatttaggttaggagttyggtttgggttygtggttggygagggttgygtaggtaggtttgggttttgaatygtttagaaatggaaatgggttttttggggtggggggaagygygtygtatgttttggtagtttttttygygtttagggtagttaaggttatagagggagttgtgggtgtyggtttttyggyggyggaggggtygttggttgaygtaggygttgttgtttttygttttttttttttygtagattatgtygtttattagtagtgatygygtygygttgtgygtyggttgygggggtaagatttyggatygttattatttgttggyggtggataagtagtggtatatgygttgttttaagtgttgygagtgtaagtttaatttggagtyggagtttatttgttttagtaaggayggtagtatttattgtaaggaagattattataggtagtttttttatttaattgttttttaggatttttttttttaattttaggtatagttttatagtttggttttttttttttygtttagttttaggagagggtttattatttaggattttttygttttttttttaagttttttaagttattataagttgggtgataattttttaaagtagtaatttggggagtttttggaaaggtttaygaagtaggagaattagaaaaaaagtagaagttgtttttttgttyggagtttagattataaaaaagtttgagttgggatttttgtttttttttttttttgaagttttttgagttaattygaggttatagaaataggtatttttaaatttaggtagtttaagttggagtgaaatatagttggaaagagagttgtgggagtgggtgtatttttaggttttttgagaaaatgggaatgaaaggtggttaagattaaagaattagaattattagtagattttaagttttttgtttttttttttttttagttttaggattagggtttatgtatattttttttgtttttgtttttaygtttgtgtttttttttttttttttgtttttgtgttttttttaaattataaaagttagtaggatttttaggygttggtttggagggaggagtaaaggttgaggagggggtaagtggtaagtgtttttttttatttttaggtaaaggtttttttagggtttgyggagattttgggtgaagtagaagtttttgtaggtataagtgtgttaagggaaattattttaggataggattaggtttgggttaaaatttagtttttttttttttttattttttaaataaaggtygggttgttygttttgaggaggggattgtttttygtagtagtagyggtatttggaggaggaaaaggggggtatttaatygtgtgtttttatagtttttttttttatggtttttataggygtttttttgtgtagygttgygttygttgttatttgggtatttyggtttyggagatggtgatgygygttygggatttggtttattattttaattgttttaygtgtattaygtgtaataagatgttgattaygggygattatttyggtatgaaggatagtttggtttattgtygtttgtatttygaggygttgttgtagggygagtatttygtatattttaattatgtygaygtggtagyggyggtygttgtagtygyggyggttaagagygyggggttgggygtagtaggggttaattttttgggttttttttattataatggygtgggtattgtgtagaaggggyggtygaggaaaygtaagagttygggtttyggtgyggatttggyggtttataaygttggtgagtgygyggygtaygaagygtttttatagggttgggggaaagtgtgyggtttygayggtygggagttggattgaatttttgtgtgttgggtaaatagygagttttaagtatyggayggtttygtagaagggatattagttttttgggtttttagattgtgygttttyggttggagygggaggagagggtgtagtggttttttgttgtttygggtgtagggttttgtttttgataaattgtttttttggagatggttttttggtttgggtttttgttttattttgttaggtaggaagtggtagggatggagaaagtaaggyggygttgaygttaaataggttttgggttggygyggttgagggtygggaattggggtagygaaggaaygaggtagggyggygagggttttaagagaaagggttggttgtggttyggggygtygagttyggtttggagtgyggtttgatttygtgaaatgttttaagggyggtaggtttggggaattygggtttggggaatttaggaaagtaaaggttgyggttttttttgttyggttygatttttttttaaagataggttttagttttttyggattttttttttygagttttttggygtttgttggggtgagggtygtgattttyggaagygagtttttygggyggggaygagatyggagtaggtttggtttygygttggggtggggtggggtggggtgaggtggggggtttggttyggattttyggtatttttgaattttaggttattttyggagaagttttgttttttttygygtttttttttgtttaggatagttgtagaggttttgagtttyggtaaatgagtygttaatatttgttygaagtttgtaaggttyggaaaggtttatgatttttygggttttygaattagagtttatgtgtaattattttttttttttygtttgtaatagaattagatttggagattttgtgttttttttttttttttttttagtttaatgtataagtagaaaaaagtaaaaataaaaataaatttaagattgtgtagagggtgttayggygggaagaagttagttatttttattttaaagaatttgagttgaatagagagggaaatgaggggygggtgttygttttaaygaaatygtttggaggattatggggygtgtgtttttgtgtgyggaattgggaggaaaaygtagtttttagtttggtaaatggtgaagtagyggtaggtyggtyggtggygyggatttaagatttgttgaaggtattattatagatgtagttttttggaatttttatttttttttttttattattttttaaaaaaagataaaatygagtttagatyggtttttttaatattaagtygtttttatttattaagtgggttaatttttattyggaagtatttygyggggttyggttttagggtatttggtggttggggagttgtattgtttttttgggtayggaggttyggygtyggttttaggattgtgtaaaaagagagtagaaggtatagagatttatttttgttttttgttgtttagtygtygtttgttttagygaggtgggttggaggttgaattttaagttttgtttaatttttataagagatattttttatttagttattttattttttttttggtttttttttttttttttttttttttygtttttttygttttttttttttatttttgtttttgtgtgtgtygtgtttgttttygtgttttttttttygattttggtyggggtttttagttttgagagaaayggygttyggtgygtyggyggtggttatgyggttggttttttyggggttttygggattaggttggggaaagagggtattttttyggtttttyggggtttagtttagtttttttagatttggygttygttttttttttttttttygtattggtaggagagaaatggtygtagtgtgggtygyggggtagttaggattggaaagyggggattttggagggtgygatygyggayggggtgtgygggygygggtygtgtgygtgtgygtgtagggtttygattayggggataygagtttgtttgtggtagtgttttatattttgtggtttagttaygaygattttttgtaaagttttttgttttggggatagttttttygaggygyggyggtattttattgaagggyggygagttgggggtygagtggggagggggygtygtyggggygtygggygttgggtttatagtagagtygygggtygyggggtyggaaagttttttyggggyggggtygtagyggttttttttygtagtttttygggttygggtttyggtggaayggaaatttttttttatttygggaggggttgttagygggttgggggtgygaaaayggyggtaggagygggygaggggttygggtygygtattttgygtttgggtttgygygtygyggtygygggagtttygygyggatyggtyggaygttyggttttttttagttttagttttttgtgtgtgtgtgtttggyggygtaattattgatttgattttaatttattatttagataattgaatttataatttygtttttagtaaaatgaggygaagttagatttgattataggtttagttttagygataagagttygaaattygatgggttaataatagattaygagtaaattatttatgattttaygagttttttagttttattgaatyggtttaattgagaggaaaaaaaaaaaaaaggagagagaaagttygggtttttttttttttttyggtttttygttttttttyggattygattttggggaatttygattygttttygggtattgggggygggagtgagggggttyggggygtyggttaaatttgggttttayggttgtttttttygtygtygttttttgtttttgtttttggtyggtttyggtttygttatttagggtyggtttttttttttttttttttattttttttttttttttttttttttattttttygttaataayggtttyggaaaaggtttttttygtagggatygggtttttyggagtttygggatttagttyggttatyggattttygttataagttgygtttgttttygggattygttttttttttyg

SEQ ID NO: 6117 - DNA, 3969 bp, Artificial Sequence
  Description of Artificial Sequence: Synthetic polynucleotide
tygggagtgtgggtgtttygggggygtgggtgttttaggagtgtgggtgtttygggggygtgggtgtttygggagtgtgggtgtttygggggygtgggtgtttygggagtgtgggtgtttyggaggygagggtgtttygggagtgtgggtgtttygggggagtgggtgtttygggagtgtgggtgtttyggaggygagggtgtttygggagtgtgggtgtttygggggygtgggtgtttygggagtgtgggtgtttygggggagtgggtgtttygggagtgtgggtgtttyggaggygagggtgtttygggagtgtgggtgtttygggggagtgggtgtttygggagtgtgggtgtttyggaggygagggtgtttygggagtgtgggtgtttygggggygtgggtgtttygggagygtgggtgtttygggggygtgggtgtttygggagtgtgggtgtttygggggygtgggtgtttygggagtgtgggtgtttygggggygtgggtgtttygggagtgtgggtgtttygggagtgtgggtgtttyggaggygagggtgtttygggagtgtgygtgtttygggggygtgggtgtttygggggygtgggtgtttygggggygtgggtgtttyggaggygagggtattttagaagtgtgagtgttttaggggygtgggtgtttygggggtgtgggtgtttygggggygtgggtgtttygggagtgtgggtgtttyggaggtgagggtgtttygggagtgtgggtgtttyggaggygagggtgtttygggagtgtgggtgtttygggggygtgggtgtttygggagtgtgggtgtttyggaggtgagggtgtttygggagtgtgggtgtttyggaggygagggtgtttygggagtgtgggtgttttaggggygtgggtgtttygggagtgtgggtgtttyggaggygagggtgtttygggagtgtgggtgtttyggaggygagggtgtttygggagtgtgggtgtttygggggygtgggtgtttygggggttgtgggtgtttygggagtgtgggtgtttyggaggygagggtgtttygggagtgtgggtgtttyggaggygagggtgtttygggagtgtgggtgtttygggggtgtgggtgtttygggggtgtgggtgtttygggagtgtgggtgtttygggggagtgggtgtttygggagtgtgggtgtttyggaggygagggtgttttaggagygtgggtgtttyggaggygagggtgtttygggagygtgggtgtttygggggygtgggtgtttygggagtgtgggtgtttygggggagtgggtgtttygggagtgtgggtgtttyggaggygagggtgttttaggagtgtgggtgtttygggggygtgggtgtttygggagtgtgggtgttttagaggygagggtattttagaagtgtgagtgtttygggggtgtgggtgtttygggggtygtgggtgtttygggagtgtgggtgttttagaggygagggtgtttygggagtgtgggtgttttaggggtgtgggtgtttygggggygtgggtgtttygggagtgtgggtgtttygggggagtgggtgtttygggagtgtgggtgtttyggaggygagggtgtttygggagtgtgggtgtttyggaggygagggtgtttygggagygtgggtgtttygggggygtgggtgtttygggagygtgggtgttttaggggtgtgggtgtttygggggygtgggtgtttygggagtgtgggtgtttygggggagtggatgtttygggagtgtgggtgtttyggaggygagggtgtttygggagtgtgggtgtttyggaggygagggtgtttygggagtgtgggtgtttygggggygtgggtgtttygggagtgtgggtgtttygggggygtgggtattttagaagtgtgagtgttttaggggygtgggtgttyggggggygtgggtgtttygggggtgtgggtgtttygggggtygtgggtgtttygggagygtgggtgtyggggattgtagggatatgggtttttttttttatttttgtygtttagggtattttttgtgaggattyggagttygtgagtttttatttttttgagttygattttttggtgttttygtttgtatttttagtttttttttaaattagattagttttttaggggygtygaygtgtgaaattgattttaaagaaaataggtagtggtttttttttyggttttaygtggtttagtagygtttatttttygttttttttttygygtttagtaattaatttaggtygtttttgtagaattygggtttttgtttatyggtttatagygtttatttgaggtttygtttttttagtaaaggtygttttttyggaaygygttttttgyggtttttttagagtttttttygygygtttttttagtttygttygttttttttyggggtttttttttttygtttgtttttaggttygttttttttygygggttgaggtaggttygggtagtayggtygtttyggggygggggttattttttattatygygtggtgtttatagtttayggygttttygggtgayggttttttyggttgtagggygttttgaagagyggtttgttyggagttgagygtayggggttgtttygttttgggygtttttggtttttattagtttygtttttttatgggtaaaayggyggttttgtttgtttataagtaatygtyggggttayggaggggttaggagttgyggyggggggttgtgtttttaggatyggttttaggaggattygygygaggtttggagtttttaggggtygygggggatagaggggttttaagyggaggyggggaaggyggtagaagtttaggatygttaagagttggygaggaagttyggggttygttgtygggggagtygggtaggggtygygtttyggattaggayggaggtttggggaaggyggatttggtygtyggagaygyggtgygggtggagaygagggatttggattttygygggyggttgtayggatttttaygygyggtttaygtgggttttagggggttgttyggtattyggggtygygtygtttttttttygtyggtatygattygtagttttaygtttaygyggyggygttygtagtttttttyggttyggttttygygygtgttttygagygygttttygggattagttttyggaagtagagaggttaggtygggaaggatgggygaygggggtggttgattygggagtayggtagggaggatatttagttaggttygygagtagygtygttttttttttttaggaygggygggaatttgygatgttttygtygygtgggtygtggggyggttttygaggtattgggyggggtaygyggtgggygttttayggaattygtattttttagttttygtaatttaggaggaagtttayggygttttgtatyggygtyggygygttaaygygtttttggaggagttgyggtygggttttttggagagggagtgtaaggaggagtagtgttttttygaggaggttygggagatttttaaggaygyggagaggayggtgagtttagtttyggggygtttygygtygyggatattgtaggyggyggtgaattaggtygygtggggtygtttgygtttttttggttgyggttgtgggyggygaataygtagyggygttygygyggygttttttgygggggtygtttttygttyggggtgatttygtttttttgggygatgttttttatttttaggtaygygtttttttygtgyggtygtatygygtatgtyggtttttatattagaaaataygatttgtaaagtatatttagggtgttttttttaattttttaagggagtttttttagttttygaagggtttagggtagtttgygtatygtagaygygygyggttygtagaagggayg

SEQ ID NO: 6118 - DNA, 2490 bp, Artificial Sequence
  Description of Artificial Sequence: Synthetic polynucleotide
gygtttttttttygttygaggtttatttagygttagygttyggtttttttgtagygattgggttttaatgtygtaygaggggttttygygaaggttaatggtattatttttttagttttttttttatttttattttttatttttttaggttgtggggggttaggggtygaggttygygyggygygtattttttaggygtatttttatygttaggtatttttggaagyggtagaagggatagygtttgygttgygttttgtygattttgtagttttggttttyggtgtaygtgtagtgtttgttgttttgtatygtgygtttgaagaagttttgygggagttgagagttagygaggtttygtagygttygtttgtygtatttttgtygygygttygtygtttattttgtagtttttataygtgagtagttygtagtggtagtyggatattttgttttygtatayggggtatagttygtttaggttttygtygtaygaatagtttatgttygyggygttygtttgyggagggatagygggttagggagggtyggyggagatyggtagtttggggttttygyggtygtygttttagtygttgtygtyggttygtygygtaattttttttttgtgtttaggygttgtygtyggtatttatygagygtttygygtagygtttyggggtgggttyggtgtagttttygygttyggtttttttttgttaggttttaygttttygtttygttyggggggtttttttygygyggatttygtygygttygatttggggttttygggttygatgygtttygattgggattygtttgtttgagaataaaatttygattttgagaaaaagagatgggtttagtygyggggaagaygttaggggatttaggagygttggggygttyggttygggtgttttgggaattygatagagaygaaggaggtagagatagagttygggggagttagagatgggaagaaattttggygagagataaygatygaygttatygggygtagataygaggttagttygagagtgttagagatatagatattgagaygtttagttagagagaattyggyggggaygagatatagggagggatggagagagatagggagatagagagagagagagagagagagagagaygagagagagagagagagagagaaaygaggggtgggggattggattagagattyggagagatagyggaggttygaagagaaaatttaagagagattgaygtagagttagagatataaygatagaygatagatagagaygtygagaygagaggagtttyggagagaygaggtyggggagttatagaaatayggagagaaaatttggaggyggaagygtttagttygagggtyggggataggggaygygyggaaatttgtygggtaggagtttaagygttaaggygaggtttygtagggtyggatttagaygggggttygggtygtaggaggyggaaaaygayggygtygggatygagagttygaaaaygtagagtygtygggatttttttttygggggagataaagtygtagtagygayggtaaygggaggygtagttygagtygtygttgttatygggaygtygggyggggagatttygggygggggtyggygggtttygggaagtygagttygaggygagggagygatttygggyggagaggygaagttyggaggagggaagygygaagagttagggttygggaygygagagggggygygayggyggttgyggtyggttyggygtttatttggtygtttttgygagtagygtttygygtttygttygygyggagttygtatttttyggtygygtygtygtygtyggygaggagtygtattygggygtagygtygttygttygygatgayggtygttygggtyggggayggggaggygggggygyggggttggyggygygggggtttyggtttttttttttygttttttygttttttattttgtttttttgttttttttygtatygtygtyggggtygtttygaggygtatttgggattygggttttttagtygttatttygttttgygttaattygtygygttggggtygggggtyggtttttttatatyggygygtgyggtattygggggyggaggttyggtygtgttttttttttaagttyggttygygtyggtatttttttygtagtttagttygagttttygtttttattttttaggttttttagtygtagttyggtttttyggatttygagygyggttagagagttgyggagttygagtgtttygygatttgggtaggtatagggtagtgggggttttgggttattygtttgtagtgggaggaggtagtttttgtttgtgaatttagttgggtygtggygaatgttaygygggtggttggtygtattatagygtggaagtgggtaagggygagtggygatygtggtygaggttyggatttayg

SEQ ID NO: 6119 - DNA, 5370 bp, Artificial Sequence
  Description of Artificial Sequence: Synthetic polynucleotide
tygtgttygagggaggygggtagygtagaggagagggtgtaaggttttaagaagaggagyggggggattagggyggggtttaatggagttggggygttygtagattggaaggagtygggattttygttttagagtttttttttttattttygttttttttagtgatttygagttttygatttagttttttttttaggtagagagaattygaggttgtttttgtygttgaaatttgagygggagagtatttygaagtygtttgygtggagygagtagttttygygttatgggttagaggygttygggagaatttgygggttayggattatattygtaggggtttggyggagtaaggtgtygttygtygtttgygggtaggagtyggttttgggtttyggtttttgttgtgtygtttagtyggtygttttttygttttttyggtaagggaagyggtggagaggygygggagtttygattgtgttggagagatttgggatttttgygygtttgygtgygaaggattygagatyggttaatttagttgggagtaygggataygaggagtgaggataaagggtaaggaayggggtttatagggagggtgtgtgtgtgtgtgtgtgtgtgtgtgtgtgtgtgtgtgtgtgtgtgtgtgtgtgtgtgtgtagggggaatgaatggatagyggggaaggtatgtagaggggtttaaggggtgtggatttagtagttttattttagattagagaaggtagttaggttttggygtttatygagttagygtttttatttgggygygggtygtatggyggtagattattttatattygttttggtggygtgggatatgattggtaggagygyggaagaggygttgagaatgtatgygtattyggatagattagaygyggtayggagggggtattttttataagtttttttgttttgagattaggttttygagtggttyggggaatgygtttttgggtatagttagyggttttagatyggtattggaygttaattygagttagagaagtttgggagattggatygtaggggtttttatttagttaaggagggggaaaggagagttgtagggtaggagaggttaggtatagggaaggtggggaggggatggagttttgygttaggagttgggggtgtagggtttgtgaygagagagtattattatgtgtattttgaaggagagggagagggtttgggtttggaaygaggattttygtttgtaggtagtygtttagtttyggttgtagggatggatygygattagtagagggtagaaagtgtttggttygttygtyggtttygagtygygtttygygtttygggattttggttttgtgygtygaagttttgttygttyggtttttttttgtagtagtygygttttygttttagatgttyggagaaggyggtttaggtttagtttaatttygygggtttaggtttggggtttttaggttaagtaaagaggggatygagatgtgggagagaaattttatattgattgtttatttttttygatttagttatataaaggygtttagaaatataygaaggtataaagttttttattatatataaatatatatatatatatatatgttaggagataygygagtatatagaagtatttagaatttyggagataagtatagataygtaaagttgatagagatatttatatagaaaaggatygtagatataatatagaggttgagataygtataaagatttaggttttygtatgaaatgatgyggatatatattttagatataggtaygaaggatttatatatttatatatataygggtgtaggggatttagatatagatttatagatttatttttgggagtttggaaggttgtagggatatatatatygtgtgtgtagagttaaggagtatayggaggtaagagtygtagaggygggggttygataygtatagatatatatagatatttatygatatataygtaggtagggtagggygggagtttttaattttttataaagtygggttttttygyggggtttygyggygtagggggttatttttgattaagtttttygtaggttttaaattygattygttttttygtttttagygaggttaggggattygttttttatgtttttygttttygttyggtttygygtygttgtttygtttygggaggggtyggggtygtttygtagyggatygyggggggttagttygtygttatttygggtygtaatygtttttttgtttttyggtgagtygygygtyggtggggattaygggtygtagatagtyggttygaygttgtggtttttygtatyggaygygggtgttaggttyggttggygyggaagtyggtagttttatttygttagttttygygtttygttgtygaggtttattttgtttaggttggttagagtattgtttttgattygygygttttagygatttttggtygggtattygattygttaaaggatttygattttggtagttaatttaatttttttagagtygttattttggggttattatttttttttagygttttttattgtaaattttaggaggttygggttttgtttattgtttttgtttttgttyggggattttttttttagttttagttgttttttaaattttyggtygtttgaatttaggtttgattttttttgtygttttagtgttttttattttygatttyggggttttaattttttatyggtttagtttttygtttaatttttgttaggttyggagtttttttagattttttatttatattttaggtttatttttygtttttgggtttgggttttttttgtaygagtttagggttagtygttttygttttttgttygttttygtttttygtttttgggagtyggtttttttygyggattaagyggtttygagtaggygtygtygttygggggatttygatttagttttygygatttatttyggtygatagtygggggtttttaagyggttattttyggtyggygtygttttttggyggagtygtygygttttttgtygttygygtagtttggtttygttyggggttatttttygtagygttggagttttataaaatattaataataaagaaggtagaggagaaaaaagaaagttttygttttttaatttttaaattaattttttaagggggtggagtagagggatttgtttygaagaygattaaaatttttgygaggggttygyggggyggtygggtyggggagtyggggtttgagttyggggttaggygyggygyggggygygggttaggggygyggagtttyggggygygygggggggygggayggtattatttgaygtggagtyggyggygtatttyggygtagggatatyggtygyggggtttaaatgttaggaagtttygggaggtgaggyggttygtattttttygtygttagttttagttttaaattyggyggtttagygggygtattatggtattggagtagygyggggagygygttyggagtttygyggttygttgygtttygttygggatttygttgygtygygygtttttttygyggttygyggggtygtttttgtatttttattttttttttygtttgtygtygtygttatygttatygtygtygtygtttttttttygyggtttygtttgtagtagtygtygtygtygggtttygggattgataagtaggtgatagaggagtyggygygygtggttgtaagtgttygggagagygyggygygggttgtagtygtttyggttygttygtaygaygtyggggttyggggttagygygtygtygttttaygatygtygggggtyggygtaatttttgttttgygggggtygygttttttyggttttagggtygyggtggyggagagygggtggaygggtyggygggygagtagttyggtyggyggggttygtagygygtttygygttttatggatatagtaataggtttygagtygttggagaggtgtttttttygygggtagayggattgygttaagatgttggayggtattaagatggaggagtaygttttgygtttygggttygttattttgggggtgttgttgggtgagtgyggggtyggaaygttygagtggtttygggygtgggatggggygtygttyggttgtggataygggygttggggttaayggataaaggaaatgggtttgtaggatatggggaggaggtagagataggatttttggagtgatygttagagggtygtaagtaygttttyggtaggygttttgaggggataggatagttttagtygttatttattattttttttaggtttaggttttagagttgttatttygatgtggtaggtggygggtggtaggggtgatggaggatttagtaattattttggygagtttgggagaggygtaaggttatttggggtgggggagattttaagagaaaaaygtttttttggttatttaaattatagattttggggagatyggggatagaagattaygaaygttatygtggggygtgttagttagygagygttttagttttatttygtttgttttggttttagtyggttattttgygtygtgttygttgttatttgttttaatayggagygyggatttttyggagaaggggagagtatagygtygagttaaggttygaggttygyggtttttttaygtyggagttygaggattgggayggattagtyggggtygttyggtttttggygyggyggttyggggagygtaggyggtaggyggtgatttygggyggttygagttttyggggtygagggttgtgggttyggtgygatygggaygtyggggttgggtygggyggygttgayggtygggttttygttttgtgygttataggtttygattgttygtatttygtygtttgygagggttgttagyggtttattttygatygttttttgatgygagttaaygagtygttttggtaygaggagtgtttgtagtgygyggygtgttagtaagtttttattattagttgttattttygggatyggaaattgtattgtaaataagattattaatagtaagygtttttygtttttttttttygttatygttyggtattygagttyggttagttttttgtygggttyggttygygttygttttgtygtyggttttgtgygyggttgggtygggtagttttaagggtttygagagttgygygttttggggttggggyggattagtttagtttagygggtattgatggggttttgggagttttyggayggtttttagttgttattygttgtttyggaattttgygttgggtyggtyg

SEQ ID NO: 6120 - DNA, 3120 bp, Artificial Sequence
  Description of Artificial Sequence: Synthetic polynucleotide
gygggagagtttttttygaygttyggataygyggatggggyggtttttagyggtttttattygygtatttttttaggtttatttttyggyggttygtgtagtatgttttttattgggagtgggatgatattatgtataggtttttgggtttygtagtygagtygygggtattagyggyggttgatgaatttyggtgttattaggggtttagttyggatttgggaatygygygttttaataygygtatayggttttgttttttttaaagygtagtttttttatttagtagttgatttatggaggaattygattttgggaygygttaggttgaagttyggagtttagggttttgtagtagttttygggttttttagygtttyggggatttttggtggttygggggtttttttgggttggggtyggggtgtttygttaggtggggttttaygyggtttagaaagagttagtgattttttttggagttattgtaggttttygttggagggagtaagattggyggggagagttggtatttttattttttgttgagtatagttttygtttttttttaagtttttttgtygattttttygggttggttaaaagtagtaagttygggaggtttgtttattgagagaatagaaaattaggggttgygggggagaatttaagatttttttttygtttgagaaaygtgygaagttttttagtttttggaggtaattaggyggttygaaagtygagttttyggygyggatgttagggtygattttagtttttttttttttgygttttagttygagggyggygagtggtaggtttttttttattttgtttttttttttttggatttggtttgtaggggggaaatgtggttgtattaatttataaatatttatttttaatagatttgtatttgtggagatttygaataaagatagtttagggggattataaaaattttaaatttygtttttttttyggatttggtgttttaaatgttaattataggygagttatatttaatagtaayggggaaaggygagtaggtttyggggagggaggtggggggagagttyggttattaaatgtaattttttattatgaaaaggatttygtyggttttattttttaataagattatgttaygaatataagtatttaggatggtgttgagtgatagggttttgtygtttaattagaggttgtgtygtttaaatygyggggttttttgttttayggagtgaaygayggaaatttgttattttaatttttttatttatgttaagtatagaaaagaagtygagtattttataatygtgttttttttatttttttygaggayggygggaagagggggtttyggttttgtagttttttgaygtttttygttttygagygygtttgggttttaggagtyggagygttgtygtgggggygggggaaggggtggttttgygggtgttttaattggtagygtttggaaaatggggatagtgattttaygattagaggatgaatggggggagggttagtgggatgtgtttgttttttttgatygagagtaygggttttgttttgttttttttttttaggaaaggtggtatttygggtgtatatttattatttttattaaagygggattgattagaagagagaggtygaatggagatgttaggttggggttttyggyggggtagatttygttggatttttgggattaatgtygtagygttygtatttttgtaggtttttagggttggttattttyggttgtatgttyggtttttttttttygagggtgaatttttttgttttatttttayggaaattttttttttygttaggttygtggygtttttttygttattttygtygtygtygtygttattttygttttatygtttgtagggtttttttgyggygttttggtygtagagatttagttttgtttgtygattggtttttygaygtygtygtygtgtttgagtttygttgtttgttyggataagtagaatttyggtaggygtagygggygtygaggtttgggttttagtygtggygttygtttyggygtagtggggagtygygggygtyggagaagyggtygygttgtttygggttattgtatyggttgaaaaaattaaaagtaaaattaatatttagaaaygaagtttgygtgttttygggggtttygttttgttttttttatggatatgggggtggggagttygtggggttttagtttaaaggttttagttagtggaatyggagggggatttyggaggaatttgtttttgatgtttyggttttttggttttttattagaattygtagaggattygttttggagttttygtgygttttggtagaggtyggggaygttagagtgtaygtagttttttgygygtygagtttaggtttygggygtagggaggatygggttgagagtagggtgttatttygtaaaagygataggtaaggattgttttatggggagggagaaggagtaggaagtgatgtttttatttttgatagtatagggatygggagtttygatggaggaaatttttttygggtaggaygagtagagggataggatatggtyggggattatgggattygttgttattaagtatgggaygggtaggygagagyggggaaggggatygatggagttagaagttttgagtttatttttygttygtttttttttggagttttttttgtaatttyggtttagtyggtaatyggtttttttttttaggttaggggtgggggagagattttttttttygaaatatttgatattaattttgtttttttggtaagaaaaataagttttgtttggaaaggggtgggtggggggygtygagygagygagggaaggagtaaggaggyggyggyggagtaaattttgyggattaggttttagygttttygttttatttttagtttygyggyggtgatttgtgtgygggggtttgtgattttgtaagtattaaayggttygygggaatyggtygagtttagagggatagtgggtygaagggyggtttaagataaygtagatggtttttattagttyggtygggttygtagygttygtyggttygttyg

SEQ ID NO: 6121 - DNA, 3120 bp, Artificial Sequence; identical to SEQ ID NO: 6120
  Description of Artificial Sequence: Synthetic polynucleotide

(The sequence listing continues in the following parts.)
